United States Patent Application Publication US 2019/0348154 A1 - sequence listing, part 49

SEQ ID NO: 181073 - DNA, 1242 bp, Klebsiella oxytoca
atggcacgtctgacaaaaccgctcacggatacagagataaaaaacgccaggcctaaagaagcggactacacgctacatgatggcgatggtctgcaactgctgatcaaaaccagcggaaaaaaagtctggcaatatcgttatttccggccttttacccaaaaacgggcaaaactgacttttgggccttatcccgaagtcaccctggccgatgcccgacaacttcgccacgaagcccggacccttctgaccaaagatatcgatccttacacacaccaacaatcccagcgcaagcaagcgttggaagctcaatccaacacctttaaggtcgttgccgaacgctggctacagttaaaaaagaacagcatcaccgccgactatgcctcagacatctggcgttccctcgaaaaagatattttccctgccatcggcgaaataagtattacagacattaaagcacccattctggtacaggctatccagccagtacaatcaagaggcgcgctggaaacagtcaggcgcttatgtcagcggattaatgaggtgatgatttatgccatgaacgttggtctgatcgataccgctcccagcgttaacatcagcaaggcattcgagaaaccgcagaaaaaacacatgcccagcatccgcccggatcaactaccacaactgatgcaaacgatgcggctggcaagcattgaattaccaacccggtgtttattcatgtggcagcttctcactctcacccgcccttccgaggcttctgatacacgctggcaggaaatcgatctggacgccagagaatggcacatcccggccgagcgcatgaaaatgaagcgtgtacatatcgttccactgtcagttcaggcattagccgttctggaacttatgcggcccttaagcagacaacgggaatatgttttctccagccgaattaaaccgttacagccaatgagtagccagacggtcaatgccgcactaaaacgtgccggattgggtggtattctggtatcacacggcatgcggtcaatcgcaagcactgcactcaatgagcaaggctttccgcccgatgtcatcgaagccgctctcgctcatgtggataaaaatgaagtacgccgtgcttataaccgcagcgactatctggagcaacgccgtcccatgatgcaatggtgggccgactttgtgaaagcagcagataatggcagcgtactggagggcgggatccggggactgaaagcgattgagtga

SEQ ID NO: 181074 - DNA, 795 bp, Klebsiella oxytoca
atgagtttgcgccaggcctgcaggacattatcgctgagcaggacggtgtatttttatcagcccgatacccggcgtgatgaaccagtgatccacgcgctgactgaactggcagaacgctatccgcgctacggttttaagaagctgttccagctgctgcgcaggcagggcaatacttggaaccataaacgtgttcaccggatttattgcctgctgaaactgaattttcgtcgcaagggaaaacagcggttgccagtgcgtaatccagctccactggcgacgccgcaagcgttaaaccagtgctggtccatcgattttatgcacgacgcactggtctgcggcagacgcttccggaccttcaatgtggtggatgattttaaccgtgaaggactggcgatagaaatcgacctgaatatcccggctcagcgagtcatccgggtgctggacaggatcgtggcaaaccgcggctacccgctgaaaatgcggatggacaacgggccagagctggtctcgctggctctggcacaatgggccgaagaacatggcgtacagctcgaatttatcaagccgggtaagccgacgcaaaatgcttttatcgaacggttcaaccggacataccggacagaaatcctggatttttacctgttcagaacacggaatgaagcacgggaaattaccgagcgctggctgatggaatataacaacgagcggcctcatgaatccctgaataaccagacgccggaagagtaccggctgatggccgaaaacccggaactctcaaaaagtgcatggaactaa

SEQ ID NO: 181075 - DNA, 267 bp, Klebsiella oxytoca
atgcgtaaagcccgattcactgaacaccagatcatcgccgttctgaagtccgtcgaagccggacgtaccgtcaaggaggtgtgccgtgaggccgctatttcggaagccagctattacaactggaaggcgaaatatggcgggatggaagcggctgatattaaaaaaatcaaagatctggaagacgagaatcggaggcttaaacagatgtttgctgatctcagccttgagtgccgggcacttaaagacgtcatcgaaaaaaagctttaa

SEQ ID NO: 181076 - DNA, 1590 bp, Klebsiella oxytoca
atgtctttaggctcatcaacctccacatgcagcactacgactacaagtaattttagtgacgataacttggacgtctggctcaatagatgtctggcacaaaagcatcgagtggcatacatcactgcggggtatctctgcaagttggttgatcttgatgaggtagggctcgcatttcaccttgctgatcctggaccgaaagcaaaagtaagtctgaaaaagctagtcccaaaatgcttgctctatagtctagatatggggcttgaagccttcctttctgcccagaccgctgatagttcttggacatttacgcctgtaaagagtaaggacgcagtggatattttcatcgctgcccgtgatgggctactcggaagaactaaaggtcgggggcaagagatctcagaaaaaacagcgcaaaaagtttgggctgatgcgggtgcaagatgcatgtttgaaggctgtgcgcatgatctgtcagagattgccttatggaccaaggctgcccgagttggatatctggcacatatcgtcgcatcggacccagaggggcctaggggtagtcaggttgattcacaccgtcttgccaatgttgccgaaaacatcatgttgatgtgtgatgagcaccatcgcctgattgattcttttgcacctcaatattacaccgccgacattctgaatgaaatgcgccggtctcaccgtgatattgtacgaaattatctggactcattagcgtttcagcgcacaaaagcagtgactttgcatgcaaacctagcaaacgtgccgacctactttcacgactctgagctaattgaagccattgtggcgaccagacgagccatggaaccaggtgttgtccattatatgcgacgaaaatcacagcgagacgaccgtcatctacctgagttttggtaccaatatttgcgtgagcatgagcatcatattcgagagctcgttaccggatttaattccagtaacggtttgagcaccgaaaaccttgccatcttccctttgcaccatatccctaccttggttttggccggtcgagtgatgggtgaagcgcaggctattcaagttttccagtacgacaggggccgcaagacctgggcgtgggactcaaaggctaatgctcatccagcaggtacttttagagtgagccctctgccgccgacgcgcgcagacgaagtttttataacacttgagctgtcggccagtcttgatgaggattcactgtctcctgaattcagaggcgaagtcgattccggcaaaatcccttggattcgcgtcactacctcagagacaggagctggctgtattgggtgtccggaggatcttgaacagttttcgcgagctgcgcgcgcagcaattgttcacgctcaagatgtgatgagagttgcaaaggtgcacctaatcgctatcagccctgccagtacggtgttccgttttggccagatgttgcaggcaggcaaccaccctgagtacgtggtttatgaccgcgcaggacgggactacaaatttgttcctgctctatctatcactggccatgatgtatctgccactcacggacagaattccgtcagtatttctcttcgataa

SEQ ID NO: 181077 - DNA, 1275 bp, Klebsiella oxytoca
atgaataaaaccaaaagtgctgaactagtgatccacgccgaacagacacgttttgatcgattgacgaactcttttgagtcgtatgctggtgtaatggatggcgtggcgtccgactctacaagatcgcagcccgaatacaggcattgggaaaaagcattaaatgaagtgaatacgcacatcgcggtgcgtgaagaagaaatcgaggctgccaagggtgcttatcaagaagtggctgagctactcgctgccaatctttcgtggccacccgaagccatatcaattttgcctcaaggctcagtcagcaccaaaaccctaatacggtcgcccaacgggggggagaaatttgacatcgatgcggtatgtcagatcgatatatctcgtattgaagcctcagagcctatggtattttttgaatccattggtaaggctttgattgaactgaatgctcaagcaaaaaggcgttgctggaatcttcctttcccacagcaaccgttttacttagagttcactccatcagtaccattgaatactgttcctcagaatatctatgaatccatggctccgcgctatcgtgctgttcgatacacggaaacggcattggcagtggtggacacccctactacaagctggaaaacctccaatccggcgggtatgagcaagtgggtggacgatacctcgaagcgtgctctgatccttgttccagcgatggagtcattttctaagggccgttttatggatagcatttcaccagtaccagatcaaacagtggaaattaccgatacccttagagtagccattcgtctgttcaaacgtcatcgagatatgtgcgtaaggcgcggcctcattgaaagggggaccaagccgatctcggtgattattgttaccttactgaccacttgctatgaaggtttggcagatctgggacgtgtgtttcggcaccctgtagaggtgctggatgagctcgcggtttacatgccgcaccttttacttcagcttgacggtaagtaccgggtggataatcccaccgttgagggcgagaattttgccgagaaatggaatgatgatgagggagagcgttaccgatcatttatgacttggtgtgatgcgctgtcagcagatctcaaaactattctggcattaactgaaccacaagctattaccaagcgtgtgcgggaggtgttcggtattccggcaccaactggagggggtaatgggctgcccacaatcgagacgccaaaacctaaagctactccggttacgaccgggcttgcttga

SEQ ID NO: 181078 - DNA, 1680 bp, Klebsiella oxytoca
atgaacttggctctcattcgccagcaattcccaggtttactgccttcagccctttcccgggaaggcggtataactgcttaccaattgcagttacctactttcgaggaggaaagggggtttaagtgggccgagttacgtctccctgccgaattcccagagtgcgctaaggcattcattcaactttcccccgatgcggtgctgcggcttccgcaccttgatggcgctggggttctatgcatggaaggtgacccaggaccaggctcgggttactctacggaagagagagttctttatcttctaaatgcttttttggagaatttcctcaaaccttggttgaatggcagtttggatggagcttttgaggcggaagtaatcaactactgggctattgaggtcgctagggctcgctcacaacacgaccctgtgagagaggtttggaccttagatcctcctcccaaaaaggcaatgatcaggagcggtttgctcctgacgccgaataggataatcgtggccgcggatgaggcccttcgcatcaccaatcgcgtggttcagtccgtgggagctgagcaacgtactgcggtgatgattgcggacgtcccgatttcatatgtacttacccccagtacctggcctaaatcaatgggtgatctagagcgcatactgaaaggtcgccttcctccctcggactattcgaagtttcaggtacatcgtagtcgccgcggtcgagagatacatcgtgtagtcttattgaggaatgctgaaattgctttcgcgtatctgcttcctggcggtccgccgacgatccagaatatcgggaagggaaaatggaaacgaaagaaatcctttccttctctatccaaagtgttgccactcagtacgtctcgccttgacccaaattggaccgccgggcgagatcagcatccagaggttgaccagcggcaggcaaaacatgtgctggtgttaggtgcaggggctctaggtagttcgatagttgctcaccttgctaaggccggtgttggacgaatttctttggttgatgctgacaccatgtctccgccaaatgtagggcgacatcttcttggggcggagtctatcggtgagaacaaagcatgggcagtggccaaacgggtgaatttggcattcccttcaaccgaggtagcaccatactttaagaatacggcagcgtggttgaaagaaaattctttggctgaagtgcatgcggtgctcgacctcaccggtgagcctgatgtgagaatgcaaattgagaacgctcgacaaaagcaaccatgcccgttattgattggttggatggagccctatgtggctgctgcccatgcttgttttttgccgtcgggacaatcgtggctgcaaggcgcaatagatccgttgtatagcttacaggcggtggagtggcccgatgaggttatccaacaagaacccgggtgtagtagtcggtttcagagttacactgccgctgcagcagaacatgccgttgctttgattgctgaatgcgttttggaaatgattgacgcctcagtcgaatcaattctccctaaagtgcggagctgggtgcgtgggcaactttatttggatgaacattggccgggattgaaacataacgagtgggcgagtattgcatctgaatttgaaggcttgattctgacgagaccatttccatga

SEQ ID NO: 181079 - DNA, 570 bp, Klebsiella oxytoca
atgagcaggatctttttctatcccgacaatagtcaatatgtcatgtttacagatcaggttttggcacacatgtacaagcatgctcaacgttgtctgtggcagaaggaggcaggaggggaaatatttagctcagagccgagctctcacggtctgatcataagtaacgctatggggccaagtcctgccgaccaacggcttaggaatgcttggaatccagatgtgaaagcctctgataggaacaggcaaactgaattcgaacaatacagacatgctgtaggtttgtggcatacacatccagagtgtactccatcgccgtcttggcgggatcagaaaactacatgggagtaccttgactcctttgagggggataggagtcgttattttatggtgattatcggcaaccgcggcagcgttccagccatgactgtctgggtggccatcgttcagtcgtctcgtgactggatacagctaagcgaagctaaaagtctcactcaagcagataatcaagcagataatcttaagaaggccgattacaacttattgcggctaaagcaggtagctgccgagtga

SEQ ID NO: 181080 - DNA, 561 bp, Klebsiella oxytoca
atgagccagaagcgtgaagtttatatctcggtcgacgtcgagacgtctggcccaatccccggcgtgtacagcatgctcacgatcggagcctgtaacgtctacgatccagaacaagtgttttcgtgtgaactgaagccaatttcggacaacgtcgatccagaggcactggcagtaacagggctgtccatggagaccctagcactaaagggattaaatcctgaaactgcaatgatgcaatttcaggattgggtagagtcggtcacgggtacagacggggtgcccgtatttgtcgggctgaacgccccatttgattggtcgttcatcaattactatttccactactttctgaggtcgaacccttttggttttaccgcactggatatcaaagcgctttttatggggacaacaggctcgagttgggcagggacacgttcaagccagatggctacttggcttgactccaaatatgaaggaaaacttcatgaggcgttagatgatgctcaatatcaggcggaaatatttcgcttgattagggctatcaaaccatttcaacagagatga

SEQ ID NO: 181081 - DNA, 603 bp, Klebsiella oxytoca
atgataaacttaattccaatagggaaagttatatccttgattgctgtggtctatgccgttatatgctgtctgattttatgggttttatgggttgtattcgataaaaatataactttttcctctgctatatcaattgcaacagggggctcactacttctcaatgcccttttattatcactgttttactttggttggcgccggttatggaaagctttgcctatattaaacgatctgctcttccctgatttaaatggaacctgggatatggttatccattgggaatggggagataaaaaaggtacatcacgagctaatgcaacgattaagcaatcctttcttaaaattggaatggatgttgaagctgaaggctcagactcacagacgttagtggctaaacctaagaaggatgaagaaactgggcgagcagtactctattatgtctttttaacaactcctaaacataaagcaaattttgacgaagaagctccgtatagaggaacggcaattcttaaactaagcctaaaaggtaaacgcatacttaatgggaactacttcacaagccgtaaaactgttggtcattacgagttgacacgtattgagtaa

SEQ ID NO: 181082 - DNA, 1206 bp, Klebsiella oxytoca
atgccaacaaaaaacgccgaagattttctcaccgcactagccgaggaacttgcaatcagtgactcacgatacgagcaggcatgtcggagctatacatcacttggagaatggcttcaccgtccggagtccgccgttgccaaatacgatccacaagtttacgtacagggttcattccgactgggtacagcgattcgtcctttgaatgatgcagaggagtacgatgtagattctgtttgcttactccaaagcctcggtaccaaggatcttactcagtgtaatttaaagactctggtcggcgatgagatcaaagcttatcgtaaagctcaaaatatggttaagcccgttcgtgaaggccggcgctgctgggttctggactatgcagacggcgcccaatttcacatggatgtcgtcccctctctccctaacgctacccagcaacgtatattacttgagacttttggctacgatctcaaatggtccgagacagcaatggtcattactgatatcgaatctcctgtttaccaggtgctttctgataattggcagcgttcaaatcccaagggatatgctgagtggttcaaaatgcggatgagagatgtttttgaacagcggagaaaaatgcttgcggaatcaatcaaagctagtgtcgaggagattcctgactacaaagttcggaccccgctccagtcagcgataatgatcttgaaacgccaccgtgacggtatgtttgaaaagcgttacgacgagcgccctatatcgatcattattactacccttgccgcgcatgcttataatggtgaagtaaagatagccgatgctctctattcaatcctttctcgaatggactcgtttatcgaacgtgatggggatcgttatatcattcgaaacccttccgaccccctcgaaaatttcgcggataaatggccgaatcatcctgagagaaaagatgcgttctacgagtggctcgaccaggctcggcaagattttggaaatttagcacatcagattgaaaaacgccgcttagttgaaagcgtccgacctcatatgggagcggtagcagacagagctgcaacacgccttagccctacgccaggatcaatgttgcaaccagcaacaggagttgcagctctgggggttgctgcagcgagcacaccggcatttccaaatactcgtcgggagccaacttcaccaaaggggtttgcatga

SEQ ID NO: 181083 - DNA, 1719 bp, Klebsiella oxytoca
atgatttggtgggttgatcagtctatccgtgtgcagtccgaacgtaccaccatttcggatctggaagagcggaatacatggctcactaatataaagtggcatgtagtcagtaacttgcgacttgctgctgactttgatttgcaagttgcagaacgtctaattccgttaacaattacataccccgaatatttccctgatgttcctccttcagtcgttccacgggatgggaaacgtttgtctgatcatcaatatggagaggctggagaactttgtttacagtttcgctcagataattggactcccgaaatcaccggcgcaatgatgattgaaagtgcctatcgtttacttttatccgagcaggagactggggaacccgctccatcagaacatcgagtccttcccgctcagcgggcaagaaatgccgtatttcgtttcctttactctccaagagtctttgaaggtttgttgatggtagaagagggtcaggtggtcgatgcggaaattcaagagcacctttatgctggtgcttttgcagctcagcttacacgaattggacctgtagatgattctatgtggatctcaccgaacagacgtggttacggggcgagtactgtagcgactaagattatccgtttgcccgaaggcgcatcagtcgcgtacgacaatcttgatgaactggtttcattgcttgaaagccacaacttcgaatctgtgctccccgaattattacaggtatcaggtccttcagggattattcttttcaatggcactaatcatcaggtctcaatggcttacggtgcttcagacaatcgcaagctggtcaactacgacaaaattattgttgatattgaccgtgtgcgtcttgctcccgagtttgctcgtcttaaaactgcgaaagttgcaatagtcggttgcggatccgttgggtcaaaagtagccgtacatctcgctcgatctggtgttgggcaattcgtactcgttgatggagatttacttgcttcagggaatctggttcgcaacgagttagattggcgggccgttggtatgcataaatcacaagcactggcagccaggattaaggaagtcaatgccgaatgcgaagttattagccgcactacagttttaggtgggcaagagagtggaggagcaacttctgcaacgatgagatatatcgcagagagcgatttaatcatagacgcaaccgctgacccagtggttttcaatctttgcgcatcaatttcacgaagggcaaagaaaccgatttgctgggcacaagtattcggcggtggggctgggggtatagtcgttcgactacgcccgggtaaagatcccacgccacttaccgccagacagcggatagaaaactggtatttcgagcagggtatagcctggcctgaaagcgagatttcgcagccatactcacaacttgatgcctctggggaaccgctaattgcagatgacgccgatgtttccgttattgcagcgcacttatctcgttatgcaactgatcttctcgtccgccccaattcgacaattttcccttattccgtctaccttatcggaatgactgacagctggatattcaccgccccatttgacgttagaccaattgatcttggagaaagtgatggatgggatatagaagtacaaccaggagatcccgaggcttaccagcaattgctagccgacttgttccccggagaaaatgatgcaggttga

SEQ ID NO: 181084 - DNA, 1020 bp, Klebsiella oxytoca
gtgggcctagctctagtgagaattggagtaccgctctttgcagtggttcttacaggattgactcttggtgtgacaataccctcatcccaaggcaactatattttcagctgggactcttccggtagtgctggcgcgctaagttggggcgtgtttatcatcgctagcataatcgtcttcttaggaatttcactgattgttcgagatatccgtagtgaaagcagaaagaaagtgatcgttattgaagcaagagggctgagagattaccagggacaacctttagcttccgcaattcctttatcaataccgggacgccgtgaacaggtgacaattgaccttagaaaggggggaatggccgatggtgcgatcctcagtcccgatgcagcaatacgtcggctgacgaacctcccagacgacttagctcgaaggtgtgatgggctagacaggtcagatatatcattcgtactcggtggacttgcaccagttccatttctctttttgctcggtgtcattgtcgatgatgagtctcgaacattaatcatggactgggatcggagacagcatacctggcgagcgcttactgatgaagatgatggtaaccgtttcgttgtaacagggcttgatgccataaacactactgtaaaacgggtagctctctgcgtgtctgcatcttacgatgttcttgaagctgatgtgcaaatggttgaaagtgatgttccaatcatcaaagcagatttagtaggacgtaatactcattctcactggtcggaatctaagcagcagcatctcgcgcagcagtttctagatattgtcatgtctttagcacagcaaggtattgtcgaaatatcgctatttctggcggcccccgcgagtctcacgctgcgattgggtactatctacgacaaacgtaatctccctcgtatcgaagttaaccaatatgaagcaagtgaccctaagcgatttccctgggcggttcgaatgcccgtagccggtttgccccatgcagagttgatgcaacgataa

SEQ ID NO: 181085 - DNA, 1188 bp, Klebsiella oxytoca
gtggtatcgaccagcggcactaagttatggtatttccgctatcgcctcgatggtaaagaaagccgtttggcttttgacccctatcctcagaccacgctggcgggagcccgcgaaaagcgcgatgcagcacgtaagttgctggcatccggtatcagctcttctcagcttcgtaaaacgaacaatcccaccgttgatgaatcccgtacattccagcatgcagcgatgtcatggcacaccagcagtcttaaactctggtcggaagcccacgccgataaaattctcaccggcctgaaacgctacgttttccccaccattggcgcaatggatatcactcaggttgaaacccgccatctggcgcagcttgtgaaggcgattgacgataaaggtgtgcatgacgtcgccggtcgggtgcgtcagcatctgaccaaaattatgcgccacgcggtacagcaaggagtaatcaaatataatccagcttacgatctggatggagtcgtgaccccggtcatgacccaacatcaccctgccctgccgctaaaacgcctgcatgaactgctggagaaggtagatagctacaaaggccggatactgacccgtctggcgctggaattaagcctgcatgttttcctgcgctccagtgagctacgttttgtccgctggaatgaattcaacctgaaagcgcatatctggagtgtacccgcccagcgcgaagccgtaaacggcgtgcgattctcagaacgcggtgccaagatgaaggatgaacatctggttccgctgtcacggcaggcggtcaccctgctgaaacagattcaggtgatttccggtgagtcggtcttcgtttttccgggcgcacatactctgaacaagccgatgagtgagaacaccatcaacaaggcgctgcgcgtcattggttatgacaccaaaacaaaagtatgcggacacggtttcagagcgatggcctgcagtgccccgaatgaaagcggactgtggtcagaagatgctatcgaacggcagatgagtcacagggagcgaaacggcatacgggcggcttatatccataaagcccagtacctggaggcccggacggagatgatgcagtggtggtcagattatctggatgtatgcagggacaattacgttgcaccatatatttatgcccgacagaataaaatgaccgccgttgactga

SEQ ID NO: 181086 - DNA, 660 bp, Klebsiella oxytoca
atgactggaaaaattacactcattctcgccgatgaccatgcaatggtttgcaaggggttgattgctttctttgacaccacccgggatattgaggtaattgctgtggcagcatccggagcacaggtcgtggctgaagtcaggaaacatgcggtcgatgtagtattacttgacctgtttatgcctgatcagtctgcagtcgaaactgtgcgccagattaaaaaagccagcccgcgcagccagatcattatgataacctctcatgaaggtgatgaatatgtagttccaatgacacaggcaggtgcaatctcctatattctgaaagatataagtcccgaagatcttattgatgcggtgcgaaaagcagcaatgggtgaaagtacattaagcccacgagttgcaaggaggctggtatcagctgttacgcaggctcagagggtaaaaatgcaggaaaaccaactccacgaagacttaactgagcgtgagatggaagtattgcaatgtattgcggagggattgtcgaatatggatatagcgatacggctgaatatatctgaaaaaacagtgaaatcacatgtgagtaatattttgagcaagctttacttaacagaccgtactcaggtcgccgtctatgcgtggcgagagaaaattgtaaaggaatag

SEQ ID NO: 181087 - DNA, 1419 bp, Klebsiella oxytoca
atgatgaggtacttatggtgtcagcttgcaataagctacacgttgcttaccttttgtgcgatggttctgctcattgtcatgctgtacggtatcaacgattataacgattttcgcacagccattactctcgacaatgttgagcaacatgtgatcagtgaaaaactcactgtcgcgcaggctatccgtgcgaccaataatcgtgactggatagaaaaagcgcgggatgatattcgtgaaaatttaataaacctggaaaatggcagtggtaaccaaatttaccgtattaccaattccacccttcccgaagtatatattcagattgttgacagaaatagtcgtcttttgatctctgatcctgttgattttccagaagaagtaaagtatgagtttactgtgcagaaaaatctgtctaccacacagagcagtgtcaaatggttgactgaaaatagggctgtctggttggatatacccataatggatcaccatgatgagtttattgggcgcttacgtattttatttatagccgaatttaatctctgggtgcagttgaaaagtatctttgattttcttctctacacctggaattatgtacttcttttatccgtgccgattggtatcgcctgtggtctgctggcttcgcactatgtaacaagacaattgcggaaaatgaacgaggttacagaaaactggcggcaaggtaattttgacgcgcgtattgcactgccgaatgatgatgtactacttaggcatagtcagtacctcaatgatatggctcaggacctggaattgttcctgcgccttaaagaaaatatcgcggtgagtgatgaacgtacccgtctggcgcgtgaattgcatgatacggtcaaacaaaaactatttgcgctgggattgcagctggcaaccgccaaagccagggcccctgtgatggatgcttctcgtgaacatattcttgaggcggaggtcattacccgagaagcacagcatgatctcatggaaatcattactcagctgcgaccctccggaatcagcaacaccacgctttaccaaagtatcagtatcattgccgaagatttcaggcggcgcttcagtgtaaatatcgaattgaataattttgatctggcccgatttaatgctcatagtgagcaccaggtactgcgggttatacaggaatcattgatgaatgcagtacgtcacggcaaggcgtctcaaatagtgattaccggaaagatagagtacgacattgccatattgaccattactgataatggcagaggttttactgtcggcaaaaagaccagtggattaggcatcacctccatgcgtgatcgggtgcacgatttaccacaaggtacgtttgatataaaaagcactgtaggtacaggaacacaaatcacactttcatgggaaaacaaatcatga

SEQ ID NO: 181088 - DNA, 339 bp, Klebsiella oxytoca
atgacaaacatgatctcatatcagggacttgttcgcaccttccctaaagcactcgtattgaccgtggcggctaccacattctgtctgatgaccagcccggcgttcgcggttgaggaaaccacgccgcagaatatgacctgtcaggaatttatggatatgaacccaaaaagcatgaccccggtggccttctgggtagtgaatcgcaacaccgactttagcggcggcgactatgttgactggcatgaagtcgagaccgtttcggtaccgaaaatgctgcaggagtgccacaagaaccccgccgctaaacttggcgatctcagcgcggtcatcaaaaaataa

SEQ ID NO: 181089 - DNA, 804 bp, Klebsiella oxytoca
atgaaccagacttctaccttaaccgggcagtgcgtggccgagtttcttggcaccggattgctcattttcttcggcgcgggctgcgtcgctgcgctgcgggtcgccggggccagctttggtcagtgggagatcagtattatctggggccttggcgtcgccatggccatctacctgacggccggtgtctccggcgcgcaccttaatccggcggtgaccattgccctgtggctgttcgcctgttttgaacgccgcaaggtgctgccgtttattgttgcccagacggccggggccttctgcgccgccgcgctggtgtatgggctctatcgccagctgtttctcgatcttgaacagagtcagcatatcgtgcgcggcactgccgccagccttaacctggccggggtcttttccacgtacccgcatccacatatcacttttatacaagcgtttgccgttgagaccaccatcacggcaatcctgatggcgatgatcatggccctgaccgacgacggcaacggaattccgcgcgggccgctggcgccgttgctgattggcttgctgatcgccgtgatcggcgcgtcgatggggccgctaaccggctttgcgctgaatccggcgcgcgacttcggcccaaaactgtttaccagtctggccgggtggggctcgatcgcctttaccggtgggctggcgatcccttactttctggtgccgctgctggcgccggtggtgggggcgattatcggggcgtttttgtatcgcaagcttatcggccgccttctgccgtgcgaatgcggtatcgataagtaa

SEQ ID NO: 181090 - DNA, 1824 bp, Klebsiella oxytoca; identical to SEQ ID NO: 78950

SEQ ID NO: 181091 - DNA, 426 bp, Klebsiella oxytoca; identical to SEQ ID NO: 78949

SEQ ID NO: 181092 - DNA, 585 bp, Klebsiella oxytoca; identical to SEQ ID NO: 78948

SEQ ID NO: 181093 - DNA, 1668 bp, Klebsiella oxytoca
atgaaaagatcaaaacgatttgcagtactggcccagcgccccgtcaatcaggacgggctgattggcgagtggcctgaagaggggctgatcgccatggacagcccctttgacccggtctcttcagtaaaagtggacaacggtctgatcgtcgaactggacggcaaacgccgggaccagtttgacatgatcgaccgatttatcgccgattacgcgatcaacgttgagcgcacagagcaggcaatgcgcctggaggcggtggaaatagcccgcatgctggtggatattcacgtcagccgggaggagatcattgccatcactaccgccatcacgccggccaaagcggtcgaggtgatggcgcagatgaacgtggtggagatgatgatggcgctgcagaagatgcgtgcccgccggaccccctccaaccagtgccacgtcaccaatctcaaagataatccggtgcagattgccgctgacgccgccgaggccgggatccgcggcttctcagaacaggagaccacggtcggtatcgcgcgctatgcgccgtttaacgccctggcgctgttggtcggttcgcagtgcggccgtcccggcgtgttgacgcagtgctcggtggaagaggccaccgagctggagctgggcatgcgtggcttaaccagctacgccgagacggtgtcggtctacggcactgaagcggtatttaccgacggcgatgatactccgtggtcaaaggcgttcctcgcctcggcctacgcctcccgcgggttgaaaatgcgctacacctccggcaccggatccgaagcgctgatgggctattcggagagcaagtcgatgctctacctcgaatcgcgctgcatcttcattaccaaaggcgccggggttcaggggctgcaaaacggcgcggtgagctgtatcggcatgaccggcgctgtgccgtcgggcattcgggcggtgctggcggaaaacctgatcgcctctatgctcgacctcgaagtggcgtccgctaacgaccagactttctcccactcggatattcgccgcaccgcgcgcaccctgatgcagatgctgccgggcaccgactttattttctccggctacagcgcggtgccgaactacgacaacatgttcgccggctcgaacttcgatgcggaagattttgatgattacaacatcctgcagcgtgacctgatggttgacggcggcctgcgtccggtgaccgaggcggaaaccattgccattcgccagaaagcggcgcgggcgatccaggcggttttccgcgagctggggctgccgccaatcgccgacgaggaggtagaggccgccacctacgcgcacggtagcaacgagatgccgccgcgtaacgtggtggaggatctgagtgcggtggaagagatgatgaagcgcaacatcaccggcctcgatattgtcggcgcgctgagccgcagcggctttgaggatatcgccagcaatattctcaatatgctgcgccagcgggtcaccggcgattacctgcagacctcggccattctcgatcggcagttcgaggtggtgagtgcggtcaacgacatcaatgactatcaggggccgggcaccggctatcgcatctctgccgaacgctgggcggagatcaaaaatattccgggcgtggttcagcccgacaccattgaataa

SEQ ID NO: 181094 - DNA, 429 bp, Klebsiella oxytoca; identical to SEQ ID NO: 78947

SEQ ID NO: 181095 - DNA, 354 bp, Klebsiella oxytoca
atgtcgctttcaccgccaggcgtacgcctgttttacgatccgcgcgggcaccatgccggcgccatcaatgagctgtgctgggggctggaggagcagggggtcccctgccagaccataacctatgacggaggcggtgacgccgctgcgctgggcgccctggcggccagaagctcgcccctgcgggtgggtatcgggctcagcgcgtccggcgagatagccctcactcatgcccagctgccggcggacgcgccgctggctaccggacacgtcaccgatagcgacgatcatctgcgtacgctcggcgccaacgccgggcagctggttaaagtcctgccgttaagtgagagaaactga

SEQ ID NO: 181096 - DNA, 531 bp, Klebsiella oxytoca; identical to SEQ ID NO: 78945

SEQ ID NO: 181097 - DNA, 1926 bp, Klebsiella oxytoca
atgacggcgcacacgcatagcatcgggcaggaagtctcttcggttctcgcccagtcctggcatcgttgcagcaagtttatgcagcgggaaacctggcaggcgccgcatcaggcgcaagggctgacctttgagtcgatttgtcgtcgcaagacggcgctgctgacgattgcgcaggccgcgctggaagatgcctgggagtttatggacggtcgtccgtgcgcactgctgattctggatgaatcagcctgtattctcagccgttgcggcgatccgcagacgatagaacagctggcggagcttggatttcgcgacggcagctattgcgcggaaagcattatcggcagttgtgcgctgtcgctggcgacgatgccggggcagccgacaaaaacctctggcgctcagcactttaaacaggcgttgcatccgtggtcgttctgctcgacgccggtgttcgataaccatgggcatctgtttggctccatctcattgtgctgtctggtagaacatgagtccgtttctgatttatccctgacgctggcgattgccagagaagtcggcaattcattgctgaccgacagcctgctggcagaatccaaccgccatctgaaccagatgtacgggctgctggagagcatggatgatggcgtgatggcctggaatgagcagggggtgttgcagttcctcaatgcgcgcgcggcgctgcttttgcatctcgacgcgcaggccagccagggcaaaaacattcacgacctgctcaatttgcccatgctgctgcgtcgggcaattaaacatgcccgcggtctgaatcacgtcgaagtcacttttgaaagccagcaccagtttgttgatgctgttatcaccctgaagccgattgttgaggagcagggcaacagctttatcctgctgctgcacccggtggagcaaatgcgtcagctgatgaccagccagcttggtaaggtgagccacacctttgagcagatgtcgacggacgatccagaaacccgacgcctgatccattttggtcgccaggcggcaagggggagtttcccgatcctgctgtgtggggaagagggcgtagggaaagagctgctgagccaggccattcacaatgaaagcgaacgcgccagcggaccgtatattgccgtgaactgtcagctgtatgccaacagcgtgctggggcaggattttatgggcagtgcgcctaccgatgatgaaaatggtcgcctgagccgccttgagctggcgaacggcggcacgctgtttctggaaaagatcgagtatctggcgccggagctgcagtcggccctgctgcaggtgattaagcagggcgtgctcacccgcctcgacgcccggcgcctgatcccggtggatgtgaaggtgattgccaccaccaccgtcgatctggccaatctggtggaacagaaccgctttagccgccagctgtactatgcgctgcactcctttgagatcgtcatcccgccgctgcgcgcccgacgcaacagtattccgtcgctggtgcataaccggttgaagagcctggagaagcgtttctcttcgcgactgaaagtggacgatgacgcgctggcgcagctggtggcctactcatggccggggaatgattttgagctcaacagcgtcattgagaatatcgccatcagcagcgacaacggccacattcgcctgagtaatctgccggaatatctcttttccgagcggccgggcggggatagcgcgtcatcgctgctgccggccagcctgacctttagcgccatcgaaaaggaagctattattcacgccgcccgggtgaccagcgggcgggtgcaggagatgtcgcagctgctcaatatcggccgcaccaccctgtggcgcaaaatgaagcagtacgatattgacgccagccaattcaagcgcaagcatcaggcctag

SEQ ID NO: 181098 - DNA, 1659 bp, Klebsiella oxytoca
atgtctcaattcttttttaatcaacgcccccatctcgttagcgacgtgatcgacggtacaattatcaccagcccgtggaataacctggcgcgtctggagagcgatccggccattcgcatcgtggttcgccgcgaccttaacaaaaataacgtggcggtgatctccggcggcggttcaggacacgaacccgcgcacgttgggtttatcggcaaaggaatgcttaccgcggcggtctgcggcgacgtgttcgcctccccgagcgtggatgcggtactgaccgctattcaggcagtgaccggtgaggctggctgtctgttgatcgtgaagaactacaccggtgaccgtcttaatttcggtctcgccgccgagaaagcgcgacgcctgggctacaacgttgaaatgctgatagtcggtgacgatatctccctgccggataacaaacatccgcgtggcattgcgggaaccatcctggtgcataaaatcgccggctatttcgctgaacgcggctacaacctcgccaccgtcctgcgtgaagcgcagtacgcagccaacaacaccttcagcctgggtgttgcgctttccagctgtcatctgccgcaagaaaccgacgccgcgccgcgccatcatccgggtcatgcagagctgggcatgggtattcatggcgaaccgggagcctcggttatcgatacccaaaacagcgcgcaggtggtcaacctgatggtggataaactgctgacggtcctgcctgaaaccggcagagtggcggtgatgattaacaatcttggcggtgtatccgttgccgaaatggctattatcacccgcgaactggcaagcagtacgctgtacccgcgtatcgactggctgattggtccggcctcgctggtcaccgcgttggatatgaaaggattctcactgacggccatcgtgctcgaagagagcatcgaaaaagcgctgctgaccgcagtggaaaccagcaactggccgactcccgtcgcaccgcgtgaaatcagctacgcgccatcatcccagcgcagcgcgcgcgtggaattccagccctctgccaacgcgctggtcgccgggattgtggagcttatcaccggaacgctttccggtctggaagcacatctcaacgcgctggatgccaaagtcggcgatggcgatacgggttcaacctttgccgccggcgcgcgtgaaattgccagcctgctacagcgtcagcagcttccgctggatgaccttgccacgctgttcgcgttgattggcgaacgtctgaccgtggtgatggggggttccagcggcgtgctgatgtctattttctttaccgccgccgggcagaaactggaacagggagctagcgttgccgaagcgctgaatacaggtctggcgcagatgaagttctacggcggcgcagacgaaggcgatcgcaccatgatagatgccctgcaacccgcactgacctcactgctggcgcagccgcacaacctgcatgccgcttttgacgccgcgcaagccggagccgaacgaacctgcctgtcgagcaaagccaatgcaggtcgcgcatcctatctgaacagcgaaagcttgttgggtaatatggaccccggcgcgcatgccgtcgcaatggtatttaaagcgctggcggagagtgagttgggttaa

SEQ ID NO: 181099 - DNA, 1095 bp, Klebsiella oxytoca
atggggaaagagctgctttcgcaagcggatatccagattaatggctctcgtgcctgggatattcagcttcatcatgtcggtttctttaagcgggtactgcaacaaggttcgttagggctgggtgaaagctatatggaaggctggtgggactgcgagcggctcgatattctgttctgcaaaattctcaaagcaaaactcgaccagcaaatgccgggcaacctgaaagatattttacgcattgtcagcgcccgcctgtttaatttgcagtcgcggagccgcgcgtggattgtcggcaaagaacattatgatattgggaacgatctttttgcgctgatactggatccgcacatgcaatattcctgtggttactggaaagacgccaccacattagacgaagcgcaaaatgccaaattgaaaatgatttgtgagaagctacaactcaaaccgggtatgcgtttactcgatatcggttgtggctggggcggactggcggaatatgcagcgcgtcattatggcgtggcggtcgaaggcgtcactatctcaaaagagcagcagaaaatggcgcaacagcgctgtgaagggctggacgttaacattctgctgcaggattatcgtgacctcgataaacactacgatcgcattgtctccgtggggatgttcgaacacgtcgggccgaaaaactacgacacctatttcagcatcgccgaccgttgtttaaaaccggacgggctgttcctgctgcataccattggcagcaacaaaaaggggatgagcgtcgatccgtggatcaataaatacattttcccgaacggttgcataccggcgatttcgcatattgccgaggccagcgaatcgcgctttgtaatggaagactggcataactttggcagcgattacgataaaacgctgatggcctggcatgagcgttttaatcaggcatggccggagctgtcttcacgttactccgccaccttcagaagaatgtttaattactatttatgcgcctgcgctggggctttccgcgccagagatattgagctttggcaggtactgtttagtcgcggcgtcgagggtggcctccgcgtttatcgttaa

SEQ ID NO: 181100 - DNA, 786 bp, Klebsiella oxytoca
atggagactctcgcgcaaaaacagtggaattcatttcccgataactccattacggagctgccgcaggacgtgtatttccgttcttatgtcctggaagccaaccatcatgttccgctgcattcgcactcttttatgcagtttcatttcgcccgtaaaggcagcatgcgaattgatgtcgccggcaaatgctggataatcccggcgcattatggcatctggatccccaataataccgagcatgcggtctgggcactggatgatgtgcatttagagaatctggatattaagccgggttttcttgaagagagcatcaatgaatgtaaagtggtggcgatcagtgatttcgccagagagtttattcattacgccaccaatttaatttcgggccattatgatagccagtcaaaagagggtaagctggttagtgttctggtcgatattattctgcagctcccggaagtcgcttttgtattaccctggccacacgatcgcgaattaaccaaagtgtgccggacaattcaggaatccccggccctggagcactcagtagaatactgggcgcagcatctgggtatgtcagtccgtaccttttcacggcattttaaaaaagagaccggattacccttcagcgtctggaagcaaaaaatgcgtattctggaatcggtattaatgctgaagaaaaataaaagcataaccaccgtggcgctggatgtggggtattccagcaccgcggcatttagctatgcatttcgccaggcgtttggcgtgccgccatcgaattactga

SEQ ID NO: 181101 - DNA, 774 bp, Klebsiella oxytoca
atgacaaaaaacacctcacgctacccacagcgcgttcgcaatgaactgcgcttccgtgaacttaccgtcctgcgcgtagaacgtattagcgcgggttttcagcgcatcgtactgggcggtgacgcgctggacggttttagctcgcacggttttgatgaccataccaaggtctttttcccggagccgggcagccattttgtgccgcctgttgtcaccgatgaaggcattgtctgggctgacggcgtacgtccgctctcccgtgactacacgccgttgtatgacgaagcgcgccatgagctggcactggatttttatattcatgacggtggcgtggcgagcacatgggcgatgaatgctcgtgagggtgacaagctgacgatcggtggtccgcgcggttctttggtggtgccagaggattatgcgtatcaggtttacgtgtgtgatgaatcaggaatgcccgcgctgcgccgacggctggagtcgctcagccgtttagcggtacgcccgaacgtaacggcgctgataaatgtgcaggatgcggcgtatcaggactattttgcccatctcgacgagtttactattcagtggtttatcggccatgacgaacaggtggtgaacgaacatttatcgcggctgaacgtgcccgcagacgattatttcatctggattaccggcgaaggcaaggtggtaaaaagcctctgcgcccgctttgaaaccgaggcgttcgatcagcaactggtgcgcgcaacggcttactggcatcaacgccgttaa

SEQ ID NO: 181102 - DNA, 387 bp, Klebsiella oxytoca
atgtctgacggttttgaggaaaatgccgagtttttcactctgacctacgaagctgagaagtcggttagccacaacttggcctttgttcgcattgcgccgttgctatggctacgcgcgggtgcgcgcggcgaacgtattgaaaaaatacctactaaaggatgggaagtgaccgatgcgtacggtctactgctagatgtagaccaagcaaccccattcattgaagccattgatacctccagtggcgtgtgcgtggctttcatcgttactgatgatgaccgtcacttccagtctgtaacaaaacgtttgccaaaagatgttgaaccagtgcggttatacgagtcgtacctgaccaatttcagcttcaccagtggggaatggacagaatga

SEQ ID NO: 181103 - DNA, 507 bp, Klebsiella oxytoca
atgaaatttactctcaaggactatcagcgcgatgcggtacatgatgctctggcgaatctcaggaaggctcgacgttactggcacaacgagagcgacaaaagcgccttctctttaacggctgtaaccggtgcgggtaagaccgtcatggctgctgctgcatttgaagcattgtttcatggtgacgacgaatttaatttcgatgcagatcccggcgcggtggtgatctggttcagtgatgatccagcactgaatgagcaaacccgttttcgcctgatggaggcgagtgaccgtatcaactacaacgatatggtggtagttgaacatcccttcagtcggcgtaagtttcaggctggaaaaatctatttccttaacacgcagaagtttggcaaaaaaagcctcctggtgcgcgggttcgatgataaaggcggccttttcgaagcagcccctgatgcacagcttatacgctgtgggataccatccagaacaccatcgaagacccggatctga

SEQ ID NO: 181104 - DNA, 1938 bp, Klebsiella oxytoca
gtgtggggtatttccgccacagttgaacgtttcgacaaagccattgccaatgctggtcatcatgtcaaactgccgaatgtggtggttgaccccgctaaagtgcaggaatctggacttatcaaggacgatatcattctgggtgtgcctgatgaagctggtgacttcgataccgtgtgggtacgccgtgctgccgacaaactcagggaagcgaccgatgcctgggcagagtacgcaagacagcaggaaaccgtgcgcgaagtagtgccgctaatggtattccaggtacctaatacgcctgacccgaatgaggtggggcgttggctggatacgttattctcccgttatcctgaattgtccattgacagtgttgctcatgtcttcggtgaacacaccacacaacgtttcggccaacatcaggtgccttatattgaaccgcagcgggtgcaggaatcaacctggatgcgagtactgattgctaaagatgccatcagcactggctgggattgcccacgtgccgaagtgatggtttccttccgcgcagccagccacaggacgcatattacgcaattgttggggcgtatggtgcgtactccattggcgagacgtattccgggtaatgagcgtttaaactctgtagaatgcctgttgcccaagtttaataccaataccgtgagagatgtcgtcaataccttgtttaagggcgatgatacctctcctccaagcggacgcatcctggttaaccctgtggagatgaaacctaacccggctgcttcagctgaagtatgggaagcatttgaagcgctaccttcgcaaacccgaccacagaaaggagccagacccgccagacgtctgaccgcgctggcacaggaactggttgatgacggcattcttgatggggcagtcaggaaagcccatgctgctttgcacgctgttctggacaagttccagatagaaaatgccgagaaaatcaaaaacaaacgcaatgcagtgctcgtcgtagatggtaaggctgtggttgccagcctcaagaacaaagcaatgaccttcaacgaattctgggaggaggcggacgtaacggtgattgatgacgcctaccggcgtgcagcccgaattttcagcccggatgtttcacgtacctatgtcgaatatctggccgataaggttgcggatcgagaagaggatgcagaggaatatctggaagcaatcatggaggctcgtgttaccgttgctggcatggggctggtgatggaggtgcaggattacttcgatggcgaggccgatagactggcgaaggcgtggctggccgagtacacaccgcaaatcaagtcgttgaaagatgagcgtaaagaggcctatcgtcaaatcgtcgaaatgagtaccgaaccgcaggatgtggatctggtcaggccggcgaacaagtttgaaatgaccagggtgcgtgaaggtgaaaaggaagctgaccttccagtctggaaacaccatttgttgtgtgacgaaaacgggatctatccggctctgttgaaccattgggaaaccaaggtttttgagatcgaaaccaaacgtgaaggatttgctttctggtatcgtaatccacagtacacagggcagtcgtcactgggaatcgcttatgttgaagctgaacagtacaagattgttcgtcccgatttcctgttctttgccgaacaggatggcaaaatggttgtggacctggtagatccacatagcctacatctggctgatgctttgcccaaactgaaaggacttgcgctatatgccgaacatcattctgatgcttacaggcgaatcgaatctgtcgccgaagtaaagggtaaattacgagtgttagatttgaaacggcaggatgtgcaggatgctgttgctaccgctgaaaatgcagaaacgttatttagtagcggacttgctgatgactatcagtaa

SEQ ID NO: 181105 - DNA, 627 bp, Klebsiella oxytoca
atgaaaacatatcaaggtactcatggagtacatatcctcgaatatcagagtaagattaataaattattatgttatttgactaaccggtatcctaggttaattgctgtacgtgtcgatctccactatcccaaaatagttgataacggtgacaatatctgttgcttccctaacctggaacctggggtgatatcccggatgcgtgaatccctcagagctaagctggaggctgaccgtacccgtaaggagcgtgaaggtaaacgcatctaccgttgccctttatttattatatgggcgaaagagtattctgaatcaggtaaatgccactaccacatttgcctgttgttcaacaaagacgcttactaccacctcggggattacgatcaggacgataaccttagagggatgatcacaggagcctggtacagcgccctgagactggagagagacgatcaccctggtctggtccattttcctgaaaactgtaagtatgtgctagacaccaatagtactgacttccagcagaactaccaggcgctgttaacccgactggactacctgaccaaagttgaaagcaaagtgtttggtgaaggagaccgtaacttcggctgtagccaaatcgaactgtaa

SEQ ID NO: 181106 - DNA, 699 bp, Klebsiella oxytoca
atgagaggtaaaatactactttaccagtcaaagtatcgctggcaatcacgctctatttttggttattttttatacaaaatgacattgttcaggtatcaaaaaataatttatgacaccggagtgcatcagatgcgttcatttttttacaccatatgcagtagcgaacagcaagaaagcattacagatcatcactcacttgctgagatatgccaaaaatttaatattctacctgaacatgttgtgatcgagcaggtagatattaaagaggttgtttcagagcaacgtttactcagacaattgattcatcatgaaatgaaccggcaggacacgcttgtcattccagatctaagctgtcttggcagaactgtggaggacttacagaatattttatttttttgccttcaaaaagaaatttttatctacagctaccatccagcttcaaggatagagccttctgctgaaagttgcttgtcttttttgattgctcgtcaggatacgattgacattcacaatctgaaatcaactaaaagccgatatcgacatgttaagaagaaattaggacgaaaggagggaagcaaataccgacgtgatatcacaatacttaagaaaggtggatttactcaggctgagattgcaaagaaattgagtatcagtttatcgactgtgaagcggcactggaataacggaatcatcggttaa

SEQ ID NO: 181107 - DNA, 855 bp, Klebsiella oxytoca
atgtctaatagtgttactaattttgagatgagcagcgttctaccaggaaaaaaaccttgtcaaggcaaaaacaatgagtcacaggtagtacagactactcccataaaaaaacactcagtcacgttcaaaaatcaatcttcattaggagtaattgatcattatgccagactaacaaataaatctcactcttccgtaatagcggaagttgtggatttgactatccctatattagaaaaatgcaatcgtcataactggtcaataaatgaaataaaaaatgacctgttaaagttctctataaaagaaagcatcaatcgaagccgaggtaaaacagaagtaactctggaagagtactgttcgttaatctggaaaacgaacatcatgagtccattaaaaatccccattgcagattactttcaactgaacgctaatgatgaattcatggggaaagatgaaaaaacagttatacgtgaaaggctatcctcgctaagggaaaattacgatatggaaaaagccatttacatttacaatcaaagacattttgatgtaaagcatcaaagtgtctcaggatattcaaacattattcttattcatagaacaacctttgagggttattactttgatgccgggcaggctctactcttgtcaacatcccaattgattatattcgggataaatgaagttcttagaagaaaggggattgttatgccttatccggttgtttgttggattgatatttaccatgtcaatgaaatggtggttatgctgccagtgctccgcaaaacagatgtttccaaccgtgttaatgtaccggatgacatcattataaacccatactcacaagagagcagaacctaa

SEQ ID NO: 181108 - DNA, 225 bp, Klebsiella oxytoca; identical to SEQ ID NO: 21326

SEQ ID NO: 181109 - DNA, 1326 bp, Klebsiella oxytoca
atggcgctttcaagacaaaaatttaccttcgaaagacttcgcagattcaccttaccggaagggaaaaaacaaacttttctttgggatgcagatgtaacaaccctggcatgccgagcaactagcggagcaaaagcctttgtattccaaagcgtatatgcggggaaaacccttcgcatgactattggcaacattaacgactggaagattgatgatgcgagagccgaggcaagacggttacaaacattgatcgatacagggatagatccacgaattgctaaggctgtaaaaatcgcagaagcagaatccctgcaggcagaatcacgtaaaacaaaagtgactttctccgtcgcctgggaagactatcttcaagaattgagaaccggtatcagtgcaaaaactaaacgcccatattctactcgatacattgccgatcacattaacttgtccagtcgtggaggcgaaagtaaaaaaagaggccaaggcccgacttcggctggaccattggctagtttgctcaacctgccgttatcggagctaaccccagattacatagcagcgtggctgagtacagaaaggcaaaatagacctaccgtcactgctcacgcttatcgcctactacgtgctttcatcaaatggagtaattatcagaaaaaatatcaagggatcattcctggcgatctggcacaagattacaacgtaagaaaaatggttcccgtgtcagcgagtaaagctgatgattgcctgcaaaaggaacaactaaaaagctggtttagtgccgtgcgtagcctcaataatcctattgcatcggcctatctccaagtacttttgctcactggtgctcggcgtgaagaaattgcgtcgcttcgctggtcagacgtagatttcaaatggtcaagcatgcgaattaaagacaagatcgaaggtgaacgtatcatccctctcactccttatgtttctgaattgttaaatgtactagcgcaatccccaaattctgacgtaaataaggagggttgggttttcagaagtaacagtaaaagtggcaaaattattgagccgcgttcagcgcacaacagagcgttagtgctggctgagttaccacatatcagccttcacggtttacgtcgtagttttggtactttggccgagtgggttgaagttcccactggtattgttgctcaaattatgggacacaaacccagcgctcttgccgaaaaacactatcgccgtcgtccgttagatctgttacgaaaatggcacgagaaaattgagacatggatcttaaatgaagcaggtattaccataaaaaacaacgttgatatgcgttga

SEQ ID NO: 181110 - DNA, 789 bp, Klebsiella oxytoca
atggtccaggctcgttttatagcagttgatagttcctctgaatatttaatagaaaatatcattcgttacaataatagccagaacaaagttgaagctgcagatttcagaagtacagataaaatacaaaaaaggttgaaggatgagttcaattcaattcctgaagcagaatatgagggcggtagacgaggtagtacaagtgatgtgattagaaggaggcccaatttacttggttcgtatacagtagggcaagcattggcggcatttcatggtgatccaattactgcttacaacaagaaagcaggtatttggattaataataagatttatgataaacttttcaatgataataccaaggctgctcatattgtatgttgctatggattagtgagggcgatagaagccaagaaaaaacagctacagttaaaagctaacttaactcgtgatgaagaaaaaaatctctttttcttacgtcagagaggggcaatattcttgacaacttatgcattatcttactgtcttgaaactattttagatcgttcagttccaaatttatttagaatatcttttggagttaaatgcactccaactaaagcaattgaaaattggaagccagtaattgatgcattgattccatttgtagaacatctgaatccagccatcaataatggattaaaaaatcaaagtgacatcgaacaagcagtaagcacattcaattcgctagcaaaatcaacgcgaacatttaattcagctgtttttgatattttcaaaaataagattgttgcgccataa

SEQ ID NO: 181111 - DNA, 351 bp, Klebsiella oxytoca
atgcgcattgctgattatcttcggttattgttgctcgccgctatctggggcgcgagttttctctttatgcgtatagccgtaccgcagtttggcgcgattaacacggcttttttgcgcgtcttttttggtttcacaggcctcgcggttattttatttatctttaaatcttcttttgactttaaagataaatttaagtcctcagtgatgcttggcgtcattaattctggattacccttcctgatgtattgcctggctgccaaatggttaccggctgggtattcagccattctgaatgcaacaacgccgttgatgggggcagtgattgggtttgcatttttgcagagaaattaa

SEQ ID NO: 181112 - DNA, 543 bp, Klebsiella oxytoca
atgctcctgggcattgtcgggatcatcgcgatcgccacaattggtgaacccctgtcagttgagaaacaaattgccggcgttattgcctgcctcatcgcgaccagttgctatgcgatcgccggttttctgacgcgtagctggatttcaaacaaaggtggactcgatcctaaaatggtggccttcggtagtcagataggtgcgtccttttttttgctacccttttttatatggagcacccatagtggaccgaccgttaactggttacagcaagaggcatggataagcgtcattgccgcaggagcgatctgtaccgcatttgcctacatactctatttccggcttatcgctgatatcggccccttacgttcactcacagttacttttttaattccccccttcgctgtgttgtggggatatctggctctgggggaaaccattaaccaaggatttattatcggagcgttaattgtatgcgtttcggtgtggctggctgtcagtccggaaaaagcatcgacagtcttaaagagtgaagcaacaaaataa

SEQ ID NO: 181113 - DNA, 348 bp, Klebsiella oxytoca
atgaatgctgaacacacggactacggctggcttttcagagaaccggctgaagaaactgacggcgatgttgttattgatctggaacaccttcctcaggagcttaaactggccgctatccagattttgctggatcagattgaccgtgaaacggcagaaaaaaactggcagaagtcatacagcaactcgagtttgatatcaccgctgccgaactgtcagcgtatctttttaaaccgggccatgcctgaaagatggcccggtcgtgttatcagtgaagatcgtgagcggacttcactgctgcggctggagcagattacagagctgtgcctctggcaggtaccttcaatgtag

SEQ ID NO: 181114 - DNA, 1326 bp, Klebsiella oxytoca
atgacagcgacaataccggacgaatttatcgaggcatttgaccgcgtatggcacctgccgtcgggcatggacatcaacaccatacttaaattacccgaatttctgcttcttcggaacacggcagataagctttgctatgccaaaatcaaaggaaacttttttgatccctttctgcttcgtggactccaaaaacttggggttccctgcttgtttcctgccggctccccgctcgccgccacggatagatctgatacggccgcaggctgttacgaggcattaatgaagcaccacacgcatcatatctatctctgcccgctcgattgcgctggcgatataccgcaaattaagacggccaacgcaagtatcaggcgcttcagtagaagtgagctggatgagctgctgaattctttgccgcagcaaagacagcttgggtacgcccatgcagatactgcgggtttatcgcagtttttgtggttggtggtcagtcatgatgaggcgctgtgtgcagaatttgctgaacgctactggttttggaatgccagtaaggaaattccaggaacggtctatccctacaaataccattatccggaagccgtggaaggtgccatttttttattgctgttggccatctgggaagaatggcaacttaacgaagaataccactggcgccccttcgatatcccctgggtgcatacgctctcagacgatattttttggcaacaaccccccatcccgtcagccgcctcactcacctgggtaccttatacatatcaggatgaaaatacggactgccaggagtatgtggctccctacaaatacaattacagcctgaccagtgaccaactgatgccttttgttgacactcacgtcttcgagcgccttgaaacggccataaccaatggcctcatcaatatggcggctcgtcatcaatttgtgaaagcgtttcggtccgatggcgttgacgagttcctggctcatattgtcgtgattgacgcctgtgttggcgaaaaatcagtgaataagacactggaaaaagagctcaaagatcttggtggtactggtagattaaaacacaggttggcggggttacttaatgatgcatctgtcaaagagaagttgcacgtcctgtataaagcccgtagtaactatgtgcacggcaatatgcttgagaaaattccaggtgaacacattctgcaagcacgtatcctggccagaaaaacactgaacgccattattaccgaagcaggtcaatcgccgggattaaaacgggatgagtttcttgacaatgttctgcgaagaggatggaagctaaatcaaggcgggtag

SEQ ID NO: 181115 - DNA, 774 bp, Klebsiella oxytoca
atgctgaccgaaatgaaaaaaaacagtccggtttttaaattcacctcacctgaaaaaacaacactttcagaatatttacgcatattcaaaactcaagaaaataaggataatgtcggtggtgaaactcctgttaatttcattatgaatcagacaggaaatatatactatgccacaaccagtgaagtgatgcaggaaagaacgaaggaactgtttgactgtgtgacggttttatttgcggcgatgacccgggcacttgctcttagcaacaaaacattatttgattatgatgcgtgggaaaaaatgatcagcagcactggtttttttgtgcaggtccagaagttcagcaatacactgactatcaagagtggatctctgagtgtggatacccagattgttcagaatttattacccggcctgaccgcagggcggtcaatgcaaatagcaaaagatgttctgaacgctctcagtggtgaattcacccgttcgcaggaagacgataaagcaaaaatcgcccatcttctgtttatctgtgaagaactctttggggcaccaagcgtgacggtaaggctcttttatgcgacaaaggaatctcataaaaaagtcaccagttcaccgtgccataaatctgtgcagacttcttttgagcaacttcaggaagccagtacattcctttttgtcgaccctgctgcaattgcaaaatatggcgtcatactcaatcaggagcccgaagaatatacaagactcattgaaagattgaaatcttacgttcaataa

SEQ ID NO: 181116 - DNA, 474 bp, Klebsiella oxytoca
atgaataaattatttttgtatgatgacggttcagtaacatccgatacgttaaggattatgcgcagaaaggggtatagttgccagccattaactgaagatcccgattttttttggacgtcaatatcggcattaaaaaatggtgatgttttcgtgttactgagccatggtaacgagagggggcctttggcggtgagaggtgatgagggggatgacattgatcttacaaagttcagtaaagatattagtgagaaaaacataaaactatatcttctctcttgccatactggactccctccttgtgaaactatcctgactgcgaatggtgtcaattttgtcgcccctctgggactggcggtattcgagacagttggtgaggacatgataaacatccattcaaaagagggtcaaactaatcctggatgggctggccggcttagcccgggtagagcaactaaatctctttttctgccataa

SEQ ID NO: 181117 - DNA, 228 bp, Klebsiella oxytoca
gtgctgcgcggtcaccgcatcgtggtctcggccctgatttatgccgagatgcgtttcggcaccaccggaccgaaggcctcgccgcgccatgtgcaactggtcgacgcgttctgcgcgcgcctcgatgctgtcctgccctgggaccgcgccgcggtggacgccaccacggacatcaaagtggtgctgcgcctcgccgggacgccaatcggccaaacgacatcgcgatag

SEQ ID NO: 181118 - DNA, 1476 bp, Klebsiella oxytoca
atgactgcaaccattgccgacagcaacctgccggtgacgcgccccgcgtgggatcgttctcgtctggaatcccgcatcgttcacctgggctgcggcgcatttcaccgcgcgcatcaggcgctttatacccatcatctgctggaaaccagcgacagcgactggggcatctgcgaagtcaacctgatgccgggcaacgatcgcgttctgattgaacagctgaaaaatcagcagctgctctacacggtggcggaaaaaggcgctgacagcaccgcgctgaaaattatcggttcgatgaaagaggcgctgcatccggaaatcgacggctgtgacggcattctgcgcgccatgacgcgtccgcacacggcaatcgtctccctgacggtcactgaaaaaggctactgcaccgatgcggccagcggccagctcgatctcaacaacccgctgattcaacacgacctcgccaacccgacgacgccgaaatccgccataggatatattgtcgaagcgctgcgcctgcgccgtgagcaggggcttgaggcctttacggtgatgtcctgcgataacgtccgcgagaatggccacgtggcgaaagtggcggtgcttggtctggcccaggcgcgcgacccgctgctggcggcgtggattgaagcccatgccaccttcccgtgcaccatggttgaccgcatcgtacccgcggcgacgccggaaacgctgcaggagattgccgaccagcttggggtctacgatccgtgcgccatcgcctgcgaaccgttccgccagtgggtgattgaagatagcttcgtcagcggccgcccggcgtgggataaagtcggcgcgcagtttgttgaagacgtcgtgccgtttgaaatgatgaagctgcggatgctcaacggcagccactccttcctggcgtatcttggctatctcggcggctatgaaaccatcgccgataccatgaccaacccggcctatcgtgaagcggctttcgccctgatgatgcaggagcaggcgccgacgctctccatgccggaaggcaccgatctccaggcctacgccacgctgctgattgcccgtttcagcaacccgtcgctgcgccatcgtacctggcagatcgccatggacggtagccagaagctgccgcagcgcctgctggatcccatccgtttgcatctgcaaaacggcagcagctggcgccatctggcgctcggcgtggcgggctggatgcgctatacccagggcatcgacgagcgggggcagcctattgatgtcgtcgacccgctgctggcggagatccaacagatcaaccagcgttttcagggtgcagaacgcgtcgccgcgctgctggcgttaagcggaatttttgcccacgatctgccggacaatagcgattttattgcggcggtgacgcaggcttaccacgcgctgtgcgaacgcggcgcccgcgagtgcgttgcggcgctcggcggcggcctgtaa

SEQ ID NO: 181119 - DNA, 1791 bp, Klebsiella oxytoca
atggcggtggaaaaactgattgtcgaccatatcgatacctggaccacggcgttgcaaacccgctccacagcggggcgcggcagctcgggtaagattgacctgtacggcattaagaagctgcgcgagctgattctggagctggcggtgcgcggcaagctggtgccgcaggatccgaacgacgaaccggcgtcggagctgctaaaacgtattgcggcggaaaaggccgagctggtgaagcaggggaaaattaaaaagcccaagccgctgccggagattagcgaggaagagaaaccgtttgagctgccggaggggtgggaatgggtgcgattaaatgatgttgcggaatacattcaacggggaaaaggcccaaaatattctgaatacggccatgtcaaagttgtatcgcaaaaatgtgttcaatggaatggtttcaaattagaacaatccagatggattactgatgaatcagttgctgcatatacagaagaacgttttctgaaagatggagacgttctttggaactcaactggagcaggaggtactgctggtagggttatttaccttccagcggttacggaaaaactcgttgttgacagtcacgtgacgttaataagaacaattaaacagaatgggcaattcatttgtaactatatatctacttatggaattcagcagcgcttcgatccaaagcatccaaatacgttgctttctggaacaacaaaccaagcggaactaaatgcttccgtcgttacctctttcattacgccttttccacctcaaaaggaacaagaaagaataaatagtaaagtagctgaactcatgtgcctctgcgaccaactggaacagcactccctgtccagtctggacgcccatcaacagctggttgaaaccctgctagccacgctaaccgacagccagaacgccgatgaactggccgaaaactgggcgcgtatcagcgaacatttcgacacgctatttaccaccgaagccagcattgacgccttaaaacagaccattctgcaactggcggtgatgggcaaactggtgccgcaggatccgaacgacgaaccagcctctgaactgctcaaacgtattgcgcaggaaaaagcacaactggtaaaagacgggaaaattaaaaaacaaaaaccgttgccgccgattagtgatgaggaaaaaccctttgaactgccggagggatgggaatgggttaaattgggaaatatactccatgatataaaatatggaacttctcaaaaatgtgattataatatttcaggttatcctgttctaagaattcctaatattgtaaaaggcattatcgatcttgccgatataaagtatggcgcattaaccgattctgaactgaaagatcttacactgaatgaaaatgatcttttatttataaggtctaatggcagcactaatatagtcggccaaagtacattagttcaacaagatctaaaagatcatgcttatgccggctatataattagagtgcgactacataacaaatatattaatgctacatacataaacatgataatgaaatcaaatttaatacgcgagcaaattgaaggtcctattagaacaactacaggtgtcaaaaacattaattcaaatgaacttatgggacttcttgtacctcttccaccaaaaaatgaacaagggataatcattaaaaaaattagtgagatagatacgactatatctaatttgaaagttaacatccaatctgcccaacaaacccagctccacctggccgacgctctcaccgacgccgccatcaattaa

SEQ ID NO: 181120 - DNA, 1758 bp, Klebsiella oxytoca
  misc_feature (1517)..(1523): n is a, c, g, or t
ttgagccaggaatacactgaagacaaagaagtcaaattcacaaagctgagtagcggacgccggctccttgaggcgttactcattctttgctccctttttgccatctggttgatggcggccttactcagctttaatccctcggatcctagctggtcgcaaacggcgtggcatgagcctattcacaacataggcgggacgccgggagcctggcttgctgatacgctattttttatttttggcgtaatggcctataccattccggtcatcattatcggcggctgctggtttgcctggcgtcatcaagaaaacgacgagtacatcgactatttcgccgtctcgctgcgtttaattggcgcgctggcgctgatcctcacttcctgcggtctggcggcaatcaacgctgatgatatctggtatttcgcctccggcggcgtgatcggcagcctgctgagcaccaccctgcaaccgctgctgcacagcagcggcggcacaatcgcgctgctctgcatctgggcggcaggactgacgctatttaccggctggtcctgggttagcattgctgaaaaactcggcggtgcgattctttctattctcacgtttgccagcaaccgtacccgtcgtgacgatacctgggttgatgaaggggaatatgaagatgatgaagaagaatatgaagatgatgaacccgcgaagcagcagggttctcgacgcgcgcgaattttacgcagcgccttagctcgccgccagcgtctggctgagaagttctctaacccgatgggacgtaagaccgatgcggcgctgttctcgggtaaacggatggatgacgccgaagacgaggtgcagtacagcgccggcggtgcgcctgttgccgctgacgatgtccttttttctggctccagcgcagcgcgtccggcaaatgctgatgatgttctgttctccggcgtcagtgcggcacgtcccggcgattttgacccctacgatcctctgttaaacggtcatagcattgccgatccggtggctttggccgcgcaggataccgctgcgccgcaggcatggtctgaaccgctgccagggtatgaggctcagccggtctatcatccggaacaggcaccggtacagcagccagcatatcagccagaaccggcttaccagccgcagcatgcttaccagccggaacaggcgccggtacagcagccagcgtatcagccagcaccggcttaccagccgcagcatgcttaccagccggaacaggccccggtacagcagccagcgtatcagccagcaccggcttaccagccgcagcatgcttaccagccggaacaggccccggtacagcagccagcgtatcagccagcaccggcttaccagccgcagcatgcttaccagccggaacaggccccggtacagcagccagcgtatcagccagaaccggcttacccgccgcagcatgcgtaccagccagaacaggcaccggtacagcagccagcatatcagccagaaccggcttaccagccgcnnnnnnncaccggtacagcagccagcatatcagccagaaccggcttaccagccgcagcatgcgtaccagccagaacaggccccggtacagcagccagcatatcagccagaaccggcttaccagccgcagcatgcgtaccagccggaacaggccccggtacagcagccagcatatcagccggaaccggcttaccagccgcagcatgcgtaccagccggaacaggccccggtacagcagcctga

SEQ ID NO: 181121 - DNA, 207 bp, Klebsiella oxytoca
gtggtgtggcgtcattttcactgcagctggcagaagggccgcgcggatctctatacggaaatgcccgtgaaggtcaccggctttaaacagcccattgatgatgccagctggaccatcacaacgttaacgcacatggtcaacccggatagcggatttacaaccagcatcgagctggaagtgaaaattgatgatttagtaatggactga

SEQ ID NO: 181122 - DNA, 543 bp, Klebsiella oxytoca
gtgagcgagatgactgatttactcaacctcagcaagaccccggcatttcgcatcatgattgcaggtaaggatgccacgcagacgctggataagcgcctgctgagtatgacgttgaccgacaaccgcggatttgaggccgaccagcttgatctggagctggacgacgccgacgtactggtgattatgccgcgtcgcggcgcggtgatttctatggcgttggggtggaaaggcgagccgctgttttcaaaaggtaatttcaccgttgatgagatagagcacagcggcagcccggaccggctcacaatccgtgcccgtagcgcagacttcagggaaacgctgaatgtacggcgtgaaaagtcctggcatcaaacgacggtgggcgaagtggtgaaggagattgccacgcggcacagcctgaaggctgccatcggaaaagatgtagcggcgcaggttttggatcacctggaccagaccaacgaaagcgacgccagctttttgatgaagctggcggtacggtgcgattgcttcagtgaaggaccgtaa

SEQ ID NO: 181123 - DNA, 657 bp, Klebsiella oxytoca
atgacagagaataccgcacaggatgcaattccacctgacgtacaaaccaatgatacagcgactacccagacgtttagctttggcgatcccattcctgttctggaccgtcgcgaactcctggattatgtggaatgcgtccagatggataggtggtatgagccgccagtgagttttgacgggctggcacgcacgtaccgcgccgccgtccatcacagttcaccgattgccgttaagcgcaacatcctgaccagcacgtttatcccgcacccgttgctgagtcagcaggcattcagccgtttcgtgcaggactatctggtgtttggtaacgcctatcttgaaaaacggacaaaccgactgggcggtattctgtcgctggagccatcgctggcgaaatacagccgacgcgggatcgacctcgacactcactggtttgtgcaatacggcatgaccacacagccgtatgagttcaccaaaggcagcatctttcacctgatggaaccggacctgaaccaggtgatttacggcttgccggaatatctgtccgccatcccctcggccctacttaatgagtccgccacgctgtttcatcgtaagtattacattaacggcaggcacgccggattcatcaggtacatgaccgacgcggcgcagaactag

SEQ ID NO: 181124 - DNA, 360 bp, Klebsiella oxytoca
gtgaacaacatccgtcatgcgatgaaaagtgccaaaggaccggggaacttccgcaacctgtttatgtactcccccaacgggaaaaaagacggcatccagatcatcccattgtcagaggtggcggcaaaggatgagtttctgaatatcaaaaacgtgagccgggatgacatgatggcagcacatcgcgtgccgccgctgatgatagggattatgccgagtaatgttggaggatttggggatgtggagaaggctgcaaatgtttttgtgcgtaatgaactattacctcttcagaaacgactggaggaattaaataggtggcttgacgtaaatgtcattaattttaggaattatgaattatga

SEQ ID NO: 181125 - DNA, 396 bp, Klebsiella oxytoca
gtgagtaaagctaaaattttaactgtgctatttcgtgaattacaagatgcagttcttgaactcaatgagggggagttggaaaaaattatttcaggcgagtatcaatttgtccttaaggtagttaaaaaacgaattggtactagtgcaaagataagtccagtagatgattttagctatagcgagttgcttaatttacttaaccagtgcgagtcaagagaacaaggtaacgagcttttgtcgcgtgagctaaagactaaatctgagtttgaaaaattcgcgcgtcatgtcgaggttgctgtaatgaaaagcgataagctcgagaagattagagataatattattgagtcgacagtaggtgctaaactccgttctgatgccattcagaataaaaactaa

SEQ ID NO: 181126 - DNA, 942 bp, Klebsiella oxytoca
gtgtttgcgggaaaaaaatcggcccagatccgcgaaattttaatcagcgagtcagcttgggaagaaatgacctgcttattcgcaccttccttagcattccgaggaaagaatgttttagttctggatatggatgctcaagcaagcctgacattttcgtttctagctcccgattattgggacgaccatcttaaaaatgaaaggaccattaaaaactggtttgattgtattagtcagggagagcaaacaatgcctctttcgactttaagggtgcgacctgaaccagttaatagtagatttggtagaaatggtggatgtttagatttaatttcttctcacctcgggttgataaatgttgatcttgaacttgcgactcttctaggaggagctagccctagccaaactcaaaaaaaatatcttaaagttcatggtaaacttagagaggaacttaaaatcctagctgatgaaatgaattatgatgtcgttttaattgattgcccacctaactttaatatcgtaacaaaaaatgctttaattgcatcagataaaattttaataccagcaaaacctgattatttgtcaactctaggtattgattatttaaaaagaagcgtagattctctggttacagactataatttctatgccgataaagatgaagattatgaaagagtagctcctgaaatcctcggagtggtttttactatgattcaaattcattcagaacaacctattgctgcgcaaaggcaatatattgcgcagacaagacgtctgggtgtccccgtatttgatgctatttttagggagaataaaactatattttctgatgcccctagagatggaattcctgtagcattaattggctactcgcattcaactcactcttctattgttggagagattgaggattttgttgatgaattccttcaaaagattggagagtaa

SEQ ID NO: 181127 - DNA, 591 bp, Klebsiella oxytoca
atgagtgttgttgagacgttaagagagttttcagaagtatggaagctttttagtgagattcctgatgacgcgacacttaatgttgagttggcatctctgtatcttggtattagtgtaaaatcacttgctcgatataggcaaaatggcgggggaccagcatatatccagtaccaagtagaaaatagcaaagcgagaaaccagcgagtaaattacttgctaaaagatcttcgagcgtggcgtgataatcataaggtccaaaatactatgcacgcagctcaaatccgtggattaacatttacgtcattaaccgatttatgtgagccacatccattttggctgtctaatttttcaggacaaaaaataatatctcatgctttgacaacctctgatgatctttttagaaagttattgtcagagcctaatgttgatatagtctggatttctgttgagcaggctattttcaaagagtgggaaaataaaaatgaacgaattatttggcacaatattttcataacaattctaaataatttgagctatgcttcagaagcagcgcaagaaagatatacaatgaatgatgtcttggggagttaa

SEQ ID NO: 181128 - DNA, 1506 bp, Klebsiella oxytoca
ttggttgtactccttctttgggctacaaatggtggtgatactttgaaaacaactctcaaccaggcttttattatcaacaagttaagtattaatgttaagcctgaactcagtagctctggaaaagtcgttttcgaagccaaccctgaccaaaagccttacatagtttttgacgatcatcgagattcacctgttggcttcggtgtgaaggtcagtttgacgaaaaaaacctatgtaatccagcgaagagtagcctcgtcagatcgtaatgtcagcgagggtaagaagccaagctctgtcttgaaagtaaaggttggaaatgtgtctgattttccgagtatcgatcaagcccgtgaggtagctcgacagttggttcagaccatgatcgcaacaaagagaaatcccaacaagattaagagggaactcgatcttgctgaattgaccgtgagtgaagcttttgcccaatacaggagccacttacttggcagaaccaaacccgctaaaccaaacactctcaatgtgttagacaaagctgagaatcggttgaaagaatggcaaaaccttcggataaaagatcttacgggtactgaaatccttagtaagtttgatgaaattgcttcaagagcaagaacggctgctgaacaaactttccgatgggctaatgttgcagttaaacatgcgattgaaattgaagctggcaatgcccagacacaacaacgacaaccttcgctgtcctataatcctttttcaattttaaaggtacagaagaagttcagaacgcgatctgaactggaggatagctatcgtgccaagggagtacgaaacccattgtctcccaaagataccctgggacgttttctaactgcattacacaataagcgaggttttaatcggttgggttgtgattatctgttgctaaccgttctgattggagcccggaaagaagaaaccgctgcactgtgctggcgagagactctgacagaagaggaagccagaacgacaagctacgtcgatcttgaaaaccgaatgattcgattctacgacaccaaaaaccgtaatgaccatgagttgccaatctgcgatgctacaaagcgaattctggaagatcgaagagatatcgtcaacgataacgaaaagcgagcagataaacgcaaatgggtttttccggctcgttcatcacgaagtaaggttggacactattccgacagtaaaagcctacgtgagtatatctgtcaggaagcaggcataacgaagttgggtatgcatgatctgcgcagaacctttggccgtgttgcagaagagctaacttcatatgcagttgtgaaaaagttgcttaaccaccgcaataccaccgatcctactgaaaggtatgctgtgccagataatcagcgagtttttgaggcacttcaaaggattgagttgcatatgctaatgactgcacctaaattgtataatgcgcttttagcatctgcgaagtatccgccattaccagaaaggaaagagggatga

SEQ ID NO: 181129 - DNA, 147 bp, Klebsiella oxytoca
atgccgcacttttttattgaacgtcctattttcgcctgggtggtcgcgctgtttatcgtgctgacgggaatattgtccattccgcgcctgccggttgcgcaatatcctgccgtcgcaccgccgggcattattatttcgctcagctag

SEQ ID NO: 181130 - DNA, 2952 bp, Klebsiella oxytoca
atgaatacgtctgttgtttcacttatcgagcgcgagatttctggcgtggataatttgctttattttgaatccaccagcgataccaccggcatggcttccattacggtaaccttcaggccgggaacggacgttaagctcgcgcagatggatctgcaaaaccagattaaaatcgtcgagccgcgtttaccacaggcggtaaggcaaaatggcataacggttgaggcggccaattccggctttctgatgatggtggggttaaaatccccgacgggagagtatcaggaggctgatttaagcgactattttgctcgcaatgtgatcgatgagctgcgccgcgtccctggcgttggcaaagtccagctcttcggcggggaaaaagcgctgcgtatctggctggatcctataaagctccacggttacgggctttccgtcacggacgtggtgagcgctgtcggccaacaaaacgtgattgtttctcccggcagaacgggagatgaaccaacgacgccgcagcaggccgttacttatccgataaccgttaaaggtcagctctcatcggttgaggcgtttcgcaacattaccttaaaatctgaggtgactggcgcacggctaaagttggctgatattgcgcgcgtggagtccgggttacaaagctatgcttttggcatacgagaaaacggcgttcccgccacggctgccgctattcagctctctcccggcgcaaatgcgatcggcacggcatcgggggtccgcgcgcggctggcggagctttcaggcgtgcttcctgaagcaatggcgttcacggttccgtttgataccgccccctttgtgaagctttctattttgaaggtggtggaaacctttgccgaagcaatggtgctggtgtttctcgttatgctgctgtttctgcacaaaatccgctgcacgtttatccccgcaatcgtagccccggtggcgctgctgggcaccttaacggtgatgctgtttagcggctattccatcaatatcctgaccatgttcggcatggtgctggcaatcggcatcattgttgatgacgctattgttgttgtggagaacgttgagcgcctcatggaagaaaaggggctctccccgaagcaggccacgcgggaagcgatgagtgaaatcaccccggccattatgggtattacgctggtgctgaccgcggtatttattcccatgggttttgccgacgggtcggtagggattatttaccggcaattctgcatttctatggcagtatccattttattatcggcattcctggcgctgacgctcacccctgccctttgcgctacgttacttcggccgcatcagcctaaccggagcaaaggcggctgtttttccgcgtggtttaacgcccgttttcaccgcctcgcctcattttacgcctccgggctcgggtttgttctgaaacgaaccggacgcatgatgctgctgtataccgcgctctgtctcgcgctgtatgccggtctatcctcattaccttcgtcatttttaccggatgaagatcagggttactttatgtcgtcgatccagctcccttccgacgccacgatgcagcgtacgcttaaggtggtacaacgatttgaagatgaaattgccgcgcggcaggccgttgaaagcaacatcatgatcctgggatttgggttttcaggctcagggcaaaactctgccatggctttcaccaccttgaaggactggaaaaatcgcgagggcgcgaccgcccagggtgaagcagagtatattcaaagcagtatggaaagcgttcccgatgccgtcacgatgagcctgctccctccggctatctccgacatggggacctcatccgggtttacctggtatttgcaggaccgtggcggcaagggctatccggccctgaaaaaagcagcggatgagctggtaaagcgtgcgaaccagagtcacctgttgaacgatgtctatatcgatgggctccctgaagggagtagcctgatgcttaacgtcgacagggaaaaagcggaagcgatgggcgtatcgtttgatgagattaaccaaacgattaccgtcgcaacgggctccagttacgtcaatgactataccaataatggccgggttcaacaggtgatcgttcaggcggatgcgccctaccgtatgcaaccggagcagttattgaccctgtcggtgaagaaccgctcggggcggatgcttcctttggcggcgtttgtgacgctctcctggaacgttgccccgcagcagctcaatcgctatcagggatatccggccatccgcattagcggaagcgccgccgcgggcgagtccacgggtagcgcaataatggcgatggagaagctggcggaccagttgccggcgggtttcgccggagaatgggcggggagttcgttacaggaaaagcagtccgcgtcacagctgccggggctgataatactctcggtgctggtcgtattcatggtgctggccgcactctatgaaagctggtcgattcccttcgcggtaatgcttgtggttcctctcggcctgctcggcgcggttgtggccgtgacggtggcgaatatgaccaacgatgtcttttttaaagtgggcctgataaccctgattggcctttccgctaaaaatgcgattctgattgtggaatttgccagacaactgatgagccagggaatgaacgtggtggatgcaacattactcgcctcaacgcagcgcttacgcccaatactcatgacctcgctggcatttacattaggcgtcgtaccgctgatgctggccagcggggcgagcgacacgacccagcatgccctgggaacgggcgtcttcgggggtatgataagcgcaacggtgctggctatcttctttgtccccgtctttttcgtcatgattacgcggtgcattaaacaacgtcggaaaggggaaaacaccccgcgccatattaaatag

SEQ ID NO: 181131 - DNA, 1410 bp, Klebsiella oxytoca
atgccagactctgattccttaaccgctacgctggcgcgttttgccggcgaactcaccccggctgcgataccggcgtcggtgaaagccaggatcgctctgcattttatcgatagcctgggctgcggcgttgccggctgcgaagacagcgtgctgcggaaaagcgcgcgggttattcgtagccagtacgcgaccggcagaagcgcggtgctcgacggtgtaactccgctctccgccagcggcgccgcgttcctcaacgccgctgcgataaacgcgctggattatgacgatggttttgaagtcgccgggcgggggatggggcatcccggcgccacgctggtggccggggcgctggccgcggtgggccagggcgggccggtcagcggcggggcgttgctgacctctctggtggcggcctgggaaatcaatagccgcgtgattatctctcagcagccgagtcctgaacggtttcaacaagtgtacggcgtgtgccagcacgaatcgctgggggcggcggtggcgtatggtttactgcgcggctgcgatgccgcggggctggaaaatagcctgggactggccgcctcgttaacccctttgcccacgttgcataaatacaactggcaggcgcgtccactggtttcgtttaaggattacaacgcgccggcggcagaggccggcgtacgcgcggtggagctacacctcgcggggatagtggggccgcgcgagatactcgatggtgaacaggggttctggcggatgtcaggctccgaccgttttcagccagaacggctgacggagcatctggcgacgcactggcagctcaggcacgccagtttcaaagactatccggtatgccgctggatgcataccgcgctggcgtcgtttgagcgtctgctggaccgtattccgtcgccagagtcgattgagcggattcgcgtttacggtagttttaccctggcccgttttttcgccgacgcgcgtcccgtcagcaataccgatgcgcagttcagtctgccgctggcgatagcctgcctggcgtttaaaatcgcgcgtcaccagtggagcagcgatcggacgcgcggcgcggcgccactccttgccttcgctgaccgggttgaaatcatcgccgatgagacctttgaacagctgatgctgcagcatcgccgtcccgccgcgcgcgtggacattgtggtaaagggaaggacgatcgccggagagcgtatcgacttcccgccggggtgtgcagaaaatccgctgccggaacagcggatcgttgataaatgcgtggccaacctgtcatcacgcctcagcgcgccgcgggcagtgcggctgattgacgctctgctggatatggaacgctgcgcggacattggcgcggcaatctcgccgcttctgtccgcgccaggagagtag

SEQ ID NO: 181132 - DNA, 372 bp, Klebsiella oxytoca
atgctggactcttttggatgtattgccgttttagcctcactgatgttagcctcaatcggtttgagtgattatctcgaggatatgctgaacaaaattaaccgccggggctcacgcccgctggccatatttttgacctattttcctgccgcgctagcctctatttttgccccgcaaggatttttgtctgccctggcctttgccggcatctcgctggtgctgtggagtatattattgccgccttatttacttattaaggccaggcgttccgcactgccggcggtgtattttttcccagccagtaacttcatcctgaaaatgattattgccgttggagccatactctggctactgatgatttacgcttttctttaa

SEQ ID NO: 181133 - DNA, 576 bp, Klebsiella oxytoca
atgccgatgaaaaactgtatcaaatatctgcttatcggcagcgggctggcggtgtgcgcatttgcccgcgcggaagataacgactgccagataaccgtttctcagaccgagataaactactcccgacttcgccgcgaagatattgtcaccacgcagcaaagctggaacaaaatgcccgagcgtgaactgaccatcagcgcatcatgcccggatcagcggcagatgggggttcaggcgctgggcatggccggcgaaaaaggccgttttcagtttggtcagaaaggcggtattgcctttaaagtcagcgaggtcatggttgacggcaaaccgtaccgcgtcggtaaaaccgtcgatcaaattaacctcacgccggagagcgggtctgccgcctcactgtatatccacaataacgataccgtggtggcggtggacaacaacgccgtgccaacgggtaagcagataagctttaccgtgacgctgtttcctgttctcagcgaggcagcatttagcggaaataacgatgaaacgcagctggagtcggatatcacctggcagctgctgacgcggcaaaaatag

SEQ ID NO: 181134 - DNA, 2397 bp, Klebsiella oxytoca
atgcataaaaaaagcctcctcagctattttgtcgcgagcgcgctggcacttatgtatacctcccacgccagcgcccgtgaggtcacgttcgataccgatatcctgcaatcacgcggtctcagcaccgatctcaaccgttactttgccgaaacgccccgctatttaccgggcgtgcactccgtacaggtggtggtcaatagcaaaaatcgcggcaccgcagcggtgcgatttggggaagacggtacgctatgcattgataatgactttcttgattttgccgggctaatgcccgtaccgctaaaagcggctgaagcctgccacaatattcacgatgactacgcacaggccgtggtgaacgccctgcccgggcagaacagcgttgagctctatctgccgccggaagcgcttaatggcctgaacggcgagattaaaaacttccagcacggcggcagcgcgggcatgctcaactattcactgtttagcacgcgcaatgaatatcagggcagcgaaagcaacagctattcgcaggccagcctcgaaggcgggtttaacgttgccgactgggcgctgcgcagccgctacatcatgaccaacgacaacggcgataaaaacgccgaaagcatttacacctacgccgagcacgttttcgcggcgcagaaaatgaccatgcaggtcggcgaaatcaacgccagctctgacgttctgagcggcatgccaataacgggcgttcagctcacgccaaccagcgctctgctgagcagcggcaatggcgtgagcgtttcaggtatcgcccgaacctcccaggcgcgcgtcgaaatccgtcagaatggccgcctggtatttaacaccctggtacctgccggccccttcacgctggacgatgtgccggcggtacgcagcaacgtcgaccttgaagtcaccatcattgaatctgatggcgcatccaaccgctttatcgtaccggcctccgccgtgagggcgcagcagctggcccgtccccaggggctttccgcgtctgtgggtcgggtacggaatattgaaggtgattatgatgacccttgggtgttcaacatttccgatggctggcgaatgctaccccgcctgaacgtttatgcctcaggcgcactggctcaggattatcaggcgaccggcgcgcgggcagaaattctgctgaccgatagctggagtgtctccaccagccttgccggaagccgggcgcagtttggcgataactacagcggtctcaaaaccgaaatacaaagcgccctctctttgagcgacacgctgaacttatcgaatagcatcgcccactacagcggcggctatcgtgaactggctgacgcgctcaacgatgatttccagccttacgacaatagctactctaccaacctgaactggtcctccgggttattcggtaccttcagcatcggtttcaactataaccagaccagtagcgacggtgaagactcccgctacgtgctggcttcgtggggtaaaacatttaaatatgcctcggtgtcagtcaactggcaacgctcggtcggcaatagcaacgatgcccaggacgacgatatgctttacgttaacctgagcattccgctcggcggctctcagagcatcagttcctatatgcgcaatcagggcaaccgcaccagctacggcgtgcagaattccggggccctgtcagcgcgtaccaattactacatctcagccgatcgcgacaacgacagcaacgagaacagttttaacggcaacatcagtagcaatcttcactacacgcagctcagcgtgggcggcggcagtaacggtaataaccagcgcaactataacgccgcactgacgggcggtattgcggtacacaaaaacggcgtaacctttacgccataccccattcacgacacctttgccattgcaaagctgagcgaagacaaagccggggtggaaatcaatacgccgcagggcaccgtctggaccgataagtggggccaggcagtgatcccggggcttaatgagtggcgcaattcacgcattgagattgatgccaacaagctgccgcaaagtatgacgctggccaacggcaccaagtaccttgccgctgcgcatgcttcggtgagcgaagtgaactttaaggtgctaaacagccggcgcgtcatgcttcgggttaaaaaggccgatggaagcgcgctgccaaaagggttgtccattgtggatgaaaaaggcaactacatcgtcaccagcgtcgatgacggccacgttttccttaacgacgtagagcaagttagcaccctgtacgccatggacaatgacaacaatcgaatttgtaagattgcctggaccttgagtgataaacacgatgaagaggcgttttacgaagaggtcaacggagaatgccgatga

SEQ ID NO: 181135 - DNA, 711 bp, Klebsiella oxytoca
atgaatcggttaagtattttttcacgtacggctatgttcctggcattaacgctttctcttcctttaactgttaatgccgcaggtatggttccggaaaccagcttgctggtgattgacgaagccacccacagcggcacgataaacgttaaaaacaccgataatacacccgcgctattatatacgacggtggttaatcttcccgacgataataacgggataaaacttattccaacccagccggtagtccgcctggagccggggcagacccagcagctgcgttttattttgcaaaacgacgcgcctctcgacgtggaacattacaaacgcgtcacctttgaaggtattccaccgaaaagtgacgataagaaagttaaaattgggatcaatattcgccaggatatcccagtattaattcgtccggcaaaacttcccgtggtcaccgatgcctggaaaacccttcaatggtccggttccggtacgacggcaaaagtcactaacccgagcaaatacgtggtcaggctggcacagaacgtgatcttccagccctcaggtatcgcggggaatattaataaaacctatatcctgcccggcgaatcgctgaatattgcgctgaccaaaagcgttagcggcagtaacaaggtgaaattcttcccggccagccgctatggtgttgaagtaccgagttttgtcgccgatttcaatgcaaagtag

SEQ ID NO: 181136 - DNA, 690 bp, Klebsiella oxytoca
atgaaaaaaacgctgattgccgccgcgctggtgctgtttaccggctccgcgctggcagaacagaatgcggtattacaggttcaggggaagctgaccgcagcttcctgtacgccggaattaagcaacgggggcgaagttgattatggctatatttacctgggcgcgctttctactacagaagttaacccgctgggctttaaagctattgaattaaccatcaattgcacagcgccgaccagggtcgcctggacgtcaactgacaatgaaactgacagccagccctccccaccgatagccgtcgacattggcggaggtacaatggcaacgcctccaacctatcagagctttggggtgggtaaaactgatgatggtgtagctattggtaactacgctattttcatggatcagagcccaacttacgatggtaaagtcggcagtattatttatcaccattctaactgggacgctgactggggcccggggagatgggttgcgggtccctcctcgcaaagaaatgacgattacacatgggtgtccgttgcatcttcaggcgctttagaacctatcgcttttagtcgcgcggtttttaaactgtccacttcactgtcgataaaagacactgcctcgttaaatattaaggatgataccgagctgaaagggcaggcgaccattactttgcattatttataa

SEQ ID NO: 181137 - DNA, 672 bp, Klebsiella oxytoca
atgaaaaagacccttctggcctttattctcgcggcctgcgcgtcctccgcgcttgccgcccccacggccgtattaaaagtcaaaggtgtattaaccaatgccgcctgctcccctgaactcagccagggcggtgtcgttgactatggcaccattcacacctccgagctctctgactccgccgttaaccagctggggcagaaaaccatcgatctcaccatcacctgcgacgcggccaccaaagtctcctggaaccttgtcgatgaccgcgtggacagccgcgccggcattaccgtcaacaacggtaacgccaccggcggcgccgtatctgacgccagccagacttacggcgtcggtaaagcgaaagatgtcgctattggtaactattccttgttcgtcaacgtcggcagcgtggtggccgataccaacaaagttgacgccatcgtgatggacggcaacaacagcgtgtggaccaaaagcaccgacggcttaaccgccggcctgaacagacgcgatttcaccgtcgccactgccggcagcgtcgagccgctggcctttaccagcgccaccttcccgctggtcacctcgctggcgattcaggacaccaaaaccctcgccatcaccgacgataccgacctcagcggccagctgacgatcagcctgcgctatctgtaa

SEQ ID NO: 181138 - DNA, 927 bp, Klebsiella oxytoca
atgcccgccgtcaacctgcgtcatattgaaatctttcatgcggtgatgaccaccggcaatctgaccgaggccgcacgcatgctgcatacctcgcagcccaccgtcagccgcgagctggcgcgttttgaaaaggtgctggggttgacgctgttctcccgcacgcgcgggcgcctgcagcccacggtccaggggttacgtctgtttgaagaggtccagcgctcctggtacggtctggacagaatcgtcagcgccgcggaaagcctgcgcgagttccgccagggcgagctgtcgatagcctgtctgccggtcttttcgcaatcgctattgccgctgctgctggcgccgtttttagcgcgctatccgcaggtgaatattcaaattgtgccgcaagagtcgccgctactggaggagtggttgtcggcccagcgccacgacttagggatcacggaaacgctgcatacgccggcggggactcaaaggacggaactgctttctctcaatgaagtttgcgtacttcctcaaaaccatccgctatgcgggaaaagcctgttaacgccgcaggattttcagggagaaaactatatcagcctgtcgcgaaccgatagctaccgccagttactcgacacgctcttcaacgaacatcaggtcaaacgtcgaatggttattgaaacacacagcgcagcctctatttgcgccatggtgcgtgccgggttaggtatttctgttgttaacccactgaccgcgctggactatgctcatagcggaatagctattcgtccttttagcctttcagtccccttcaccgttagcctgattcacccgcagcatcgtccgacttcagccctggttgaagtcttcagccgccatttaatcagtgaaattccacatatcgtttcctcatttaataacttaatcaacaaatcctaa

SEQ ID NO: 181139 - DNA, 255 bp, Klebsiella oxytoca
atgacgggaagaggcattaacacagtacgtatcggtgatgaagtgaagcacatcgccgagctcgatgcactaacactcatgcatgaatggtcaaagcttaaaaaagaaaatgcagacctgtatgactataaccgtcaggttaaccgggggtggcgcggttttattcttcgcctgatgggtatccatttgcctgaaaaaaaacgtgtttgtctttatggcattaatgccagaaaagaatccatctatcccgactga

SEQ ID NO: 181140 - DNA, 264 bp, Klebsiella oxytoca
atggatgagaaagaagtgaatttttcactcagctatgagcagctgacccggatagcggaagagcgtatccgtgaatgcaatctggacagccagggcgcgatttacatcagcgagtcagccaaggccggtgccgtgctgagctattggtatgaactggccataaatggctatgcctcagtgaatgccataaagagacaagagctcatagacgccgatcacctgcgcctcagacaactcatctggccggaggcggacaagcaatga

SEQ ID NO: 181141 - DNA, 579 bp, Klebsiella oxytoca
atgacagaccagaacaatgaagctcgcgatatgtgggccgaagcgttgagtttaatgtttaaaggcgatcaccaggaagaattgttccggatttcagatgatgagattgatgccctggaggggttgtctccggacagatggccaacggcaggacagacagacattaactgggatctgtctgttccggggcgcagacattcgatttaccttcctggtccacgggtattgcagcctgctgactgtgaacaaattgatctcagttctctggtgctggggaaagcctcttttgctgattttgacccgcttattaattccttctttcgactgacagattccagcctctgggtggaaattaccaacccgaaactcggaaaggccatactgcatatcgcaaaaggatggcctgtttcaccggtcctgttatctgtgcacgaagatggtggatttcatttcggggacgggacccatcgttatgaggtactgaagcggtctggaacacctcatttttattttctggctatgccggatgatgtatctgccattaataagcaacttacgtttcagtggatgagcgactaa

SEQ ID NO: 181142 - DNA, 1002 bp, Klebsiella oxytoca
atgcagctggaagactatatctcggccgggcggctgaacatttacactgacgtgctgaagctgaaacctggtgaagaactgggcgggtataactggaacaaagccgtttccgccgccatgcagccgctgatgcactgccttgaggtgacgctgcgtaacgccatcgattacagtattcgccatgcccggctgcccggcgctgccggacactggcgaaccgataccaactggatctttgatttaccccgctatatcggtgacaagacctggatacgccagaacaagcgctacaaaaccgatgcccgtggccagaagctcatgcatcacgggaaaccggtgtatgaccggacagcctgggaagaagactgtatccgtaaggtgtcaaaacgtatccgtgctgcgggcaaggcgccgacggcagagcgggtgatctccggtctggactttggtttctggaccaattttctcacgaaaaactacgatgaaccgcggaaccgctcgctcctgtggccccagttgcttccgtcggtgttccccggcgccccggccggcaccccccgtcacgtgctggaaaagaaatttacccgtatccgtgacttgcgtaaccgcctggcgcaccatgaagcagtctggaaattccaggaggaagatccggttaccggtgcgccggattacaaccgcccggtatatggtcttcaggcgtccctgcagctgttgcgtcgggcatggaaagatatgctggaggctctcagctggctcagtcctgcaaggcatgctgcgtttctggcagaaggtcatcatctgcgtttcgaggcactggccacgcacgatggtttgctgagtttcaccggacgggcacagctgatgcacgacctgaacgtgcggcgcagtaaagagatcagaaaattattgcgggggctcggacagcaaaaaatcatccgcctgaccagccgtacccggatcattgccattattggtcccgattttatccgtaccctctga

SEQ ID NO: 181143 - DNA, 582 bp, Klebsiella oxytoca; identical to SEQ ID NO: 140885

SEQ ID NO: 181144 - DNA, 129 bp, Klebsiella oxytoca
atgcatatgataagttatgattccagcgtcactctcttcattttgcacagatccgaaaaaaggcaaagtcggatctccagactgcagcagggctgttttgaaaaaatgccggagatggaagcagcgtag

SEQ ID NO: 181145 - DNA, 180 bp, Klebsiella oxytoca
atggctcgtacgatgacggtggacgtgggtgatgagctgcatgaaaagcaggctgaatccagacttcaggaactgcgcgatctgctggccgaagggatcagcagcggcgaggcgaaaccatggaacaagaatgcattcctgaggaatgtcagggccagggtggcaaatgaaagagattga

SEQ ID NO: 181146 - DNA, 432 bp, Klebsiella oxytoca
atgaaaaatatcgtcttagcatcagtgttaggtttgagcttaatttctacggcctgggccactgaaactgtaaatatccatgagcgtgtcaataatgctcaggctccggcccatcagatgcagtcttcttcaactccagccgccatccagggggcagctccacggatggccggtatggatcagcatgaacaggctattattgttcatgaaaccatgaacaatggttcagcagatgcacataaaaaaatggcggaaagtcatcagaagatgatgggaactggcaccgttaacgcttcccgtccggcgacttcgtttgcggcaatgaatgagcatgaaagagctgcagttgcccatgaatttatgaataacggtcagtccggcccacatcaggccatggccgaagcgcatcgtcgtatgctcaatgcaggctga

SEQ ID NO: 181147 - DNA, 351 bp, Klebsiella oxytoca; identical to SEQ ID NO: 177740

SEQ ID NO: 181148 - DNA, 909 bp, Klebsiella oxytoca
gtgatcaataagatttgccaggtaattgacggggagtacgtctgcgacattgatatcagtgtggaagaatggaaagctctgttaatgaatgaaaaggtttttgactctaaaagtattgaggcgttaaaaaaatggtatgttgaaccaaatcattcctgcacatgtttcgatataggcaaaaagtacgaacagcacagtatgagtgctaatggcgttattaacgggctcggtggtagagttcaaaaagagcttggcagatttgaagttaaagggatcggcaatatagcacccggcacaaaattcattacagtcatgaagagtaaagaaaccggtgaaaaaccaaaaagatacttatggactattcgtgatgaacttgttcaggcaattaaagaactggatttttttgggtcggaagaaataaccaccaatgagtattactcagacgatgagttgatcaacgccatggaggcgaatattacatttgatgtcgcgcagacatttgaatatacaggggaagctaaaccaaagaaacatgcaacagaagtaaaaaatggcgtctcgtacccaagaagtaaaggggtttcaaaaaatgcactgaacaaagcaggttacagatgtgaagtcgatggcgaacacccaaccttcagaaggcgtaactctcccctgaattatactgaacctcatcacattgtacctatgtccaggcaggatgactttaacacttcgcttgacgtcgaagaaaatataatatcgctgtgttgcaattgccataagcaaattcacctcggacagggatatgaagaaatgcttgagaaaatatataatgagagaaaggagttgttaaaacaggtagctatcgatatatctctggaggatttgattcgctattataaaggacagaacaggtga

SEQ ID NO: 181149 - DNA, 1563 bp, Klebsiella oxytoca
atgcctctgatcacgcggcttatgctgcaaaactttaaaaagtttccggaactggacctgcgcttcactcatgaccgtaacattctggtcggggacaatgagtccgggaaaagcacgattctgctggcccttgaccttgtgctgagtgacagccggcaccgggtcgaggcattgggtgtggaatcgctcctgtcccagtcagcagtaaggcagtttcaggaaggtgagcgccgcgccgatcagttacccgtgctgacagctgacgttttcctgagtaatgggggagatcctgacctgaacggcaggcaaaatctggcgggtatcaatgcggatggtctcagaatgcgtattgcaccaatgacggaggaatacggccaggatattcacaatgtactacagcaggatcccgataattttccctatgaatactattccgtgcggttcagcaccttctccggtggtcatttcgccagcttcagacgctatctgcgccatctgctcttagacagtgcacgcatcgataacgagcacgccgcacaggaatatacgcgcacagtttacagcgtcaatgtgccggtggccgatcggtaccggcttgaaaacagttaccggcaacagaaaatgcacttctgcacccggcatctgtcagccataaacgacacgctggaaacgtatcagtttggcgtgcgttccggtgctaaatcagggcttgaggcgaatctggacattaccgaggacggtatttccattcgtcaccgtggaaaaggaaggcagtgcttcatcaaaacggagtttgcgctgcagcggcatcagcagcagggagagctccacgtactgttgcttgaggagccggaaaatcatctcagccatgtcagtatgaagaggctggttaatcagcttgccactgaacggcagacgcaggtgtttattgccacacacagcagccatatctcctcccgcctcgatctgcgtaaggcaatcctcctcgggtctgcccggccggtactgatgaatgaactttccgctgagactgccgccttcttcatgaaagcaccggataataacgtactggaatttgcgctggccagacgtgtgctgctcgtggagggggatgctgagtttattctgatcgaggccttttatcgccgcctgtatggcagggcaccggaggaagacggagttcacatcatcgctatcggcggaacgagtttccgtcgttatcttgaactggcccgtcttctggaaaatcgcgtcgcggcccttcgtgataatgacggcaactatcagcaaaactgcgatgaacgctatgctgacgtgatttgttcccgctcccgggtatttgctgatcgcgataacacccgatccacatttgaaatcagcctgtatcaggataacgctgatctgtgtgatacgcttttccgcggaccccgccggacactcacggtgcaggaatacatgctggccaataaggcagaagcagcattccggctgttacagctgcacgccggagagctgaccgtacctgattatattcaggaggcactggcatggataagagagtga

SEQ ID NO: 181150 - DNA, 417 bp, Klebsiella oxytoca
gtgaacaagacctatatgctcgacacctgtatctgctcgttcatcatgcgcgagcagccggaagccgtcctgaagcgcctggagctggcggtgctgcgcggccagcgcatcgttgtctcggccatcacttattctgaaatgcgcttcggggccaccggcccgaaggcctccccgcgccacgtcgagctggtcgacgcgttctgcgcccgcctcgatgccatcctgccctgggatcgcgctgcggtggacgccaccacggagattaaggtggcgctgcgaatggccgggacgccgatcggcccgaacgacacggccattgccgggcacgccatcgccgccggtgccgtgctggtgacgaataatacgcgggaatttgagcgggtaccgggtcttgtgctggaagactgggtaagataa

SEQ ID NO: 181151 - DNA, 231 bp, Klebsiella oxytoca
atgagaactgtatccatttttaaaaacggcaataaccgcgccattcgtctgccccgcgatctggattttgaaggagtgagcgagctggagatcgtccgggaaggggacagcattattttgcgtcccgtccggccgacctggggctcgttcgcgcagttcgagaaggcagacccggactttatggcggagcgcgaggacgttgtcagcgacgaaggacgatttaacctgtga

SEQ ID NO: 181152 - DNA, 354 bp, Klebsiella oxytoca
atgggacgttccgttaaggtcaaaatcggtggaagggagtttgcgtccaaaaaagccgctgtggactatttcatggatcagcgtgaggctgtaaagggatctggcccgctccgggaaggtcagttctttgatgagctgctggagctctatacacggtactgtgaggtcacaaactgggagttgagtaacagagtgatttacgcattcagtgttgattatgaaccacgcaagaatggccagacctgggcatcgcatctctgctactgggtgcagttttcaccgaaggacaaattatccttttcggtaagggaagcagtggatgagatcgcaaaagctgcagctgaacaaccgtag

SEQ ID NO: 181153 - DNA, 609 bp, Klebsiella oxytoca
atgaaaaagggaaaaacgtcagaaccggggctgctggccagcgacagcgactggcacaataatgcctgcctgaattacatgccggatcatggtacagcttacaccgaaggttacaggcgggctgctgatattctgattaaccacattgatgaatccgggcgggaccaggattttctggtttatccggtgttgtttctctacaggcatcacatcgaactcattatcaaacaaattattgggctggctctggcactgacagaagagccggataaacgccagtacaaaaaagatgaccataacctgaataccttatggccgctggcacaaaagctgatcctggacgttgatgacagctaccggccttccgattttaaaatcgtcaaagaggtggttaaagctcttcaccaggtggatgaacgggcgacagatttccgttatgcccggagaaatgacggcacccgcagcctcgaggggatccattacgttaatactcgtcgcttcggggaaaaaatgggggaggcttcagatttactggatggaatagataaccgcctccggtacctgctggactgtaacgccgaatggaatagtattctgggcagcttctga

SEQ ID NO: 181154 - DNA, 330 bp, Klebsiella oxytoca
atgagtgataacaacaattctgtttcacaccagaccattgaactgctgacacgctgtctgcagctgcagtcagaaaaagacggtattcagcgccccacgcctgacaaagcgctggttggcgtgcccgttgatgacttcacccgccagatccatcaggcctgcctgtacgcctcgatgaccgacagcctgctggccctgcaaaaccgactggccgatacgggccggcagctggaacagcaggggcagatccacgtcgacgccggcgaaaactacgccgtggccgctgttgcctggcttgaacgctttacggggacagagaacgcgcaatga

SEQ ID NO: 181155 - DNA, 258 bp, Klebsiella oxytoca
atgaaacttgaatatatacagataaacaataccgtaaggagtggtcttaatcctttcactgacggggtgattattcgtgatacaaaggtattgatcacgctcaatctcccggatggttggaaacccactattgagggggaatggcggcatatgtcggacgccgacacattgtcagatcgtattaaaatgcttcagcatgcgatttatgagcggtatcagggatacagtgcagatattcccgccagttgggccagataa

SEQ ID NO: 181156 - DNA, 1500 bp, Klebsiella oxytoca
gtgacgctcaatacttctcaggtcagttactacatgactcaacgtaaaaaaggggcaacccagcatatctcggccatgaaggccggtatctctgtccgatctggtcgccggatcgagaaagatcagtggtcgaaagccggtgaacgccactggcgaacgcgtaaagatccacttgaagctgtgtgggacagcgagcttgtccctttactgaaagaaaggcctgctctgatgccaaccacgttgctggaaatgctacaggataaatatcctggtcagtaccccaacaacctccgcaggacaatgcagcggcgggtccgtgaatggaagttgcaatatggtgcggagcaggaggtcatgttccgccagcggcatcaacccgggttgcgtggtctgtctgactttactgagctgaaaggcgtagttgtcaccatcgccggtaagttgttggcgcataagctgtatcacttccgccttgagtggagccactggagctggatgcgggttgtgctgggtggggagagcttctctgccctggctgaagggttgcaggaggcgctcggtcagttaggcggcgtgccgtcagagcacaaaactgacagcctgcgggccgcgtggaaacaccggggtgaagacggtcaacgggaactgacagagcgttatgccgagctctgccggcactacggtatgcagggcgtgcacaataatgccggacggggccatgaaaacggttcggtggagagcgctcacgggcatctgaaacggcggatccgccaggcgctgatactacgcggtagcaacgacttcagtacgcttgaagaataccaggccttcatcactcagcaggtcatgcggcataaccgcaataatcaggatctggttaaagaagagcagcctcatctgaagccgctgccgcttcgtcgcagcgccgactatgacgaactgacggtgagggtcagtagcagcagtaccatcaacgtcaggcacgtcatctacagcgtcccttcccggctggttggccagcttctgcgggtccggttatgggatgaccgtctgagttgttacgttggcagtaacgaagtcatgaactgtccccgggtcagacccgaaaaaggcaagacgcgggcacggcgaatcgacttccggcatgtgatcgacagcctggcaaaaaagcccggggcgttctgccatgcgacactgagaaacgacatcctgccggatgatgaatggcgaaaactatggcgccgtctgtgcaaccacctggagcccgaaatggctggcagactgatggtacacgcactgaaactggctgcggggtatgacgatatctcggtcgtggcacgcgggatggagcagatgctgaataccccaggcgaactggatctgaaccggttgatgcggttcctgggaataaaggaaaaagagctaccgcccgtcagtgtcgttcagcataacctgagcagttatgagcagttgctgcgtggaaaaggaggtctgcagtga

SEQ ID NO: 181157 - DNA, 756 bp, Klebsiella oxytoca; identical to SEQ ID NO: 166082

SEQ ID NO: 181158 - DNA, 141 bp, Klebsiella oxytoca
atgtttgccctggccgatgtgaacagcttctatgccagctgtgaacgtgttttccgaccggatttgaaaggaaagccaatagtcgtcctgagcaacaacgacgggaacgtaatcgctcgcagcgccgaggcgaagccctag

SEQ ID NO: 181159 - DNA, 672 bp, Klebsiella oxytoca
gtgccggacggccagtattctttctatctgcacagcgacgatcgcaccgacatcgcggcgatggcaaccatcagcaccatctcacagcccctgcgcggtgagttcatccgtaccgccgccaccgccggggcggtggtataccaggtggatgcccgtttaccggcgctgatcccggtgttctttgccgggcagctgagcgctgcccgcctttgcgctgttatggccctggtctccggaacctggtcctcactcacaggacttccagatgagcccgaaaatggtgaggctgctctgcccatgtcaccggagacggaataccagcgccggcgttacaccctgacgcttcaaaatggccggagtggggaacgggtggaaagtgtgctgacggaagcgtcatcccgtctgcgtggggatctgctgagaaacctgattatcaccggtctggccctccacacgacggcaccggaactgccgcgcctgttgaccagtatgccggtaccgcccacctcggtcagtgagctgcaggcactggttcagcagatggccggcaccactgccgtgaacagggctgctgctgcagtaccggatacgccggcaacatctgccatgccggtgtctggttcggatacccgggaaataaagaaaaatatgcggcgtgcattcggtgactaa

SEQ ID NO: 181160 - DNA, 231 bp, Klebsiella oxytoca
atgtcaccaggattcagaagtgttctccgtttcgcccgcattcccgtcgacagcagtgaactggtccgcaggaaattcggcagccgactgattggcattgtgacgctgtgtctgcttccgcttctggtttttgacgttccgcagtgggttttcattttgtcgcaggtcatctggggggcaggcgtctatattggcctgtccgtggccggagacaagacccggccacgctga

SEQ ID NO: 181161 - DNA, 156 bp, Klebsiella oxytoca
gtggtctggtttgacagcatcattctgctcgaggacgtggagaacagcaccctgcgcgggctgaagttcctcgatgtgtggaccgtgaccggcgcgccggatgccccggtactgcgtgacgagtgggggaatgactggcgggataccacacgctga

SEQ ID NO: 181162 - DNA, 681 bp, Klebsiella oxytoca
atgtcccgttttatcctgggtaactgtatcgatattatgggcggctttcccgatcgcgccgtcgatttcattctgaccgatcccccgtacctggtcggcttccgtgaccgttccggccgcaccctcgccggcgacaaaactgacgaatggcttcagcctgcctgcaatcagatgtaccgcgtactcaaaaaggacgcgctgatggtcagtttttatggctggaaccgcgtcgatcgttttatggccgcgtggaaaagtgccgggttcagcgtggtcgggcatctggtgttcaccaaaacttacgcgtccaaatccgcctatgtcggctaccgccatgaatgcgcctatgtcctggcaaaaggccgtccgcctctgccgcaggacccgctgccggacgtgctgggctggaaatacagcggcaaccgccaccatccgaccgaaaagccagtgaccagtcttcagccgctgatcgagagcttcacacacccgaacgccattgttctcgacccgtttgccggctctggttccacctgtgtggctgccctccaggctgggcgccgttacatcggtattgaactgatggagcagtaccacaacgccggaatcgcccgcctgtcagctgtccagcgcgccatgcagcgcccggccgccaacgacgtcttttatccggaggccgcgtaa

SEQ ID NO: 181163 - DNA, 222 bp, Klebsiella oxytoca
atgaactatgccggacacgaaaagctgcgcgcagaggtggcgggactggccaacaacatgtgtgacctgcgggcaacgctgaacaacatggagcaccgctaccgctttgattccgatgtgctggccgaacgcctgacccgccagacgctttttcgcatcaatgccctgtttatggcggcgtacaacgacattcttgagctggatgcctgctttaaggactaa

SEQ ID NO: 181164 - DNA, 420 bp, Klebsiella oxytoca
atgtacggaacctgtgaaaccctctgccggttgctgagtgagctctatcccgcagaaaccccgctgaacctgattgtctggtccccggaggatatcgaagcgctggccggtgggatggaatgtgtcgtatctgaacaggacataaaggcggtgctggagcgcatggacgccataccggaagaccagcggcttgagtcgggtgtgtctgccggtgcggtgatggacctgatcgatgaggtaaaagaggccgttccgggagtcctggtgccggctgacctgctcgaaaccctgctcatcaccacggaacaggcgttgtggggcagggaatgggccgcccgggacggtaactatcctgtgccggaaagcgttactcaccgccttgctgatgcagcaaaagtgcgtgcattactgaaaaactga

SEQ ID NO: 181165 - DNA, 786 bp, Klebsiella oxytoca
atgcaggaaaccaccaccttaaacgcccttgtgatgcgccgtgcacgtgatctgctggctgattacggatggccggtccataccgatgttggccagcgtgatccggtaaataaaccgggatggataagtatttatgtccgtctggacgcggccgctattgttcacctgcttcctttgctttgtaccggtggagtacccgcagcgctgcaaactgccatgacaaaaatagccgggacgccagcgcagattattttatccggcagccgctatgccgacgcgccgcaactgccggaggacggaacacagataacctttccctgggccggggaatggctgacagagcctgaaattcaggctgtgacggattgcctgtttcgtgccgtgcgggatatttcccggcaggtccgggaggatgcgcgccggattgaggccgcactgaccacgcgcggggaaacgctgttttaccgccagacacgaaatttccgtctggttgtgaaggaaagtgatatgccctgctggctggacgaagaggacgacaatgtaccggtggtactggatgccctccagaacaaaggcgcgcgctacagtgccgttgagtactttgttatcagcgacaaagtggatcagatcctggcatgtgggcagatatgtgatgtgttacggataccgggagagcctgcgcgccggtggatggatttatccctgttacatgaggtcatggcagaagcgcgcgcagaaatcacctttgtccgcagtgccctttcaacaatccggtcagtgtcgtga

SEQ ID NO: 181166 - DNA, 429 bp, Klebsiella oxytoca
atgcagtatgtgacaacgcgccctgtcctgaatgttgaagagtccgatcggctttctttcctgccgtacatgttcggcacggatttcatgatcgcagaattacaggtgtatgccctggcgaaaaaatggatgcctgaagttgacggcggtttctggcacttcatccgcttaccagaagggggtggctacatgatgcctgattgcgggcgggttcatctggtgaacggtgaaaactggttcgatcgtaccgtcagtgccgacgcggcgggcattattctgaccagcctggcagttaaccgtcgtctggcgtcctggcatgactgcggtaacccggccctgacccacctttacatgctgcgtgatgcccagatctgggatcacattacctttcacccggaatgcaacgccatttacgccgcgctggactga

SEQ ID NO: 181167 - DNA, 192 bp, Klebsiella oxytoca
atgaatattgcaacagaaacccgtgaaatactccgacagtacaaagccctgattaatgcccgccgccgtgatgccggtcagcgggaactgacaaccgcacaggtcatggatgaaatctgcgagtacatgacctgtcagtgtgccgtgtatctcgccggtcatttcatcttacagggtggaaaaggacggtaa

SEQ ID NO: 181168 - DNA, 252 bp, Klebsiella oxytoca
atgccgatgtcaaagtggaatatcgcctctttctcaaaagaagaacaggacaaagtctccgtcgataaagcggccgctgccgtcgcatggcaggagcgtatgaacaagcctgttgtgcccgaactcgcggagcgtgaacagcctgggcatctccgtgagtatttccgggaaagattgcgtattcacagactgaacagtcagcagctgccgcgcgcaaatgctcctgaatatcagaagacagaagaaagttaa

SEQ ID NO: 181169 - DNA, 231 bp, Klebsiella oxytoca
atgatcgttaccattgtttcaccttccgcagaggctgtaaagccccgccgtcatccgcgcattttccgcgccgatattcccgcgccggagattgaccccgcgttaaaggcttttggccgccatatcgccagaagtcaccgcaaggggcgcggcgttcatatccccgcgatgaaaaacgccgcttttgggcaggtgctccgcacgctcgaactgaaacgcgcatttaactga

SEQ ID NO: 181170 - DNA, 1383 bp, Klebsiella oxytoca
atgactcaggcttttgcacagacactcagtgctgacactatcccgcagaccggcgctgaagaggagatcggccagatgtatcgggggacctattccccggatgataacaagttgcggctttatgcctcgctccgtctcgatgaagagacgtataaaaaagtgcatgatgcggggttccggtgggcgccgaaacagggactgtttgtggcgccagcctggacaccgggccgcgaggatgtgttactgtctctcgccggtgatatcggggacgaagacagcacactctttgaccgtcaggagcaacgcgcggaacgctttaacgactacagcgacaaacgcgccggtgaatctgagcgggagcttgcgcatgtggacgcgctggcgtcggctatccccttcggtcagccgatcctggttggccatcacagcgaacgccgcgcgcgccgggatgcgcagaagattgaaaacggtatgaaacgcgcggtgatgctgttcgaacgcgcagaatactgggaagagcgcgcgcaggcctctttacggcacgcgaagtacaaagagcgtccggatgtgcgttaccgtcgtatcaaaaaaattgaggcggaattacgcaaggcagaaaagcacattgcccggtctgaaaagtatctgacgatgtggcgcgcgcagactcttgatctgaaaatggcgttactggtcagtaattatgaccatatttatgccagcttcacgctagacaaatacccccgcccggcagagaaaagccagtatgagggctcgatgtctctccattctgccctgtctgaggacatcattacttttgaacaggcgcgggatattgcgatccgctgccatgaacgcacaatccgccatcagcaacgctgggttcatcattatcgcaaccgtctgagctatgagcgcgccatgctggatgaaagcggcggtgtggtcacccggacacaggaatttgagcctggcgggcaggtgctgagccggggcgagtggttaaccatcatccgcatcaacaaaagcaatggtcaggttagttcggtggaaactccctgttaccgttttctgggctacggcggcaccatgaaactgaccccggaccgcatcactgactataaagctccctcagccgaagaggtcagcaccgcgaaacaggccgcaaaacgtcccccgatcgtcaactatccgggggagggatcccgggagatgaccaaagccgaatgggccagaatgccgggggactataaggctgtccggggtgtggccgaaactgagacgcacggcgcgtaccgctttcgccgctgcatgacgcacggctgtacgctggtgaatgtctatatcactgacatgaaaaccgttgaaattccgaaaaaatga

SEQ ID NO: 181171 - DNA, 564 bp, Klebsiella oxytoca
atgcacagagaactcagggcgcgtattcagacgatgcgggccaggctggatgaccggatgcctgtgacagaaatccgggccagttcacagctgtttgtctcgcccgatccgctctgtcgtcggctggtcagtctggcggaggtggtggactctgatcatgttctggagcccagcgccggaacgggcgccattctacgggcggtcagggaaggcgcgccacgggcacagtgtgacgccgtggagctgaacgcggatttggtctgccatctccgggatcatttcccgggcgtcagcgtctggctgggtgattttctggaataccggccggaaaagcactacagcaaaattatcatgaatccaccgtttaaccatgcgcaggatatccggcatatacagcgggcagtgacgctgctggcacccggcggcgtggtcactgcggtctgtctgaacgggccgcgacaacaatccatactgaagccgcttgctgatgtctgggagccattgccgcgaggcacattcacgtataccgacgtttcaactgttctgctcaggatagctgcctga

SEQ ID NO: 181172 - DNA, 249 bp, Klebsiella oxytoca
atgagcagggacccgccgcaacgtcggggcgcggcacgcgaaacggcggtgccccttacagcccggcggtcactggccggggtgcagggagcgcagggcacggcgcgacagggcggcgcctccggaacggaggctgcaagcctgccgttgacgttgcgtcatgggatggaagcccgacagggcggagacagcctggctggctccgttcacgacagcccgcccggacgcccactgcaggacctgaaataa

SEQ ID NO: 181173 - DNA, 549 bp, Klebsiella oxytoca
atggcagcacgaggcatcaataaagtcattctggttggtcatctggggcaggacccggacgtgcgttatatacccaacgggagcgcggtggccaacctgacgctggccacatcggaaacatggcgtgacaaacagagcggggaactgcgcgaaaacaccgaatggcaccgtgtggtcatgttcggcaagctcgcggaagtggcgggggaatacttgcgtaaaggcgctcaggtctacatcgagggccagctgcgcacccgcaactggcaggatgaggccggaaccacacgctatgtcaccgaggtgctggtcgggcagaacggcacgatgcagatgctgggtgggcgtcgtgagggcagttcgtcagagagcgccgtacctcatcagcccgcacagccgcagactccggtacaacctgctgaaccccctgtggcatccccgaaagcgaagggcggtaaaaaaggccgtcagagtgccgcgccgtcccagcaacccccgcagccgtccccggatgattacccgccgatggatgacgatgccccgttctga

SEQ ID NO: 181174 - DNA, 234 bp, Klebsiella oxytoca
atgagtatttacgataacggtccgttaccggatgacaccttcaccagagcacaggctgaagcggtggcggcacagtttgaaaatgtcgccattgaagacgatcagggttcgcattttcgcctggtcgttcgtcagaacggcgaaatggtgtggcgcgcatggaattttgaagcggatgccgggaaatggctcaaccgttatatcgaacgttatggcatccgtaacacgcaataa

SEQ ID NO: 181175 - DNA, 2058 bp, Klebsiella oxytoca
atgtctgcaacagagtctaaggtaaaaactgcaccaaaaaccagcaaaaaatcggtgaaacctgccgaagccgccgccctgaaagcggctctcgatgccgcgccgattgagtatgtcccggtgacggcactggtaaaatctcccctgaacgtcaggaccatcccttatccggtggagaaagtacgctcaatggcagactccattgaagcgcttggcctgttgcagaatctggtcgttcattctcttcatgacgggcagtgtggtgtggctgcaggtggtcgtcgcctgaaagctctgcagctcctgcagagtgaaaaccgtatcgatgccggatatcaggtgatggtgaaaaaggtacctgatgaactggctgttgcggcatcaatggcagaaaacgaacagcagatggcaatgcatccgtctgaacagatcgccgggttccgcacgctggcagcacaggggaaaacccccgcgcagattggtgacttgctggggttcggtacccgtcatgttcagcgtatgttgaagctgaccgaactggctcccgacattctggaggcgctggcgaaggatgaaatcaccaccgaacactgccagtcactggcgctcgaaagcgatcagaaacgccaggtggaagtgctggaatccgcccgcaaacggtcctggaataatgaagtatcagtgtcctcgatccgtaacctcattacctcagaagaggtctccacaaacggcgacaaattccgctttgtgggagaggccgcattcagtccggaagaaatccgggttgatctcttcagcagcgaaaacggcggctatgtcaaaagtgcttctctcgataccgccctgctggaaaaactgcagagtatcgcggaacaccttcgcgaagcagaaggctggtcatggtgcgatggccgccttgaaccgatttctcactacgggaaggatactaaaatctggcgtctgcatgctgtcccgcctgtggcatataccgaagccgaatcggaacgacttgccttccttgcacaacgcgaagaagaactcgaagtacaaaataccggggatgacggggagcgtgttgcaggtgaactcaatgaggtctggcatgaacagcagaccattgagtttcgcgctgaacaccggacatggcccgatgaaatgaagcaatccgccggagtggtggtttcctggactggtcaggaggtgaaagtacagcgcggtgtggtgctgtgcgccgatgaaaaaataaaggagaaggatgcatccaccgatcaggctcctgaaaaagtcgatccgctggacgccgtcagtgtcccgttgctgacccgcctttcttctgaacgcacactggcggttcaggcggccctgttgcagcagccgcagaaagccatcgcgctgatggtctggaaactgtgtaattcggttttccataccacgacgtccgtcaaagagccgttctgcattagcgtgagtgtgtcgcattacgcgctgacccgtgaagcacctgacggtgaaaacagcgttgcgtttcaggcaatccaggctgaaaaagaacgccttgaagccctgctgccggaaaactggcgaaaggatatgaccaccttctttacgctcgatggcgcaaccctgatggcgttgatggctttctgcaccgcctgttctattgatggtgtacagggcaaggatgagtttggtcgtaaacaccagagttcgctggatggggtggaaaacgccatccagtttgaccttcgcgactggtggaaaccgacggctgataaccttttctcgcacatgaagcagccacacattgtacaggcactctctcaggccggactgactggcgcagcacaggacgccgcgaaaatgaagaaaaaggatgccgctgaacatgcagagcacttcctgtcaaaaacccggtgggttccggaatggatgaccagtgccgacaaccagaaacagcctgccgcaaagtctgaactcagtctggcaacgagtcagagcgatacagacgctgatgtcgaccacgtcaccgaccataacaacccggcctgcgccgcctga

SEQ ID NO: 181176 - DNA, 432 bp, Klebsiella oxytoca
atgcacacgatcattaccaccgatgtcctgaaaaccatgttcgccggagagctggaagactaccgcgccgccggtgaagattttcgccgtgaactcacccatgccgtgatgcgggatctgtcctgtccggagagctgggacgtcaacggagagtacaaaagtgaattcggcggattctttccggtacagatccgtttttccccctctcacggtcattttgatgtggcggtctgcagtccgggagagctgagtacgcgctggatggtcgtttttgtgacccgtggcggccagccgttctccgttgttcgtagcatggaaacatttaacccggagttgatctcccacacgctggcactgatagcgtgtctcgatactgacggctattcctttgccagtatcatcagcaccctggctcaggagggcgaactgtga

SEQ ID NO: 181177 - DNA, 729 bp, Klebsiella oxytoca
gtgatcccctcatcccatgccattgtgaccctgaaacctgcacgccaggctgctttgcaggccatcatgttcgtggaagacgcccggtttcggggagctcgtttgccctcgatgccccatgtccgcacgttcctgcgcatgctgaccggttgcagtcgaattaacagcgccgtcgcccggagtattcccggcctgcaccgtgatccgaaagaccggctgaataatctgaagcaggtggaagaggcactggatacgctgattgccagtcagggggaatgctgcccgctgccgctgacaaccgatgttcaggctgaactttttccggaagtgattcacacccgaaccgatcggcggatgcagcgtgaaaatattgcgttcacccggagagttcggcgtgaaggcaaagagatagcacatacctggttgctgcgacagaacctgctggggcaggctatcacggagcttaactttcagtcaccggagaccgttaacacctggtaccgccagtgggctgacgagtttgacgcgcgggatctggagcctgccttctggaactggcgatcgcggtttgcctcgctggtctccctggactggctgcgggatgccggggagccgctgtatggtgtcatgcatgaaatcagcttcattgtgagagagacaccggagtctgtgcgtcaggcagaacgctggcaggtcccgaacaagctgacacaccggagccgcggatga

SEQ ID NO: 181178 - DNA, 330 bp, Klebsiella oxytoca
atgtttagcgtcgtttatcatccggatgccagggaagaagccacagcattacccgtaaaaatcagggtgaagtttgaccgtctcatcggcaaactggaatatgatgcccggttgctgcgggaaccagacaccaggcctctgggcgatggacttttcgagatccgcacgatggggacggacatcgccaggggcatatgggtataccacaaaggcaataccatcattatgctgcgggttttcatcaaaaagtcacagaaaacgccagcgaaagaaatcgatctcgccaaaaagcgtttagcggaggtactcaatgaaactggtaagccataa

SEQ ID NO: 181179 - DNA, 282 bp, Klebsiella oxytoca
atgaaactggtaagccataaagaactgcatagcgagtggatgcaggacgatgaatatcgcgctgcatggcaggaagaagaacgcaaggagaagctcagagagctgctggcagaatggcgtaagcatgacaacctgacaaaagcgcaggttgctgaacgcatgggggttacacctccggttatttcccgcctggaaaacaacatcaccaaagccagcattgacacgctgacccgatacgctcatgcctgcggtatcaagaagcctgtcattgcactgtactga

SEQ ID NO: 181180 - DNA, 291 bp, Klebsiella oxytoca
atggcctcaccggggggacaggatgcacacacccgacacgtcggaacggcgtggcgccataaaagtgacggcagctttatcgccggcacggtgaaagcggcgcatcctgacaaggatgcagcaagcgtgaatttgaatttgcgtcaggatggaagcccgcagggcagagacagcctgctggctctgttcacgacagccgtgtccctaaagggacgacgcccggatcggaattcattgggttcgcctgtaaggataaataccggaagggataaaaagcagcatgccggatga

SEQ ID NO: 181181 - DNA, 324 bp, Klebsiella oxytoca
atgcacacacgaaacgtcaaaaccgccgctcaagaatcttccagaaagatggggggaaaagccgtgtcatacacgatcctcgttgctgataagccaaaaaactcagaggaagagtgggacgtcatggaattcagcagccttgttgcgctgaaaaaatatcgcagaagccacccggaaaaaatgagcttcagctatggctatgccctcagccgtggcgtggataagcagttctgtcatatcaacgtggctgaagcggatcatttcaaacagtttgtgcgcctgattgagcgtgcaggcttcaatatccaggacaaccagctatga

SEQ ID NO: 181182 - DNA, 219 bp, Klebsiella oxytoca
atgaacacacaaaacaacaacgtcaacaccgccgcttttgaatctaccgaaagatgggttatggcctgcccggaaccgatcgcagcaaaggtactggcatttcacggaaagagcgccagctatgcctttaatgtcctggctgatttgaaagctgccggtgcgtcatatgcacgtcgaaacattatcgcagatatgttccggcgtttaggcgtgaagtaa

SEQ ID NO: 181183 - DNA, 348 bp, Klebsiella oxytoca
atgtacttacacctcaccgaatcttcagcccgtccgggaatgcaggtgactgccgaagccgagcatgaatactggctcagtcgccagaaagcggcggtgaaagcgcccgctgaaatcgacgttcacgccttccatgatgcgctgggcctgatgtacccgctcaactggtcaacgagtgagaacggcggctgggagacgttcatgctgcaggaaatggtctgcggtgacgtggcagagatttatgcccgctatggagccaggtatttccggctgcgggatgtgtgcaacctgagccatgcgcagattaaaacgcgcataaaggagggatttaacctgttccagaaatga

SEQ ID NO: 181184 - DNA, 147 bp, Klebsiella oxytoca
atgcaatttgacccgcaaatcgtcgcacaggcaaacgcgtttgtaaatgctttacgcagcgggaagcgtgcccacgtccccgctatgcgcctggaatactggcaacagtttttgaccgtggtctacagcggcctcggtctggcgtga

SEQ ID NO: 181185 - DNA, 531 bp, Klebsiella oxytoca
atgcacacaatacacgtcaacaccgccactcgtgaatcagacgaacaatttaaaacagataaatatctgcgctgtgcagtgaccgataacaaggcgtgtctggattttatccaggcgctcttttttaccccgtctgcggataatatggcagataactggttacgccagcactccgattacgacggtggtttctggtcttactggattattccgcagggtgtcggtgggaatattgcaccaaaccgtatccagttcatcaccacccagaccagatatattgcgccggaaggtgagcaacgttacaggatgaacatccctgagaattattttgagaatgaattcagcgccgatgcagcaggaattattgccacgctgatggtgatgaacagtctgtcctggcaggtgtcagaaatggggccggaatatgcacggatctgtcatcatcttgtgtcccggcaggatgcgttgaggaattatgtcaacattatccagcatcccgaacgtcatttaatctggcgtgcgattggttag

SEQ ID NO: 181186 - DNA, 480 bp, Klebsiella oxytoca
atgaaaggaatggcactggcattcactctttttttattttccagttcgtcaatggcagcggattgttttgatatggcaggacgggattatcgaatagatccggatctgctccgggctatttcatggcaggagtcaaaatgggtggtgggtgccatcggaaaaaatccgggaacaggctacggtgccggactgatgcaaatcgattcgcagcaccatatgcaactgtcgcggtacggaattaaaccgcaaaatcttctgacagatgcctgcctgaatatttacaccggcgcatattatctggcactggcgtttcagaaatggggtataagctgggaggcggtcggtgcctacaacgccgggttccgcagaacggacaggcaggccatgcgacgactggcatatgcgaggaagattgaggttatctaccgggccatcaaaaccaataaaaatgcaggacaaccccatgctgttaaaaagtaa

SEQ ID NO: 181187 - DNA, 393 bp, Klebsiella oxytoca
atggctaaaattcaggtgtacgttaatgataatgtttctgagaaaatcaatgcaattgccgttcagaggcgtgcagaaggtgcaaaggagaaagatatcagctattcaagcattgcatccatgttacttgaactcgggttgcgtgtatatgaagcacaactggagcgcaaggagtcaggctttaatcaaatggcctttaataaggccttgcttgaaagtgtcataaagactcagttttcagtgaataaagttctgggtattgagtgcctgagtccccatgttaaagacgatccccggtggcaatggaagggaatggttcaaaatatccaggaggatgttcaggaaatcatgcaccgatttttccctgaagatgagagtgaaggcgaggaatag

SEQ ID NO: 181188 - DNA, 702 bp, Klebsiella oxytoca
atgtgtgcgatggatcgtagtggtgatgacagagtaagtcaatcagtaaaggatgttcttcttcacataaaagaactgtatcattcttcaccagtttctgtgtgtgtcagaaactctgaaagagaattcctctataaaaacacttcatttgaccagttgtatgcttatctattaaataaagaaaaatctaatttcaaaaatgttgtaccaatagaggttgatgtgttcctcttgaggctagaggttgagtgtagcttacttgggaatggtggtgttttaagtaagtccttttctaataaaggaactggctttaacgtttatatggaatgccgccaggcagaaaacggtgatattatcgtgatttggatgcttaatttgttaataattaggcctcttgcaggatttagagtttttaaacaggacctacattccagaaaaaaatttgatgaattaataagccgtttaactgataaaaacctcataacactctccttttatatgtccgggtttgatgtttcagaaatatcaattgctatgaacgttgaaacaaaaaccattgattcaagaatcgagagatcaaaaaaactaattaagcagtattacccctcatttgttcagtttaaatatgaatgtttccgtaacaaggcaatatacttttttattgaacaaacactcgattatcttttgttagagctttgttaa

SEQ ID NO: 181189 - DNA, 1248 bp, Klebsiella oxytoca
atggaaaagaactacagagttacaacatttgtcatggatagtggcgagcgctattgcatggtagtggatcgtgcttctggccttcccatgtattacccaactttgtttttaacaacccaaatccgtaataaaggcaatgccttctcaacgacgctagctgctgctaacaacctagtcttgttgttacgctttctggagagtcgtgacattaaccttgaacagcggtttttgaccaaggatttcttcaagccacatgagctggacgatctgcgagattttgctcagcgcaagcaagtcaggatgccatcaaaagcgctctccaacccttggctggatgatgagttgaccaatatcgtggataacggaacacaacactcccgcttaacaacgtttgccaactatttacgctggtatgcgatgcatatcttaaaaatgcctgagctggacgttgttgaacagatcaatgcaatggcggagcagataaagacgcgccgaccgtctaaacagggcagaaacggtgatttgcaagataagtcattgagtgatgttcaattggatgcgttatttgaactcatccagcctggatcagcgtcaaaccctttttcaatagatgtccagcgtcgcaatcggctgatgatcttgcttctgttttatcttggtattcgaggtggcgaattgttaaacatcagaatacaggatatcgactttagcactaacaggatccatatcgtgaggcgagcagatgaacgagctgactcgagaactaatgagcctaatgctaaaactcgagagcggctattaccgttggctgagtccttagttcaagaactgcatggttatatcacccaagatcgtcgtaatgtccgaaatgcgaagaaaaatgactacctgtttgtgacttacaagcgtgggccaactgtgggaaaccctatatccaaggcggggtatcataaaatattttccgtggtcagagccgtctcgccacaattgtatgctgcatcaggacactcgctccgtcacacttggaatcgcaagttttcagagcgaatggatgccatggatgagcaagtcagcgaggaacgccaagagcaagtccgctcgtacttaatgggctggagggagggctcaggaaccgcagcgacttacaacaagcgtttcattcagcaaaaagggtttgaggccgctttggcattacaaaaagctaacggtactcgcttgcctgaggacttgaagaatgatgacgaataa

SEQ ID NO: 181190 - DNA, 1563 bp, Klebsiella oxytoca
atgatgacgaataacatcttaccagcattagttcccgagcgaatcccagcaagggcgaacggatactattttatgctgcatgatcaaaaatggcggttagataaaaacaccactattccggttggattgctacataggcttctggaatcagagtctctgaagggggctctttatacactgtcattctatgcaaggaacatgtctgctggtcacacgcatagtattttctggtatttcttagcaatggttcgagcaactaaagctacttgcatcgacgatatcatgttgattggctacaggtcttctttggatgcggctcatgaatatcggttaggtgttgttagcaccttcctgcgacagtggcacaggctgggctatcccggtgttagcaataacgtggcgtgtttgctggagggatggaggttaaagggggggcgtaagggggatgcggttaagcgcatggatcctcaagatgggcctctgacggataatgaacttcaagcgtttaacgaggcggttgtacgagcttatgaaaagagcttaatcaccatcgcggagttggctatggctcttagcgtcagtcatacagggcgtcgttcaatccagatctctcagctgcgcgtggttgatattctctgcggagaaaatgaaaagggtgaatccttctatgtgttgaatgtgccgcgagccaagcaacgtaacagcttttttcgcgaaagcttcaagccctatgcgatgactctcgaactatgggcagtcctgagtgctcaggcaaggaatgctgttactctggttgagaatcgtctcgggattgaattgcaggaagctgaccggcagcagatccctctgtttcctgatcttgatgtgctagcgaccatccaatccccttatgaattctaccaactgcttgccactgacaaactccacataccagcagcagatataaccgatacactccagtacatcgtagaaaagtccgatatccggtcggaacggaccggcgagctattgcatatcaatgctcgtcgttttcgttataccacgggcacacgagctgctcgggagggctttggcgagttggtaatagcggaactgctcgaccatacggacacccaaaacgcaggcgtttatatcaaaaatatccccgaacatgtgaaaaagctggatgaagcggttggcttccaattggcaccatacgctcaggcttttgtcggggtacttgtcgattcagagagggacgcgcatcgaggtaatgaccctactagtcgtattcggaccgaaatgggacagggcgttggtacttgtggagaacatggcttttgtggtgccaatgttcctattccttgttacacctgcatgcatttccagccttggctggatggcccacatgaggatgtctatcagggactgctcaacgagcgtgaaagggtgaaaaatataactggcgacatccagattgctgctgtacttgatcgcagcattatcgcggttgcagatgtaatcatgcgttgtgcaaaacgtcgagaagagtttagtcagcagggagcaataacaaatggctga

SEQ ID NO: 181191 - DNA, 2034 bp, Klebsiella oxytoca
atggctgaggttttccagtttaagccaaaggctactctgacagcagcagaaaaccttgaagcattcatatccaagtgccgggatcaattgactgtcttcggctccgatatagattggaaagaacctgtttggccaaacataactgtgtttgccaagttaggcgttataacgcgaaaacccgttcagggagaggtacaagaccctgagttcattgattttgctaaagcctatttccgttaccagcaagggcatcggcccacgggaacaaagaatgaaagtaaggccctacgtgcggttgaggcggccttgcttcaagttaacggaaacgcaaatatcgatggcatatcgatttctgtgctggatgaagcagctgaattggcaaggcagaattactccaatggggcagcatatcattgcggccgtgagattgagcgactggctaagtttttaactgaaaaccagcttgtatcaagtgctgtgcaaaattgggtcaatccaattaagcgtgctgaggacaagaacaaaacaggcaaggaggcgaagaaaaatagggaagagaaacttccaagtgatattgccctcaatgcgttggcagaaatttttgccaacgactcaattcatgagcgagacatatttacaacatcggtatttgccatgttgatgtcagcaccgtcacgcattagtgaggtgttagctctacctgttgattgcgaagtatttgaaactgatcgcgaaggtatagaacgttatggctggcgtttctttgcagggaaaggctatgagggtgatatcaaatggataccaaccgtgatggccgacatcgctaaaacagccgtagctagagttagagtgctctctgaaaatgcccgacagctggctaagtggatagagaaacacccggataaattttaccgccatgctaactgccctgatgttgctgatgatgtgccgttgacgatggagcagacctgcatggcgctcggctttgcacataacaccccaaagacgtgcaggtcgtgtcttaaaagtagaggtttagcctcagaagatggtgtgcatacgctaaatagcctgtggcagcatactatggcgcgtttgcccgatgactttccgtggtttgataaagacaaagggattaagtacaacgatgccttgtttgcactgaatgcaaatcagctccacgggaaccgaggatgtataccggttgaattgcataagccaaccaataatttcttcaacaatgatctgtcacctcgtgaaacactggaaggaaaacacagcagtatctttgatcgtcatggttaccgcgcagaaaacggagaacgggtcaaattgacctcgcatcaggctcggcatctgctcaacaccattgcccagcgcggcggcctgtcaaacctggaaattgccaagtggtcggggcgggcagacgtgaagcagaatcgaacctacaaccacatgactgaatacgaactggttggcatggctgaacgccttgaccctacgaaagcgctatttgggcctgtcggcgaggtggcaaagcatctgccagtgactatgcaggagttcaataccttagagcatgccgcagtccatgtgacggagtatggctactgtgtgcatgattacactatgagtccttgcgagaagttccgagattgtatcaattgttctgagcaggtttgcatcaaaggcgattatacagaaaagttggatcggattaagaaacgtctggagaagtcggagcggctgttttctcttgccgaagaggcagtggtgcgcggcgagatgggtgctgatcgctggtatcagtaccacaagaaaactgttacccggcttcgtgagctagtggctattttagagaatccagacattgaaaatggtgcccagattaagctccgtggcaatgatttcagccagcttcgccgtgttgctgaaaaaaagtctattgaggccattgagaaaaaaggcaaagaaagcgaagaagctgtgatgttagatgatttgaaaaccttgttagggggtggtcttggctaa

SEQ ID NO: 181192 - DNA, 261 bp, Klebsiella oxytoca
gtgattgcctatcagacaaagaaagaagcgcttaaaggcctaggccccaaaaatccgcgtccagctagtttgaacattgcagccgctaggattgtgaaccttgaaagtgaaatagaagaacttaaagaacagaaccggaggtataaacagcagtttgtgatttggcaatacaatgcatacaaacatggaatgaaggaatatcaacttaatgcacagttgacaaagattgaccgagagcgttctgatggagaaaaaagatag

SEQ ID NO: 181193 - DNA, 294 bp, Klebsiella oxytoca
atgcacggatcatcttcacatgatgttgaatggttgttcaggcagatttttgactacctgacagaaaagcagggtacgcctggttaccagttaagcaagattgagaaagttgttttggactcactgatcaaagatggcggaattacctgctacgacgatcttgacgaggagttctctgccattcagtcacaagtcgtcgctgtagacggcaaacctgatcaagcagcactaaaagatgtgctcctgcgttatgccatgctgctctggtatgactttagaccatatcgctactaa

SEQ ID NO: 181194 - DNA, 1401 bp, Klebsiella oxytoca
atggctactcaaattaaaagcaacaaaacctaccagggtgatgcagcagctcttccttccccgcaggcgccgatgccgaaactggccagtctttatctggactttgaaaaagaactctatattgctctcggcagaacgacaggtaacgcaattcgtagtcgccgcctggcagacgtggtgacctttacccgtgcatcagaaacaacgcgggtaaacaaaagcgggttgatagagtatctggcatccggtgaagccgcgatcgaatatgacccgattacaggtgagtgtcttggtctgcgcgtggcagccggaacaactaatcaggcggcaaacagcgaaaacttttctggctcaacatggactaaaacgaacgtttcgaccacggccacaaaaaccaccgcgcctgatgggaacccgacagcctctccgtttaatgagacgacggacagtagcgacctgattcactccatgcttgaaaatgccacatcggcggccactgtaggcagtccggtgacgttcagtatctatgcgaaggcgaacaccgcaagcatcattcagctcgtggctcagggtgctgtcgcaacaccgcaatatgccaacttcgacctggttaatggtgttcgtacacgtagttctacggggatactgcagaccagtgtgcggaaatttaaaaatggctggaaccgcatcagcattacgatcactccgaccttagctgcatcacctcaatttactctggcgctggttaacgatgtcacggcagctgcggcactcccggcatacaccgggacaggcaaaggggtttacatctggggtggtcagattgaaaactgggatggagtgacgccgtacatccagacggctggcacaactgtgacccggcctgacgaagtctgcaccgcgcggactgatcttgattttatggctggtgatcgtggtgcaatttatgctgattacaatatgccagccagcctgcaggcgatgagcggtgtttacaacgcaggtcaggctatcgtttgtctggacaatgacgctgtggctgagtatgtgaattttatgaaccgccgtatcagtaacagcattaccaaccagaacctgacggcagccgctaaaatcgttggcagttcagaagttaccgtagaggttaaacgcctggggcaggtgagaaacggccatcagtcctttatcagttcatttatcaacggcgatatgcgcgtgttcgacggtatcaataaatacagtggcgcaccgctggtttcaactcaactaaaccggctgatgattggccgcgcgcggactacaccggctgctatttctaacgcctacctgaaaaggctggtttactatccggttactctggttgatgctgatctggtgtctcagtttaacgcactctcttaa

SEQ ID NO: 181195 - DNA, 2394 bp, Klebsiella oxytoca
atgacaaccaccgaaacgcaaaaaactgctcaattagcagcagatgccgccgttagcgccgcagaagccaaacaatacatgctggaagccgagcaaggatatcaggatactagtgctgccgcccagcaagcccaggatgcagctggctcagctcttttatccaagcagagcgcggctacatcagaagaaaactcactgcaatatgcaacagaggcgggagttgcaagagatgaggctgtggcttccgcatcaaccgccgcagagttcggcgacaataagctcacctttgccgacaccacggccggtcttgccgggacaacatctggtcaatacttccgtgttcctcaaggtgtcggtaatgttctggcatttcgatattacaaaaacaatgcaggcgtagctgttgaagttgctgagtatgttggtcagggatcgatttctaacagcgtcaggcaatacgctactcttttattggcacagaatgacgttgcagctggtaacattcttgacgggtctaagttctgggtaaccaacacatcggatataacgctggctgacgagtatatcaataacgatggtacgctggttgctaccggaagatcgatgccttcgcaagaaaccatcaatgcatcaattgataagagtgaagaccaaaatttatctaaatctctgtcgctggatggagctacaactgaaatagaaaccgaatccggtgaaaagtacttttccgggatgagtgaaagtctccaggaactggcgtctcgaagtgggaaagacacaactgacaacctgcattcggcaacagataaaggcggcctacatcttattatcacggatgcggaagggaaaattcgcatccctctgtctgacttcactttgcaggatcttctggcgcaggttcagcctgtttcaggcccgtttctcaatacgcttagcgcggccgataaggcggcatatggctatatagacgaactaggcggactcaaccttccgggcctcccgacatcagttaataacatgctgacaagtctgtctaagcgtttgcagcagcagaccgatagccggtttctcaccagcatcaaagattacagctgggacccgtccagtcaggaggatgcgcggcaggttatccagcgcgcaatccgggatatggccagaaacacgtatggcggggttatttatcttccaccaggtgtataccggctgagctccttcctcacgcccgcgccgaacgtatcgattattggcgccggtaccggcaaaacaatcctgatgccgtatggctcatattcggcgctccagttcaccacatcaccgacgaatcccgtcccggaattgacggactttgtctattccgattttgaggtggattgtcaggaccaggtgttgccggatgagggttatctccccaggactaagggcctgtattttaacttctaccgccgcggccacctgcaccgcctgcaggtgagaaactctggcgcaacggggatcggcatcgactttgctcgcgattccgcgattactgaatgcgtggttgagaactttggccggctggcgccgtcgggtaacgataaccccgctggtgcctctggacttggcttaggcgctgggggtacgcagagtgagccgctctatgttgctggcaacttctgccgcaacggcaagaacttcggcatcttccttgagaaacagcatggcaccaacgcgccatacagttctgagcacaccatcatcatggggaatacctgcactggtaataacggaggtatgggcgattgtggcgtggatggcatgattatgatggggaataacttctctgaaaataattatggtgtcgttatcagtcctggcaccgtactggcatacccaggatcacgtgggcggctgcaaggcaatattattgccaaaaacgcaaagcatggcgtctattacaacagtaccacagagcagcgtgacggcgaataccagattgatggcaataccattcgtgataacggagaggatgggatcaactttaaagcgccagggcaggaagtgcgcagcatgtttattcaggggaacgatgtttaccgtaatggtcgtcatggcttccacctggaagatggcacagccattaatatggatgtggttaataaccgattctggaataacggtctgaccgctgccggtaacggaattaacctggcctcagaagtaaaactcagctcgttcagtggtaataaaattcgagatatccagtctacgcctactcagcaatatccggttaatgccactggtgcactgaccgacgtcgatatttcgtttaaccactgcgttggcaatgcacagaacacgcttaatctgaccggcacgcagacccgcgtcaccacgttgaataatccaggaatctga

SEQ ID NO: 181196 - DNA, 1044 bp, Klebsiella oxytoca
ttgaacaattcagccatgccgtcacgtctgacggttgttttttctgcgagtggcgacaaaaacacgatcccggtcaattccacctctgaaacgttggctgatggccttgcagcaatggactcaggatttcctccgctgacccgcatcgctttatctgctggcggtaagccgccaaaagggcaggattttaatgggatttttaatgatgcctatacgcgccttcaatgggagcaagcaggcggtttctatacattcgactctgcattttcggcagctatcggtggatacccaaaaggtgcgattcttatcaattcagccagggatggattctggcaaagcactatcgaaaataacacgacaaatcctgatgctggcggtattggatggattaattattcatccggacgactcctgaacgtgcagacatttttatcatccggcacctatacgccaacccctggtactaagtcggctgttgttgaaatggttggcggtggtggtgggagcgatgctgccccagccactggggcggggcaggtatcaatagtttcaggtggtggggccgggtcatatgctaagggtagattttcaataaatttcaccagcattagcatcgttgttggcgctggcgggcagggagggaccgcagcatctccggttggctctgttggtggttcaagctcatttggatcgctgatggttgcgcctggcggaacaagagggccgtctgccggaccagcaaatccacctttcctacctcagggtaatgtcgcatcaagcgctccttccggtgccaatatcataggctctccaggagccccatctacacctgcatacgctaacgcaacccagtcattcctcggatcacctggggcaagtagcgtttttggaggcgggggatgggtgccatcatttggagatccggctattgatgggcaggcatatggttcaggcgcatctggttcttcacaaggaccatcctctccggcagtgaatggcgcccgggggaaagaaggcatcgtgataatttatgaatattcatga

SEQ ID NO: 181197 - DNA, 588 bp, Klebsiella oxytoca
gtgaataatgtcgactggacgatctacgcgcagtacgtgaactcaacaagcctgcgctcactgattgatacctttaacgcttcagtagcgccagaggactggatagacacgttctatgacctcgtatttaacatcgagacatgtggcgattacggtctgatgtgctggggtaaaatcgttgatgtagggcgtttgctgaccgtgacgccatcccagcagtttctgggctttggcgaagcgaccagcactccggcagaactcaccgatccgcaaccctttaaccaggcacctttctataccggtgtacaggacacaaacactgtcgtcctgaccaatgacgcataccgcaagctgatcatgtgcaaagcgatggctaacatcagcgactgcaccgtgccggtcatgaatcgcatgctgatgtacatgttcggctccagcgggcgagcttacgtgcgtgacgatggtaaccatgtcatgagctacgtattcgagtttcaactttccgaatctgagctggccatagtgcaaagctccggcgcgcttccttccccgcctggggtaaaagtaaacatcgttcaggaggtctga

SEQ ID NO: 181198 - DNA, 1233 bp, Klebsiella oxytoca
atgacgacaatctctacggcggtaccggccgtgaccttttccaccactggccttgatgttccagatgagggagacattcttgccgggcgcatagcagatattggttctgcattcgggacggcgatgagcacgaacctcaagacgccacaggggcaactggctgtcactgatactgcaatcatcgcagacaagaacgatcagcttctggctatcgtcaacaacatgaacccggacttttcctccggcagatttcaggatggtatcggcaggatttacttcctcgatcgcattgctgcagcgggtacggttgtaacggccacatgctccggagtaccgggaacggtgatcccggcacagtcctatgcaaccgacgataacggttatatgtatgtgtcactggcagcaggaacgataggcgccgacgggacggtaaagatcgagttccagaacctgactaccgggccgatagcttgccccatcggtacgctgacaaacatctatgtcgcggtgagtggctggtcgagtatcaccaacgagaccgcaggtgtgccgggttcgaatgttgaagggcgatctgcatttgagtatcgccgtcgccagtcagtggcacgtaacgccttcaacacggcagctgctgtgcgggctgctgtcctggaagtcgacggggtgcttgatgtttatgtcatcgacaacaaagagccgacttccgtcgaaaaaggttccacgaattacacactgctggccagctcgatttatatcggggtttatggcggggcagtagctgagattgcagcggccatcaataaaaaactccccccgggcaccgttatgaacggtgacaccaccgggaccgtgcaggataccgaaaattatgatgccccttatccggagtacacctacaggtggaaaacgctggatgcggtgagcgttcatatcaaggtggaatacgaagagaatgatggccttccgtcagatatcaacgcgcagatcagagcggtcgtcctgaattccttcaccggcgcagatggtggcacccgggcgcgtgccggcgcgcgaatttatggcagccggtatatcggccctatccaggcgctcgatgcacagaacatgaacgttctttcggtccagatatccctggatggaacaacctggtctagtgcgctgaccatgggcattgatcaggagccgactctggatgcgacaaacatcataacggaggcggtaagtgaataa

SEQ ID NO: 181199 - DNA, 357 bp, Klebsiella oxytoca
atgaaaacaatctctctcaaactcgatcccgatacctgggatcttgtccttgatgagctgggtaatatcgccacggttgaaaacccctacgcctgcgctcaggacgtagcgacggcatgcctggctatacgcggcgagtgcatttacgaaaaagacaccggcgttaattacaaagagctgctgaacgttaaggccagcaccggcgccatggcggccgcgcttcaggttgaagcgttgcggatgagctatatcgcgcgcgctgagccgacgctgattaacaaccgtgatacgcgccgcactaccggcgttattgcgatcgtggatacaaacggcctggattccagcgtcaccctgtga

SEQ ID NO: 181200 - DNA, 1062 bp, Klebsiella oxytoca
atgtggttattcagtaaaaacgacgaagccccaatggctgcaaccatcgaggcttctaatttgtcagtatctaccaaggaactaacgaatatgagtatagcaactgctgtttccactatcaacgtgcctttctacggttctaatctgtatgttgtcagtgttgataatgaggcatacaccccgatgcgtcctatcatcgatggcatggggttaacataccaggggcaggccgataagctgaaatcacgttttgccaaaggggtcagggaaatcatgatccctacaaaaggtggtgagcaaacaatgctttgccttgctcttcgcaaattgaacggctggctgcaaaccatcagccctaacaaagtccgccctgaaattcgcgatagcgtgattcgttatcaggaagagtgcgacgatgttctttacgagtactggacgaaaggcgaggttaagaacccacgtaaggctaaaaagtcacaccccggtaaaatcacttcagagcaacaggaagcaattaagcaactggtaatgactcgcggaaaggcgctgccgaaagagaatcaggccaaagcgatgatcaccatgtggtcttcactgaaatctcactttggttgcagttacaaagaaatcagcgacgaccagtttaccgaggccctttctatcgctgcgcgcgtacctcttgagggggaatttcttggcaagcaggaaacactgccagcgccgaagtttgacgtaaacattccgcttcaatggtggatcgataacaacccgttggttcgcagtggcaacctgtcatttgggaagtctctaacagccccgtcctttgacgtgacgatggagatgctttgtggtgacaactcgacatctgcagctattcgcctgattaacgttctggaagaggccggctttgatgtgtcggcgccgaaggctgaaattgtagcgatgcgaaaacatctgggtaatgtcgagtacggcatgaaggctatcgcagacgcttgccgccgggcgggaaataaaaccatctcgttccgtggcggaaaggctgaatacgtaattggttag

SEQ ID NO: 181201 - DNA, 174 bp, Klebsiella oxytoca
atgtctgaaaagatttccactatcaagccgcgccaggttcgttttgtagaaaagatcgacaatcacatccgagattcagctaagcgctgccatcgttctattcaagctgagatcgcatatcgtatggaattgcttatgaagcttgaggagaagggtgatgtggttattcagtaa

SEQ ID NO: 181202 - DNA, 642 bp, Klebsiella oxytoca
gtgaacttcgattccctgttcaacgagcgagtctcaacgctaagaaaatctttgggcctgacccagacagagcttgcaaaacaaattggagttgttcagcgccaaattgcggcatacgaaggtggtgagtccaaaccaagagatgctgttctgctgcgcttggcttcagcgcttgggactactccgggctggctggcgtctggtgatgggcaggagcccaacctcaaaaatttcattccctacacatccgttcgtcaggtaccacttctgactatgggaccatttgctgacaagcttgaagaagctttaaaatccgccacaacattccacccttgcggcattaaggttagcgacgaagctttcgccctcaaaattgttggtgaatcaatgagtggctcgggaggatttagctttcctgctggctgtgtcgttatcttcgacccgaaggttgaaccccggcaaggtagctttgttctgtatggctatgaagacgaaatgacatttaagcagtatttcagcgatctctttcaaatcaccctcaaggcattgaatgcaaattatggtgaccttgttttagccaagggggatggattccttatggctactgcggtttatgcagagataaatttactgcaaatttaa

SEQ ID NO: 181203 - DNA, 654 bp, Klebsiella oxytoca
atgataaaaaaatcagtttttatagtttttgttactttgtctggctgtgccatgtccccatctgaatatgttgattatcagaaagccaacaaatttgatgaaacaaagttccccaccaattctagcggcatgcagtctgtaaaagatttgcgagaaatttataaaaaggaaaccggggacaatcttccagagcaagatacaagtgactgtctaaaagacaataaatgctatttcaatagatacagcgatcttcttcacgatctaatgtaccaacgacaaattgagaagcagaaaaaagaaaacgaagcatttgcagcgcagaaagaagctgagtgtcaggctagtaaggagtgtatggccaagcgtgagattgatgccgcgtcttacactttaaataatgtctactattctctaatggcccgatacccataccagcaggctgattctgacgccggggtaaggcatatgtgccgggtggcgggagcagcccaaagggaaggcgtgacccttgagtttatgaaacagcacattagcttaacagaaggaattggccctgaaatgagataccaaataatccaggttgctgaggcctgctggaaaatgagcaagtatggcgttccggacggtaccacgcagatcaagtcgatgtactag

SEQ ID NO: 181204 - DNA, 588 bp, Klebsiella oxytoca
atggcaactaaccaaaaagcttctgatatctcctgccagggtaacgcgatcttgtcccttatagccacggcatcaaagggcaatgtttttgctgatattgttctggttaaagatgttggtgatggcgttatgactgtgctacctcttgtgagcggcgcgaacgtatccgggggggagattaaatgtcaggaggtatatgacattcccttcattcggtatcaggccgggaacagcgcggtaaaaatgactccccgcattggcgatattggtctggtaatcgcctgtgacaaagatacaaccaatgtcagagcatcaaggcaaagtgggccaccgccaactcagcggcgccactcgtactcggatgctgtttacatcactgctatcgccagtttgaacgatgaacccacggagttcgcagagttcaccggcagcggaataaacatcaagagcccgggaatcgttaacataaacggcctgaaaatccttgcgaacggtaagcttcagttggtggacggttcaatcgttgatggacatgaccatggcggagtagaatctggaggaagccgcacaaatcccctggagccgtga

SEQ ID NO: 181205 - DNA, 870 bp, Klebsiella oxytoca
atgagttacaaggagagagaacttaccgtatcgttcacgctggccaacggtacgtttgacggcggaattggtaacacgctgattgttaaaggcttcaagtgtgaagctgctatatcagcatttggcggcgctaccggtacggtactcgaacttagtctatgggggctttccctggaaagcatgtcaaagctgacgacaaacgcacaaaagatagtcgcttatgcgcagaactcaatcgttgtttatgccggcgacacccgtgttttttccgggtcaataacatctgccaggattaacctgaatcagatgccggatgcgccgattgagataaccgcggcagcggctggaagggagcgcctgatcccatgtgagcctacgtccattcgtggcgatgctgatgttgctgatatgattcgagctcttgcctttaaggttggtttaaagttcattaacgtggacgttaaggctactcatcggaatccgtatttcgatgacaacgcaataatccaaatattaaaaattgcggcagcgcatgacatatctgttgatatagattttggcactgtcacaatttatacaggtaaaacaccgtcggattcagttgttccgtatatttctccagccactgggcttattggatacccaatattttatgagatgggtattaactttcgctgcatttactccccgtctctgaaactgaatactaaaatcatccttgagactgaccttccacacgcgagcggagagtgggtggtgcaggcggggactacccactatctgtcctgtaaagtacctggcggactttgggagacgtttgttgtggcatctccggcatctgtcatcggaggggaaaacaatggcaactaa

SEQ ID NO: 181206 - DNA, 306 bp, Klebsiella oxytoca
atgcaggaaattagcttatcaccgtcaatatcccaaaaggtgtatgtcacgcttggcggccagaactgcgctatcaagttgcatcagcgctctaccgggttttacgccgatctgtatgtcgatgacaagccgatatttcagggcgttctctgcctgaactgcgtttaccttgttcggtataaatatctggggttcagtggcgatctggttttcgttgactcgaaaggtaccgccgatccgtattacgacgaaattggcaccagattcaagttgtattacgcgacgagcagtgaggtcggcagatga

SEQ ID NO: 181207 - DNA, 840 bp, Klebsiella oxytoca
atgtcgttttctctgaatgtctcgacagtgctatccgccattcagggaggaagcctgttatccgtccttaacagcgccctgtcgccaacttaccggatcacctataacaccgttgacgagtcgcttttgacggctgcagccgggcaggaggttttctctccttctggctgggttagcgttgatcgctacggtgatgcggcagtgactaaggggccggtagaaaatggccggtacacgtcctacaacaaagtgaaacagccgtctgaactcaggatcatttttgcccttgaggggtggacggctttttccggggcactgcctaacctgaccaacttctctctgctgagccggaacaatttcattcagaaactggatgagatgaaaaacacggccagcacctacaacatcgagacaccggatacggtgtattacagctacgatctgacccacttcgattattttgtggggtcatatcgcgggcaaacgttgttgatggcgaactgcactttcgaggagatcatggacggcggggaggtcatgctttcaaatgctgttattgaagggccaccgaccagcaacgcgaaaaccaacaatggcgccgcagcctcaacgcaggtgatcaccggggcaacgaaagaggtgacattgagcgatgttaagaatgcctggtcaagtgcagacacaaccttatcagacgctctacagactacaggggcggcgattgtatctaacgttaactcggcggccgagtcggtatctaaggcgtgggacagctcttctactgcagtttctaagcagataaaaagcaccgtctccgactttctgggaaaggtgatgtga

SEQ ID NO: 181208 - DNA, 1899 bp, Klebsiella oxytoca
atggcagcaacggtaattgacgccctcctggttacgctgggccttgatgcttctcagttccgcaaaggacagcaggaagtcagtgatgacctgaaaaagcagcgcgaagacgccaaaaaaaccgccaaggaaatggcggagcaggggaaaaaggcagcagcattcttcggcagcataaagacggaattgctggcactgactggcgttaccgtcactgccggcggactgatgagctttgtgaaaagcactacctcagggctaatggagctgtccattcaggctaaatctttggggatgacagccaaagagcttgacggtgtgggtaaggcggcagaggcggccggtagttctgtcgagaaaataagtgcagcattgcaggggtttcagaacgcaaagcaactggctaaggtcggggtgtacgatacgccagtgcaggaagctgcaatccgacttaattcactgacccatgattctttcaatatcagggacgactcagcacaaaccacgttcaggaaaatactggattcggcaaggaaggttaccgatccagatatccgccgtcagattcttcagttggtaggtattgatgatgctatcaaccagcgcaaccaggaaggacaattcctgcctgacgttgatcgcctgaccaaaagctccggcattacagacgcctcaaccaaaggcgcaaaggaatttacagctgcatgggctgaattaaaccagagcctcgaaaccacaaaaaaccagttttataccttcctgatcccgtatgtgcgcgagttcaatggcgtacttcgtgacttatctgactggatgaaatctcaccctaaagagatgaaagccggtattgatgcgtttttcggcgccatcaaagacgtggcggctgcagccaatgatgcagccgacgcagtgggagggtggaagaatgttattgtcgcgttgcttgctttaaaggttgcatcatggtttagagggattgcgtttgcgctaagtggtccgggtggtctcatttttgccataactgcgctctatccaataattgacgggctcctgtcgaagatagtgagcaaggaaaataaggagtggatgcaaaatcacggtattttctggacctctaatggagagtttttccttaacaagaaagacgcagaggaaaggcagcggcaaattgactccggcgctgttcctaatggctcacagaggactgttcctaatgcctaccagcaggcaatgatggatacccaaatggatttgtctacggcaatgaaattggatgtaggccaataccagcctaacatcccattaaatgccaaagctgcaaaattaggcattaaaggaaaatcattcttgcaggcaatggcaggcgagttcggtgcgctggagggtaaatatggcctacctgccgggctgctgtcttcggtagctgctactgaatcaggtggcgatccgtttgcggagtcgaaggccggagccaaaggcttgttccagttcatgcctggcacggcaaaggacatggggctcaaaggtcgtgatgtttacgatccccacaagtctgcagaggcagcagcgaaatatctaagatggttaatggatgccaccggcggcgatctggaaaaaacgcttgcctcctataactgggggctcggaaacgtccagaagaaaggcatggataacctgccgtcggaaactcgcaattacgtccctaaagtcatggccggaatgcgccccggcgccgggatggccgtagaccgcgcgatgccgggtcaggctggcggtgtttataacttttatggcaccaaaatcaccactcaggcccagaacgtggaacagcttaccagcgacatcaaaaagcacggcgacaaccgcgtcatgcttttggctggctactcaggacaataa

SEQ ID NO: 181209 - DNA, 477 bp, Klebsiella oxytoca
atggctcgtaaaagcatcatattcacggttgaagcagataaccgtgacaagggtaagcagttcaaaatcaccgaaatgccggcgagaaaggccgaagagtgggcgatccgccttgcgtgcgctgtgattggcgccggggttaccgttcccgacaatatgatggcggccatcggtgccgcggtggctccggccccggccgaggataatgcagaagcacgcgagctgtacgaaagcgtgatggccagcggtatggccggtctcgctcaatggggtatcacttcactggctaaagtcccgttcgcacagtctaagcctctgcttgatgagttgcttggctgtgtgaaattcatcggcggcagcggtatcgaaacggcgcttgttgatgaagggcagatcgaagaaatcagcacctggtcgcgcctgaaaatcgaagccttcaaactccatatcgcttttgtagcagccaccgcaagttag

SEQ ID NO: 181210 - DNA, 444 bp, Klebsiella oxytoca
atgtccggtcaaaatattacgtcggcagacgcgatcattgagctggtaatcgctgagctctacccatccgggtttaacctggagcagttcgaagcgcaaaacatcttcgaaatgggtgataccgacacggcagagtaccagcgtactgctgacgggaaactgctgggcggttttgtttatggtgatcttccgtggactttccatctggcggcatcatccccgtcgattaagtacatcgacaactggcaaaccacgcagatgaccacgcggtctgtgctgcgtgtcaatgggactgtgatcctgccgtcgctgggtaaaaagtacatcatgaccaacggtatcctgcagcgcgcacgccgcatgccgtctgccggccgtgttcttcagccggtaactggacttatccagtgggaaactgtcaccccggcagactactcagcgtaa

SEQ ID NO: 181211 - DNA, 1482 bp, Klebsiella oxytoca
atggcaatttcgctatcaaaaatcgcccagatgcttcccggcgtactgaaggcgacagggacggctattgatctcaatggcctgttcctgaccgacagcgcatacgcgccggttggtgcagtaccctcattttccagtgtggatgaggtaaaggcgtacttcggcagcgcgtcgattgagtacaccgccgcggtgctgtatttcgccgcattcaccggtaaaacacagatgcctggcaagctgtattttagccgattcaataccgcagcagtggcggcattccttcgttccggatcgcacgccgcgaccacgctggcacagctcaagttgctttcgggtacgctgactctgaccgttgacggcacggaggagacttctgcggctatcaacctcagcggcgccaccagttttgataacgcggcagagctgattgaaaccggcattggctcctcggttgtagtgacctgggatagcgtgctgaagaaatttatcatcacctctgccaccacgggcgtggatagcaccattacctttgccgatgaaggtacgctggccacaggtcttaaactgaccgaagcgaccggcgcggtaatctctcagggtgcggcgccggcagtggttgacgatatctttactgccattctggccaaagagcaggactgggtaacattctccacgacattctctgtcaccaaagaccaggctaatgcgtttgcgctctggacaaacagccagaaccaccgctttgcctatgtcccatgggacgcatcaggaacggcaatcgtggcgggcagctcgaatgcactggtgtacgacatcatcaacacctacgcctataacgacacctgcccggtgtatggttacccgaaccacgcagcaaacgctatggggtttgtggctgcgctgaacttcacgcaggccaatgggcgatgttctctgaatggtcgtcgggtgtccggactgctgccgatgatcagtaacgataccgattatgaggcggccaagtccaacggctataacttctacggcaactatgcctcaaatgccgtcgaaaccaaccagtggacgccaggctctattaccggtgattatgcgtggcttgacgcctgggcgggtcaggtatgggtaaacgctcagcttcaggcggctctcgttgcgctgttccagcaggcgagtaatctgccctatgcagcagccggaaaagctcgcattgagtcgtgcatgaagccgaccattgaacaattcagggcgtggggtggcatgacggcaggcaccgatcttgaccagtcgcagatcgaccagattaacgccatcgctggcgtcgatgttacggattcgcttatggctgaagggtattacgtctacatcggcccgttcaccccggcaatgcgcgccgcgcgtaccaagccaacggtttacttctggtacaccgacggcgggatcatccagggtatcaccgttaacagcgtggaggtgcagtaa

SEQ ID NO: 181212 - DNA, 552 bp, Klebsiella oxytoca
atgtcaacaattgacgtaggcctgcaggtcactgaaagcgatctgtttaaggcgactggcgatttcctttctgtcctctttccggacgcagagatcacgcagactcagcaaaatcagacccccatgccgaaaggcggcttcattactatgacgccgctttttctgacggacctctcaaccagtgctgtcaattacgagtatgacggcgttagcgattacgggcgggcagaacttcgccgcgttgatgaatggcaatgtcagctcgatttctacggagatcaggcgcaaaacaatgccaccatcttttcgcgcatcgcccgctccgaattcgcatgcacctggttcagggaaaacgcaaatgtcctggtgccgctatattccggcccaccgcgacaaacctcgatgatcaacggcgagaaacagtgggaatcccgctggacgcttgaattccacgcaaacccgctgattgtcgtcagcgttcctcagcagtttatgacaggcgcagatgtgatatcgcagccggtcgacgtgagatttcctccggagaaataa

SEQ ID NO: 181213 - DNA, 369 bp, Klebsiella oxytoca
gtgaatcttcattccatagtgcgaagcgccattagcgcggttaatcctcgcgtcgaggcgcagatttaccgctcgatcggcccaatcaaaaacccggattattcgacctctccgggctttgcgccgccggtaacgatgatggtgcaaatgcaggcgctgagtcaggctgatatcaggcatatggataatatgaacatccagggtgtgctggtcagtatctggacggatggcaattggtgtgggattaacagggaacggcagcagggcggcgataagttcattatcggcaatgaaacatggctggttgtggatgtgcctgaaatctggccggactggacgagggttatcgcatgtcaacaattgacgtag

SEQ ID NO: 181214 - DNA, 564 bp, Klebsiella oxytoca
atggatggaatgtcaggcggcgataagctgatggagcacctgcagtctatcgcaaaggggctgtcctctggcgatgatttgaaggtgggtttccttgagggggctaagtacccagacgggacgccggtagcacttgtggcagccactaacgaatttggcggcactgtaaaaatcccggcgcatacccgggatttgaacttttacgttcgccgtgacggtgtttcgcgcttcgcaaagccatcaaaggccaatttcgcgcagtcagtaatgatacccgagcatatcgttacgatcccatccaggccgtacttcaggaagaccatttctgaacatggtccggagtggggcagagagctcgggaaactcatgaaggcaaacgattttgacgccagcaaaagcctggcgctgatgggggagcggatcaaggggcagattcagtcgtcaatcatcgccttttctgagccgccgaacgcaaaaatcacggtcgataaaaaagggtttaatgacccgttaatcgactcggcccacatgctgaactcggtcgactacgaggtgaaagagtga

SEQ ID NO: 181215 - DNA, 444 bp, Klebsiella oxytoca
atggcgatcgttgtctttgatgttgccgcatttcgtgagcgttatccggagttcgatgccgtaagtgaaacgctgcttaatgcgtacttcacggaggcaacgatttacctgaataacacggacagcagcccggtaaaagatatctctatccgggctcttttcctgaacatgctggttgcgcacattgcggcgctgaattcaggcgtaaacggcgaaaaggcttctggtctggttggccgtgtggcaagcgcatcggaggggtcagtgtcagtatcagctgacgcagggccctcaagcgaaagctcctggtggtataagcagactacttacgggtcagcttactgggaagccacaaagccttacaggaccggtttttatgtccctggctcatccccttcaatgtacccgggccattataatcgtcgttcattcatccggaggtag

SEQ ID NO: 181216 - DNA, 327 bp, Klebsiella oxytoca
atggccgaaacagtaactgtaggatgcaaactgccgaacggcctgatcctggagcagggcgcgtacaaagtggagcttaacggctccaattcctctcgcgttgtcggcggctacggcctgaccgaaaacgtggacaaggaagcctttgaggcgtggctggcagtacatgctgatcagccatacgttcgcaaagagctggtattttcccaggcgaaaaccagcagcgctcaggcgaaagcgaatgaaaacgcttcggagaaaactggtctggaaggtctggatcagaacaacccggccccgggcattgagaaggcggacaaaaaataa

SEQ ID NO: 181217 - DNA, 1038 bp, Klebsiella oxytoca
atgaacgaatttcagcgacactacgccgcagccagcgggaaatatggcattgtgctgcccggcgcgaaggactacctgaagccggagtttgcggagaatttcgcgctggcgatggatgcccagccgcaaatggttactgcgaataacgccggtatcccggcctacttcacgaactacgtcgatccggaacttatccgcgttctcgtaacgccgatgaaggccgcagagattatcggtgaagtgaaaaaaggcgactggacgacgctgacctcgcagttcccgatcgtcgagtcgactggtgaaaccagcgcttacggcgacttcaacaacaacggcatgacgtctgccaacgtcaactgggtaccgcgccagtcgttccattatcagactcacacccgctggggtgagcgcgagctggacatgtacggcgccgggcgtatcggctatgccgccgagctcaacgtggcctctgcgcttgtgctgaacaagttccagaacaagtcctacttctatggcatcgccggactggaaaactatggtctgctcaacgatccgtctctgagcgctccggtgacgccggcggcgactggttccggcggtagcgttacctgggcaactaaagacgggcaagccgtatatgacgacatctccggtcgtctctataagcagctggtctctcagaccaaaggcctcgtagagcgtaccgatcgcatggtgctcggtatgtcgccggaaatggaagtcaacctgaccaagacgaaccagtacaacgtgaacgtcaccgatcagctgaagaaaaacttcccgaacatgcgtatcgaaaccgctgttgaatacagcaccgacgcaggcgagcttgtgcagctgattgttgatcgtctgggtgagcaggacaccgcttacgcagcgttcaccgagaagatgcgcgcccacgctgtcgtggtggaagagtcttcctggcggcagaaaaaatccggtggcacctggggtgcaatcattcgtcaaccgctgggcattgccagcatgatcggggtgtaa

SEQ ID NO: 181218 - DNA, 483 bp, Klebsiella oxytoca
atggcaggttttcagacacgaattaaccagtatccggcccccggcgtcgaaggggcctttgctggcaccaaccctcacgcgacctatcaggctggcgagggcgctctggttgctggcgaggatggcctgactgtcggccgcttcgcctgggacgttgatggtgtggcttccaatgccggtagcggtgttccgtctggctttgtccatcgtgatggtcaggcctcgatcaccgtttggctgggccaggcatccatgcttatccagcccggccgcgaaatcaccctgatggttgccggtgacttctgggccaaaacgtcaaccgctgccacccgcgggcagaaagtttttgcatccctgaccaccggtgaagtgcaaatcgcagcggccggcgcaaccgtggccggttttatcgagaccgcattctatgccgcaagcgattgtgacgctggcgagctggtcaaaatcagcacctggagcaagtaa

SEQ ID NO: 181219 - DNA, 1566 bp, Klebsiella oxytoca
atgacgaagtggataaccataaatggctctcatgtaaaggttgatgaaaatgacaatgtgataactggtggaggcgggaacatccccaataaaaacagcgcagatccaacgaagcatgaaccacctgaatatgtaaaaaaaatgaagcttggggaaaagcagagctcagcttacagacagtggcaggcggagttatccaagccacctgacgagcgatataaggcaaagcaaaatgctcaggtaaggcagttattcaaggatgccgaacataatgccgaagccaggtccaccatgaaaaagttgcttagtggaaaccccgctggcgtcagagagttaagcaaaatgtaccctaacattgagccggataaattggctggagatgagtcgccgaatatccgctttattacagagtcccttgctttcgatcgcgcctcagtgcgaaccatcgacgcaaatggccgccttcagatttcacgaacgaatatcagcaaggcaaacgtcaacggatactacgggcgcgagataccaagaagcgaagaacttgggctagaacccaacaagctttaccggctttggcgccacccggacgagctccggaaagcagccaaaaccttcaataacatccccgtgctcagcaagcacatccccgattttcccaccgacccgcccaatgaatttcgtgttggcgtgacgcactccaatgcggagtttgacggcacgtatctcacggttggtatgtcgatctgggataacagcgcgattgctggaattgagagcggagagcagcgagagctatctgcatcgtacaagtacgtcgcagacatgaccacgggtgtcacccctgacggcgagccttatgacggcgttatgcgtgacattttcggaaaccacgaagcgctggtccctgacggccgcgcagggccagatgtactggtcgcagattcattaccaccggagcttaaccacatgcgtaaacataaggcagaggcgatccgcgccacccttaagccacttctggcgcaggatgctgatctggaggcagaagtccgcaaagctcttctggctcttgatgaggccgaaaagaaagacgaagaagaaaagaaaaccgccgacgacgaagacgacgacgagaaggataagaaaaaaacggcggacgatgaggacgacgaagaagacaaggacaagaagaaaaccgccgaagatgaagacgatgaagaagacgacaaagtctccaaaacagcgatggactctgcgattcgtctggcagccgacagcgcaactaaaaaggctgcggaaaacttccggaaaatccgtgaagcagagcaggttgtccgcccgctgatcggcgacgtcgttgccatggactcagccgaagatgtctatcgcaccgcgcttgagcaaagcggtgtggatatcgccggcgttcacccgtccgcttatccggcgatggtcaaaatggcgatcagccagaaagaaaattcacgccctgtcattgcgcaggattccgcttccgtcagtgagttcgaaaaagcattcccgaccgctggcaaactgaaacgaggttaa

SEQ ID NO: 181220 - DNA, 792 bp, Klebsiella oxytoca
atgaccggaaagaaaaagccaaaaactatccggcctatcaggcctaacgctggcgttgaagcatggtaccgccgacagcttgataagcaggtgcaggaaatgcaggcatctgttgtctactggctgtcggcaaactatcgggccagcggcgcggctgtcgccatggatgcttcgcctgcagtgatgatgcggaatgccatgcagaagctggctaagcgctggaagcggcggtttgatgacatggcgcaaaagctggccgacaggttcgctaacgacgccatgaaaaacgcggatgtttcactggccacagccttcaaagatgcggggtttactgtcgagttcaaaatgacctcgcaaatgaataacgctcttcaggcgacaatcgccgagaatgtcggccttatccgatccatccccgagaagtatttcacccaggttgaggggctggttatgcggtcggtagcgcgtgggcgcgacctgtcctatctcaccgatgaactccagaagcgatacgggattacccggcgccgtgcggcgttcattgcccgagatcagaacaacaaggccacctcagtcgttcagtctgcgcgacagcaggcgctcggcattacccagggaatatggaagcactcccatgcaggcaaaaagcctcgccagttccatgtgaaagctaatggcaagatgttcgacctctcggaagggatgctcattgatggcgagcacatcatgccaggcgagttaccaaattgtcgttgcacctgggaggctgtaattccaggactgaaaacatag

SEQ ID NO: 181221 - DNA, 1947 bp, Klebsiella oxytoca
gtgtggtggtttaaaaagaaagaagtcgccgcgcctgagccggcaaaagaacctgaagcaccgaaggtcgggatcaggccagaggccgtggccgaagtccgcgcatcaccgaaaagagagtttcagcgctacgagccgccgaaaggggtcatccccgaggctatcaaaagcgccattctggcaatggactccacgccttacgatgctctcaatgctgcatatggcggttacggctacggcgactttgatagcttccccggatacccgtacctggccacgctggcgcaaaagcctgaatatcgcaagatggttggcaccatcgcggaagaaatgacccgcaaatggataaagctcaaaactgtcggcgatgaagacaaggcggatcgggtaaaacagctcgaagaggccatgaagcggtttaaggtgcgcgagcgctttaaagaagccgcagagcatgacggctactttggcggcggccagatttacatcgacgttcgttcgccgcggggcatctccgcatggatggacgacaacgagctgcaatcgaagctcttcatgagcgataagaagatcacgaaaggcagcctgcaggggttcagggtcattgagcctatctggacctatccgggaatttataactccgacaacccgctgagcccggatttctacaagccgactcagtggtttgtcatgggccggaccgtacatgcaagccggatgattgatttcgtctcgcggcaggtacctgatctgctgaaagcatcgtataacttccgcggactgtctctctcgcagattgccgagccttacgtgaataactggcttcgcacccgcgacagcgtcagcgacatgattcactcgttctcagttccggtaatcggaacaaatatgagcacgattctgcagggcggtggggcagatagtcttctggcaaggcttgatgtcttcaaccgatgccgcgataaccgtggcgcattcgctaaagacaacaaccctacccagccagaaacggttgagttcgttaacgccccgcttaacggtctggatgccctgcaggcacagtcgcaggagcaaatgtctgcggtttcgagcatcccgctcgtcaagctgctgggaattactccaaatggccttaacgcaacgtctgacggcgaaatccgcgttttctacgactacattcacgccctgcagcagtctgtttttaaagacaacctgaagcgcgtgatggacatcattcagctctctgagttcggcgacattgacgatggcataaccttcgactttgagccgctgtacgaaatgagcgctaaagagcgggcggaaattcgcaaagtagacgctgacacggacgctgtctatgtggccgccagcgtgctctctggcaacgaagtccgtgaaaaaattgccggtgacccggactcgccctatcactctctggacctgaatgatgacctcgaaatcgaagacgactacgacgaagaggaagagcccaccgtgacagctaatgactcgaatcagatgaatgggtatgcaagtgttaagcccgatgcagaaacggcgtctgccatatattcgcaccttgaatctcttggcataaataatttaatcgccccgagtgacatgcatgtaacgctcatgtactcacgcaacaagccaatcacggtagatgctgaccctgttagggtttatgaggcacaaattagtggcgatatcgaaattatgggcaaggagccttggcgagccttggttatgcatcttgaaagccctgacctgcaaaagcgttttgcggagctgaaggcctctggtgcagaacattcatacccagaatatcgcgctcatctttccattaaatacaaccccgaaaatggcgacttgcaaaagctgaaagatactccgctacccatcaaggttattcgtctggatggagaggagtttaagccaatatag

SEQ ID NO: 181222 - DNA, 1677 bp, Klebsiella oxytoca
atgagcggaattatcgaatgggatgacctgtcattcccggagcgcgtgatcatccgttcaaagtctacgaagtcattcctgaacttcacccggatatggttcgagctgattcagggtgatcggctgctggttaactggcatcaccgcctgatggcttcgaaaattgatgatctgcttgccgggcaacttgtcccgcgaaacctgattatcaacatcccgccaggcggtacgaaaactgagtttttctccattcacttcccggcgtatgtcaacgccctggtgcaggagaagcggcttaaacgctttcgcaacctgaatatctcttttgctgacacgctggtaaagcgtaacagccggcgcacccgcgacattatcgccagtcgcgaatatcaggagttctggccctgctcgtttggtgtcaaccaggcggaagagtgggagataaaggatgaacgaggacgctctataggccagacggtatcgcgctcaagcaacgggcagatcaccggtggtcgtggtggctactacggaccagagttttccggcatggtgatgctggacgactacaacaagccggttgacatgctcagcgagtcccggcgcaaaagcgcgaatacgttgctggtaaacaccattcgctcgcgccgcggcgataagtcgaaagaacacccgacgccatttgtaagtatccagcagcgcctgcacaccgacgacgcaacgggcttcatgcttgccggcggaatgggcgtgccgtttcaccatgtcgccataccggccatgatcgacgagaagtacatccagtcgctcgatgagccatggcgttctctttgctgggaaacggtcaaagataccgattctgtggtcgttggtggcgttcgctactggtcatactggccgcagatggaagacgttaacgacctcctgcagctgtgggaaaaggaccgctacaccttcctgtcgcaataccagcaaaacccgatggcgctgactggcgggatcatcgacaccagctggttcagaacgtataccactctgccgaagcttacgcaccgcgccgtgtacgtcgatacgaacagtggaaaggtagaggactggctggattacaccgtgtttacgctggttggtatgggcgtggacgggaatctttacatcatcgacgtcgttcgcggtcggtgggaccctgaagacctcctgaagaaagcggaagaggtttgggaaaaatggcgcctgtctggctccatgcgggtgatgccgctccgccacatggccattgaagagaagcaagccggacagggcctcatcaccactctgaaaaaacgtagccagacccccggacaactcgccatcccggtgagggaaatcccgcgcggtaccgggcagaacaagcttgttcgctgccttaacgtcatcccccaaatcaaaaccgggaaagtgtttgtccccgcgacgcacaccgacgacggacagaagctttccagcatcttctacgaggacggcacgatcgcaggctcaacggagtgggtgctgacggcgatgacggaatgcgctgctttctccgctgatgacagtcacgacaacgacgacatcctcgatacctggatggacgcaatcgacgacaacctgatttccggcccgcagccgatggttatcgacccgaatcaactcaggagaatttaa

SEQ ID NO: 181223 - DNA, 486 bp, Klebsiella oxytoca
atggctgcactaaaaccagaagtgagagcctttatcgttcaagagctcgcttgctttgatacgccatcccaaatcgtcgagtctgtacaaaaagaattcaaggttcaggttacgcgccagcaggtggcgtcgcatgacccgacaaaggtggctgggaaaggtctggctcaaaaatgggtcgacctcttcaaccgcacccgcgaccgcttcctcaacgaaatttccgacatccccatcgccaacaaagcctatcgcctgcgcgtactgcagcgaatgtctacgactgccgaaggtatgaaaaatctcggtatgacagctcagttactggagcaggcggcaaaagaggttggcgacgcctacagcaacaagcaaaaggtcgagcttacaggtaaagacggtggcccgcttaatcaggtgacgtacaccgctgaagactatgcgaaggcccagcagaagctggagggaaggttagaagggctggactga

SEQ ID NO: 181224 - DNA, 636 bp, Klebsiella oxytoca
atgactgaaaatgacaatcgcagaccataccctcccgtcaacttcactggcgaaaactggctgccgtatacccggctgatccctgctgccgaaatcggcgaatgggtaaatcagaacatcctcaccgaagaaggccgaatccataaccctgaccatacgcatttgatcgacgctgatgtcgcgttcatgtgggcttctggctccttcgccaaaagtggccgcattgtgcttggtcagtgtgagcaggtaatgatgcgcgctggcggctggcagaagtcccgcatggaacagcaaatgcatgaatggttcgggcgcatcccgaagtacatcatcacgttggctgccgactactgcgagcaatgcagtgaccttgagttctgcgcactggttgaacatgagctttaccatatcgcccaggctaccgacgactccggcgcgccgaagttcaacaaagagaccggtatgccggtgctcacacttcgcggacacgacgtcgaagagttcgttggcgtggtccggcgttacggcgccagcaaagacgtgcaggaaatggttgatgcggctaacaggccggcggaggttgctcatatcgatgttgccagagcttgcgggacgtgcatgctgaaactggcgtga

SEQ ID NO: 181225 - DNA, 144 bp, Klebsiella oxytoca
atgcgcaccactggaatcctaatggcggaaattacgcttcgcccatacatgaagccgctgctcatcctttcggtgcttttgcgctggggctggctcactaagaagtgtatccggattggccctgtaattggtaagcaggcgtaa

SEQ ID NO: 181226 - DNA, 177 bp, Klebsiella oxytoca
atgaactatctcattaaccggctgaaagagccgtcaacctggcgcggcatcattcttgttgtcgcgggtgtatttggttatcagatgccgccgggtattcaggaaacagtcatcgctggcggcgtagcgctggctggcgttgttggtgcggtaatgccggacagcgttaagaagtga

SEQ ID NO: 181227 - DNA, 408 bp, Klebsiella oxytoca
atgaaggcgttaccacgggaaaccgccaaagccatttacctgtcgcaatactggactgaaccgaagtttgaccgcatcgccgagctgtcgccagccattgcacaggagttgtgtgataccggcgtgaacatggggccgcgtgtcgccagtacattcctgcagcgctggttatcagctctgaatatgcagggcaagctatatccggacctgaagccggatggtgcaattggcaatatcaccatcgctgccctgaaaagttatctcgctgttcgtggcaaagatggcgaaaccacgctgctgaaggggctgaattgtagccagggcgcccgctatcttgagcttgctgaagctcgggcggcaaatgaagattttctctatggttgggtaaaggaaagagtggaactatga

SEQ ID NO: 181228 - DNA, 516 bp, Klebsiella oxytoca
atgaaaaagaaactattattattattgtgtatcggttggacgttttcggccttcgcccatgacggcactgtgaatatttctggtatgattcaaaatcagacctgtactgttgcgcaggagtccatcgatcaaacggtatcgcttggggatattgactcacgacagctaagcaatattggtgcggtgtcatccgctgttgcttttgtcattgatttacaaaactgtagtagcgtgactaaaggggtttcattcactttttcaggttcagtagatggtgataattctgatctattggcgttgtctgatgaggctggttctgcttccggattaggtattgccatcaaagatgatgattcaaccctgataccgttgaacaaagccagtaaagattatgcgatcgaccccagtcaggcggataatcgtttggttttttatgcacaatatatggcaaccagcacaaatgtgacagcaggtacggcaaatggaacggcgaccttttcattaacttatcagtaa

SEQ ID NO: 181229 - DNA, 714 bp, Klebsiella oxytoca
atgtttaaatttatctctgggacctgctgctcaatttatgtcattttattttgcgttttccctgcccacgctggtattgtcgtgggcggaacccgctttatctttaatggtgatcaagacagtatttcgtttcaggtgaaaaatacttctgctaatgtatatttggtgcagactaaaattttctccggtaatgacgacgaaggtaataacaacgctcacgataaagttcatgaagtcccttttattgcaacgccgatgctatttcgcttaaaaccattacgcgataactatgttcgtattctgaaagtccccgggcaacttcctcaagatagagaaactttgttctggttaacgatagcaggcatcccagccagccaggatgctaaagaaaataatattgtacaaatagctgtacgtaataaaatgaagctattttatcgaccgaaaaatttaccgggaaatcctaaggatgcctataaatctttggcgtggtcacgtcagggaaaaacgataacggtgaaaaacccgacgccttatttcgttacgctactgaccttaacggtaaatgggcagaatattgctcgtccggggatggtagcgccttactcatctctgagtcagtcctggtgtcctgaggccgggagctgcgatattcagtggcaggcgataaatgattacggggcggcgacacccattttgcattcccgcttctga

SEQ ID NO: 181230 - DNA, 276 bp, Klebsiella oxytoca; identical to SEQ ID NO: 36785

SEQ ID NO: 181231 - DNA, 531 bp, Klebsiella oxytoca
gtgcggcataatttcccggaggcgatgctgcgcatctgtccgggctacggtatggcagacggcggtggacctgtagcccgggcaggcgctttgcgccgcccccgggagcagagcgcagtgcggcataattacccggaggcgatgctgcgcatctgtccgggctacggtatggcagacggcggtggacctgtagcccgggcaggcgctttgcgccgcccccgggagcagagcgcagtgcggcataatttcccggaggcgatgctgcgcatctgtccgggcgacggtatggcagacggcggtggacctgtagcccgggcaggcgctttgcgccgcccccgggagcagagcgcagttaggcataattccccggaggcgatgctgcgcatctgtccgggcgacggtatggcagacggcagtgagcccgtagccccgctaagcgcagcgcgagcggggggacatcacaatactttaaacccgtgcgtgccatcccgcttcagctgttcaaccaggccgaactcccagtcgaggtag

SEQ ID NO: 181232 - DNA, 558 bp, Klebsiella oxytoca; identical to SEQ ID NO: 138911

SEQ ID NO: 181233 - DNA, 636 bp, Klebsiella oxytoca; identical to SEQ ID NO: 26189

SEQ ID NO: 181234 - DNA, 996 bp, Klebsiella oxytoca; identical to SEQ ID NO: 26186

SEQ ID NO: 181235 - DNA, 699 bp, Klebsiella oxytoca
atgtctgatgaaacaagtaagaaactggctgttttaattgatgctgataacgcacaagcatctttgtgtaatgaattattctcagaagtatccaaatatggattggctaatgtaaaacgagcatatggggactggacaacaacaaatctaaaaggatggaaagaacatcttcacaaacatgcaattcaacctatacaacaatttagctatactactggcaaaaactctactgattcatcattgatcattgatgcgatggacttacttcatgatgggaatttagatggattttgcttaatttcatctgatagtgacttcacacggttagccaatagactacgggaaagcggcatcattgtatatggctttggcgaggagaaaactcctgatgctttcatttctgcatgcaatttatttataaaaacagaaaacttgagaaaaacaaaagctgccaaagatttctctgatgataaggaccttaaagaattaataagtaatgctctgtccgcaacatctaaagatgatggctggtcattattgtctgcggttgggtcttatataaataagaacgaatcttcctttgattccagaacatatggctatgagaaattaggtggtttagttaaatcattaacttatttaaagacggaaacaagagaggtcggtggcgtcagtcatctatatgtgacaagtgtttaa

SEQ ID NO: 181236 - DNA, 732 bp, Klebsiella oxytoca
atgaaccgcaaacaattcatccagagccggggggccacctgtcgtaactggacctggagctggtcttttatcaaccatgacgaccagctggtcatcttcggggcgtgggacgttgagcgtgatcaggagcgcgctgttatcctgcgtgaagcgtgggaatacaacgccaggctcaggaagaaccccggctacacccaggcggttgagcatatcggctacatcctcgggggatacgacctgtacacctttaacatggtgcaggccaccagtccggatgcgccggacgtcgcggtcattcaggatttcgaacgccggctggaaaaacgctttctgagaaaagagggcgccgtctggtacgctgactttactgccagtccttatcccgaagagctgtccgtcgccggtagctatattgagggcgccacaaaatccatcaccatcaacgcgtatgaacgcgacccggccgcacggcgggcctgtatcgcgtatcatggtgccgtctgtcagtgctgcggattcgattttgagaaaacctggggtgagcacgggaaaggatttatccacgttcatcatatccggccgctgagaacactcggacctgactatcagattgacccggtcaacgagctggtcccgttgtgcccgaactgccatgccatgattcatcggggcaatgaggcaaagccgttgtccgttgaggaattacgcgccatgatgaggccctccggctga

SEQ ID NO: 181237 - DNA, 279 bp, Klebsiella oxytoca
atgcgcgttgctgaacatatcatcctcgatgccctcactcgcggaggatgcatcaaaaccttctggcgtatatcgtcacgacaggccgctgaatcgtcagcacggatacccgaggggtatattctggagtcacccggggagcgggaagatatcgtgctcagtcatgcagactttcatgcgctggagaagcagctggagcagaaggaaacgtgggagcaggtggtcggcgtgacctgttttggtggggtaacctggcagctgagagccgggtccgtgtga

SEQ ID NO: 181238 - DNA, 612 bp, Klebsiella oxytoca
gtggcgctgacacacaaaacagggcatctggcatggtgcgcacttgtcgcgctggcactggccagaaaggagcagggagagctgtctcctgcacaggaaaacctttttctcacccgctggctggcgacagcgctgaaacagcggcgatttccgcgcgatgttacacccgatatcgaatggttactgaatcaggggcgtttgctgggtgtgagagcaaaactggccgacaaactggactatgtctggcgctcctgcagcggcgagctgactgaacagaacgacatgttccggctgacgtatgcgctggaaacagcgaaagacatgggctggaattaccgcgtaatgagcgacagagaatgggccgggcgatatgccttggtactcaatcctggagtaaacggcgtttatctcttacggacaaacctcgatgccgcttttgacgacaatggccagcagacaaatccgctgacagcacgtctgacagggagcgtagcaggggtaatgaagctgttaaatcgctgtggctggcaggcagagcctgagtctggtgcctccctgccccaccagtattcactgatggccggacagggagtgccaggaaagggggattag

SEQ ID NO: 181239 - DNA, 954 bp, Klebsiella oxytoca
atgaagaagaaaaacagcacacccactcctcacgatgctacgttcaggcagtttctgacgcaaccggatattgcccgggatttcatggagctgcacctcccggcagagctgcaggccatctgcgacctcagcacactgaaactggaatccggctcgtttattgaggatgatctccgccagtatttcagcgacgttctctacagcctgaaaactaccgccggggatggctacgttcacgtgctcattgagcatcagtcctcacccgacaaacatatggcttttcgcctgatacgctatgcggtggccgccatgcagcgacacctggaagctggccataagaagctgccactggtgataccggtccttttctataccggtaaacgcagcccgtatccgtactccacccgctggctggatgagtttgacgacccgattctggccggaacactctacagcagcgctttcccgctggtagacgtcacggtcattccggatgatgaaatcgccgggcatcgcagtatggctgccctgaccttgctgcagaaacatattcatcagcgcgatctcgctgaactggttgaccgcctggcgcccattttgctggccggatatctgtcttcatcacaggtagtatcgctggtacactatatcgtgcaggcaggtgaaacatcggacgccgaagcctttgtacgcgaactggcacagcgtgtgccgcaacacggagacgccctcatgacgatcgcacaacagctcgagcaaaaaggtattgagaagggtatccagcaggggatcgagcagggcatccagctgggtgaacaacgtggtattgaaaaaggcgagcgcgaagctactcttaaaattgcccgtaccatgctgcagaacggcattgaccgcaatactgtcatgaaagtgaccggtctgacggaagaagacctggcgcagatccgccactaa

SEQ ID NO: 181240 - DNA, 267 bp, Klebsiella oxytoca; identical to SEQ ID NO: 138609

SEQ ID NO: 181241 - DNA, 621 bp, Klebsiella oxytoca; identical to SEQ ID NO: 138610

SEQ ID NO: 181242 - DNA, 642 bp, Klebsiella oxytoca; identical to SEQ ID NO: 138611

SEQ ID NO: 181243 - DNA, 324 bp, Klebsiella oxytoca; identical to SEQ ID NO: 138612

SEQ ID NO: 181244 - DNA, 1272 bp, Klebsiella oxytoca; identical to SEQ ID NO: 138613

SEQ ID NO: 181245 - DNA, 426 bp, Klebsiella oxytoca; identical to SEQ ID NO: 138614

SEQ ID NO: 181246 - DNA, 702 bp, Klebsiella oxytoca
atgtccagattcattctcgggaactgtattgatgtgatgcgcggattccccgaccgtgccgtggaccttatcgtgaccgacccgccctatttagtgggctttaaggaccgtcagggcagacagattgccggggatgtcacggacgaatggctgcaaccggctacgcaggagatgtaccgcgtccttaaaaaagacgccctgatggtcagtttctacggctggaaccgggtggaccgctttatggccgcgtggaaggcggcggggttctatgccgtgggccagcttgtgttcaccaaaacctatgcttccaaccgccgtaatgcgaaagaccgtcgcggattcgtggactaccgccatgaaggggcttatgtccttgccaaaggccgcccggtgccgcccctcagaccgctgccggacgtgatgccttttccgtataccggcaacccactgcacccaaaccagaaaccggtagaggcgctacagccgctgattgagtcattcagcgccccgggcgcgattatcctggacccgtttgcggggagtgcctcgacctgcgtcgccgcataccgcgccggacgccgctacatcggcattgaaatgctggcgcagtaccaccgggccggagccgagcgactggccgccatgcaccgggccgtcaacaccccggcggcgaacgatgaatggctcccggaggtggcgtaa

SEQ ID NO: 181247 - DNA, 429 bp, Klebsiella oxytoca
atgcagtctgtgaaagcacgccccgtcctgaatgttgaagagtgtgaccgcctgtcttttatgccctggatgttcggcgctgattttatgctcgcagaatcgcaggtgtatgcgctggcgaaacaatggatgcctgaatacagcagtgagttctggcactttatccggctgccagagggcggcggttacatgatgccggattgtggccgggttcatctggtcaacagtgaaaacgggttcgaccgcattgtgagcgccgacgcggcgggcattattctgacatcgctggccgttaaccgtcgtctggcggcaaatcatgacagcggcaacccggccctgactcacctttacatgctgcgtgatgcccagctctggaatcacatcacccttcacccggaatgcaacgccatttacgccgcgctggactga

SEQ ID NO: 181248 - DNA, 192 bp, Klebsiella oxytoca
atgaaacttgcaccacaaagccgcgatatcctgcgccagtacaaagccctgattaacgcacgccgccgggatgccgggcagcgggaactgaccaccgcgcaggtgatggacgaaatctgctattacatgacctgtcagtgtgccgtctacattggcggacacttcatcttacagggcggcaagggccagtaa

SEQ ID NO: 181249 - DNA, 228 bp, Klebsiella oxytoca; identical to SEQ ID NO: 136890

SEQ ID NO: 181250 - DNA, 231 bp, Klebsiella oxytoca; identical to SEQ ID NO: 136889

SEQ ID NO: 181251 - DNA, 876 bp, Klebsiella oxytoca; identical to SEQ ID NO: 136888

SEQ ID NO: 181252 - DNA, 339 bp, Klebsiella oxytoca; identical to SEQ ID NO: 136887

SEQ ID NO: 181253 - DNA, 348 bp, Klebsiella oxytoca; identical to SEQ ID NO: 136886

SEQ ID NO: 181254 - DNA, 231 bp, Klebsiella oxytoca; identical to SEQ ID NO: 136885

SEQ ID NO: 181255 - DNA, 834 bp, Klebsiella oxytoca; identical to SEQ ID NO: 136884

SEQ ID NO: 181256 - DNA, 369 bp, Klebsiella oxytoca
atgaatgctgtattaagtgttcaggacactgctgtctctgaagaaaccaagccgtcttttctgtcccgcgttttcaacaaaaagaaagccctgaaagttgctaaagttgcgctgccggttgctgctcttgcggcattcttcccggatgctgcgatggccaccaccacggcaaccgacctgatgaagtccggggatgcgaccgttaaaggcacgtttggtaagtcttccagcgtcgtcaaatgggtggttctggcagaagttgtcgccggcggcatcatgtacatgatgaccaaaaacgtgaagttcctgttcggcttcgcgattatttccacctttatcaccatcggtatgtcagtcgccggttactga

SEQ ID NO: 181257 - DNA, 597 bp, Klebsiella oxytoca
atggctaagtctctcattactgctgttctgtcagcactgcgctgggctcactggctggttaagtgtgcggtggtgtatccgctggccatgatgatgttactggttgttctggtgttccggacgggaccgtacacgttcggccagacgctggtgaaaaccgtagagtctgtgcagcaggagggatatgtcattcaggactgcacggggccgaaagaacttaatggtgatgcggtgaacacaccactgcctccggttttacaggaagactgcaccaccgtcagtacggatgcggcagggtatgcagcatatatcgaccagagctatacgcataatattctctggctctggctgctgatggcggtggtgtttaccgggatcgctgtggttttccgtcggactcctgtccgcagggggatcatacggaaaaacggtgttgtcgtcggagagtctggttcgggttcttcaaggctgattctagcccgatctgatgtcagccagattaagcgtgtttacgatgaaatgagtccgggtgaaggggataaatttgttcgggcgattaaggaaaatacccaaatcaggatgaacctgaagaaataa

SEQ ID NO: 181258 - DNA, 285 bp, Klebsiella oxytoca; identical to SEQ ID NO: 139471

SEQ ID NO: 181259 - DNA, 312 bp, Klebsiella oxytoca
atggctgaataccagttaagttttgatgggtttgtacgacttttttttgcaatggcaatcattatctgtggttacggctatgtaattattggtgtttttataagagatacgcttgcctgtattttaatgttgtttgggcttgcaggtctcagtgctttattttctttcatggtattcatggataaaaacatgtgggccggttctcctgatttgacgctgtcagtaataacgggattttttacagccacagtcatcttttatatgttttatgtcttgatttattcctttgaacggatgggggcaggtgaatag

SEQ ID NO: 181260 - DNA, 291 bp, Klebsiella oxytoca; identical to SEQ ID NO: 139383

SEQ ID NO: 181261 - DNA, 753 bp, Klebsiella oxytoca
atgcgaacaatacatgccgccatgctggcggggtgcctttgctgcgccctgatgccggctttcgccaaagacgcgggctggcagtggtacaacgagaaactgaagccccgtgatgaggacaggaaagccgtaccagcggcaccaccgccgcaaatggatattctggagaaactcgccacactccaggcggccaccaaacggtcgttgtacgaagccattctgtatccatcgtctgaaaacttcgtgaagtatttccggctgcagaactactggacgcagcaggcaggtttgttctcgatgagtgcgaagaaagcgatgctggaaaaccccgaactcgattacaacctgcagtacagccactacaacggcacggtaaaaaaccagctcgctgccgactatgccgaacagcgccgggctatctcgaccctcgcacagcattttggcctgatgttcttctaccggggccgggaagcgatcgatggccagctggtccaggtgattaaaaattttcgcgaaacctatggcctgagcgtgataccggtgtcggttgacggagtgattaaccccatgctgcccgacagccggacggaccagggccaggcagagcagcttggcgtgaagttcttccccgcgatgatgctggttaacccgaaaagtggccaggtgaagcctctcagttacggctttatcagtcaggacgacctggcgaaacagttcctctatgtctccagcgactttaaaccaaacttttga

SEQ ID NO: 181262 - DNA, 348 bp, Klebsiella oxytoca; identical to SEQ ID NO: 139677

SEQ ID NO: 181263 - DNA, 2850 bp, Klebsiella oxytoca; identical to SEQ ID NO: 138478

SEQ ID NO: 181264 - DNA, 531 bp, Klebsiella oxytoca; identical to SEQ ID NO: 138479

SEQ ID NO: 181265 - DNA, 669 bp, Klebsiella oxytoca; identical to SEQ ID NO: 138480

SEQ ID NO: 181266 - DNA, 261 bp, Klebsiella oxytoca
atgaaaaacctcattatcacaataacaggtattgatgcaggtgacgattctttgccctgccatctttatccgacagagacctgcgatacggtgagtttcaatacttctccggggcttaatacagagactgtcagagcggtactttattctctgtttgaagatgcctgtaatgttgattattcccaggaagatggttcggggtcgtttattgcaattgattctcccccgaatccaggatgctatgagtattcactgaaataa

SEQ ID NO: 181267 - DNA, 516 bp, Klebsiella oxytoca
atgagttttaatgccaaagacatgacgcagggcggtcagattgccaatatgcgtttccgcatgtttggtcagattgccaatattatattttatgtgctgtttattttattctgggtgctgtgcgggctgatgctgatgtaccgactcagctggcagacctttgtgaacggctgcgtgtactggtggtgtacgacgctcggtcccatgcgcgatattattcgctcccagcccgtctacaccattcagtattacggccagtcgctggaatatacctcagaacaaatcctggccgataaatacaccatctggtgcggtgagcagttgtggaccagttttattttcgccgccgtggtttctctcgtcatctgtatcgtgacgttctttgttgccagctgggtactgggccggcaggggaaacagcagagcgaggatgagaataccggcggacgccagctgtccgacaagcccaaagaagtggcccgccagatgaagcgtgaggcactgttgcaaagttag

SEQ ID NO: 181268 - DNA, 276 bp, Klebsiella oxytoca; identical to SEQ ID NO: 101078

SEQ ID NO: 181269 - DNA, 1221 bp, Klebsiella oxytoca
ttgacggcacagcgtgcacagaacgaaagcgagcagaccaccgcgcttgatgcgctgagcaaaaagaacgccgagctggccgccgctgtcgaagcggcgcagaaaaaactggatgagaccacccgcgcgctatcggtgcagattgccgcgctgaaaacgcagaaggagcagagtgagaacctgcagaaatcgacgatcgatacgctgacgggaaagaatctggaactgcgcgctgctgccgaatctgcacagaaaaagcaggatgagaccacccgcgcgctgtcggcgcagatcgccatgctgaacaagcagcgcgcggagagagaaggtcagcagaaaaccgcgcttgatgcgctgaccaaaaagaacgccgagctggccgccgccgccgaagcggcgcagaaaaagcaggatgagaccacccgtgcgctgtcggcgcagatcgccatgctgaacaagcagcacgcggagagggaagagcagcagaaaaccgcgcttgatgcgctgagcaaaaagaacgccgagctgaacgccgccgccgcaaccgcgcagaaagaatatgatgtttcagtcgctgctttaaacgataaaaataaaaaattacagtctacgatcgatagcctggccatcaagcaaagtgatttaagccttgcggataaaagtcataaaaatgcctatgcgctcggcgttttctaccttacccaggcgctatccgatgtgaataaaatggccgacaataatgtcaggctggcgccttcagcgttggtttccgggtttaacgacgcttataataaaaaacttaaaattaaagaaaatgaaatagaaagtatcgttaacatgcttaacgaacaactatcgtctaagtacgtcgatattgaaaaaagaatcatgtctaaaatcaaaaacaagaaatatgagattttgcctaatggcgtctattttgtggttgataaaaaaggaaaggagtcgtacaagtcgaatgagactttgtctatgaatatccttgagaagaagcttgatggtacgccgatactcaatacgatgaattcaaagatggtttacgataagcaaatcgatccgctaatggccaaagtattatcatccggattaaaaggcggaacggtcacgctatatggacaggccggctcgctgtatagcaccacgccagcggacctgaacccggataccttaatctccattaccttcgaactcattccctga

SEQ ID NO: 181270 - DNA, 630 bp, Klebsiella oxytoca
atgagtgagcatctatctcgtaccgccgttattgtggatgaccatcccctggcgcgtatggccatacgtggcgtgctggcaaagcagcacattaccattatcaaagagtatgaagacggggctaccgccttaaaggcattgaccaaaatggcggtggatattgtcgttgtggatgttgacattcccgatataaatggcgttgagctggtggagaaactcagagcgcagcgctttagcggcacgttgatcgtggtgtcggcaaagaacgatcgctattacagtaaacgctgcgcgcaagccggcgcgaatgcgtttattagtaaaaaacaggatatggacaatattctcgccgcggttaacgcggcgcaaaacggctatagctattttccctttttcctcgaagaaccgtcggcggcgctaacggatagccagcgtctggagtccctttccgcgcaggagatgaaggtcatgagctatatgctcagcggcctggacaactcgcagatcggcgaggcgatgtttattagcagtaaaacggtgagcacatacaagacgcgattaatggaaaagttaggctgtaaatcactgatcgaactactctcttttgcccatcagaataagctgacctga

SEQ ID NO: 181271 - DNA, 3180 bp, Klebsiella oxytoca
atggtactacggtttgcgatcctccttgtcctctgggccgtcagcgcgcgcgccgtatatgcccagaatgagccgcccgttgagctggaactatcggggtatagttatattacgccggtaccggtttatttgagtgaggatgacaagcgctggctgctgcagaagagagcgctacgcgttggggtttatcaaccgggacagcctccgctggtgcaaaccaccctcagcggacgctaccggggaatgaatgcggactatctgacgttgattcattcctcgctgaatattcgtattatcgtgctgggctacgtaaatcgcgccgatgcgattcgcgcgctacgggcaggcgagatagatacggtgttaaccggtcttgaaacgcttcccttcgctgaagaggggatccagctctccgggtcactggtgcattcatggccggaactggtgacctctttgggcaacgtgatgggccctttgcaaagcccgcaaagtacacgcgttgcggttgttgatggctatcctgatgccgattttattcatcagtcgttccctaacgccgaaatagccagttacgccagctatcaggaggcgctgaactccgttgctaacggacaaaatagatggtttatgggtgattcgctgaccaccagcacctggctttcccaggagttcagtctggcgttgagtacggttaaatattggccttcgccgcagaaaacgagccactttttattctcagagaagcaaaagcgtttgctgaacatcgtcaacagaactatcagcgcaatagatgaaaatcagcacgggcaaattgctcagtcgatgatcgataaaggcaatctctcgtttctgctcgaaccgctcaatctcacacctcgtgaaaaacagtggctaaaaaagaacaaaacgctgcgagtcattattaatccgtggtttgcgccttacaccatggccgacaataatcaggaagtacgcgggatagtcggggatatactgaatctgattagtctgcaaaccggtatgcagtacgaaacggttgtcgtcaactcgcatgaagatatgctttcggagatgaaaaagggcaactggcatattgtccaggcggcgacctatgacctgagtcgccaaagcaatctctccttcactcatccttttattaccacccagtttgttaccgttgtcagaaaagaggacgctcaggcgatagcgctaaaggcgggtgcgaacgtggccatcagcgccgatcatacgttactgatgcaaatgaaagcccgccatccggatatccattggcaagaagtggaaaactccagcgtggcattgaatcttgtggcaacgggaaaggtggacgcggcgatttctaatcagctaaccgcacgttatctcagcgagcattattatcccgatcggctgacgtggctgccgctacccgaggcgcagccggcggcaatcagctttagcgttccccgttcggaaccggaattacggcagattcttgataaagcgcttgatgatattccacagaaagaaattttacagatagtcagcaaatggatacgtctgccggacgtcagaatagacacctgggagctgtataaccggccattctatctggtcgcggctctcgcttcactgctggtgctaagtaccttactttgggtggtctatctggcgcgggaagtgcggagaagaaaagagtcgcagcgtttgctggaaatggaaaagaataaagcgcagaaagcgaatcaagagaaacgggaattcctctcccatatgagccatgagatccgcaccccggtcagcgccattgtgggatttctggagctcctgcagcttccaacgacaagcctcagcccagaggataaaacgtcggttgaacacgctgcgatggcttcacgctcgctgttgaaactgattggcgagatcctcgatctggaaaagatagagtctggtttgcaggatatagtgccgaagtgggtgcatgctgatgcgctgataagagaaaaaatattactttttaccgcgcttgcggcgcagaaagggatagcgctgcgctacgactcgcagctggatccaaaagaagcgatgcagcttgatccgcaaatgttgggacaggttctgacgaaccttatcgggaatgcggtgaaatttactcatcatggccgcgttcaggtatcggccagcaagcgcgatcgcacgctgacgatctccgtaaacgacacggggcccggcatcagcggtgaagaacaacagtcgctatttatgccctttagccaggggaaagcgggggagcttcatcgcggctcaggactgggactggctatcgcaagggcattgatgaagcagatgggcggctcgatagttctgcaaagtgaacgcaatcgggggaccagcgtgacgctgagccttccggtgcaaacatcatatgatgccatccctgaagtcgttgaaaccgggcccatgactaccgttatcggcacagcgctgcgggtattaattgccgacgatcacccctccagccgtctgctgctaaaacgtcagctggcctcgcttggcgttgccgcggatgaagcggaaaacggtgaagaggcattacgctatcttcagcaggaccgttacgatttattgattactgacctaaacatgcccctgatggacggtattgcgttgacccgggaggtgagaagatttgatagcaatcttcccatttggggggtgaccgcgaccgcgcagcagcatgagcgcgagcgctgtgttgcggccggaatgaccgattgtcttttcaagccgattaccctcgcgcagatctctcggctgctggccggagtgaaccagattcaggcggcggtattcgatgagaagcggctggcggtgctggcgcatggtaatcgggcgcttatgcttgcggcgctgcatgatgcacagcgggaaaatcgtctcgatttagcagcagcccgagcggccgcacgcgatgagaactatccggcagtggggcaacatattcatcgcctcaacggcactgcccagctgctggggggcaatgaattaatcaatatcgtccagcctctcgaagcgcggctgccaggcgctatttcagcggcggaactgttcgatattttagaccgcatcgaaagcgcgctcaatgagctggatcgggccatcgataacttccagccatag

SEQ ID NO: 181272 - DNA, 519 bp, Klebsiella oxytoca
atgaatttgtcagattccgttttttctgatgattacttctttatcgtcggcatcagtgcgttgttaacgccggggttgattgatgaaaattactctattatagatattgagacgacaagcctgtcagaggtaagaaaacatatctttcccggcaggaaagttattgtttttatcaccaacgatcttgattactatgcattaaagcatatggcagattttgtttttattgacaagaagtgtcggttgaatgagattctatcaggtttactggtcaagaactctcaatataattatagagtgaaatactcgctatctcgtcgagagaaagaagtactttcttgtatgcaaaaaggacttgatgtcaaagagattagccggcagttagggatgacgatgaagaccttttatacacatcggcgcagcctgatttttaaactacagcaaggtaatcgtatttcgctgtatcaaaatatcgtgcgcagcgaactctacaagcagagtgtttatgaatatggctaa

SEQ ID NO: 181273 - DNA, 519 bp, Klebsiella oxytoca
atgaaaaagatcgcactgatttctgctgttatgtctctggccgtatttcagacggcaaatgccgctgatggggtaattaactttaccggcaatatcaccggtaccgcgtgcgtggttgataccacggctatctctcaacctgttgatctcggcaccatctcgaccgcggctttcgccggagggaatggcgcgacggcggcggcgaagcgttttaacattgtgctgaaatcctgcccggacagtatttccagcgccagcgtccgctttgatggtacaacgaacgcggctaacccctccattctggccctgaacaatggacaaaccgcagccaacgtcggcgtcgcgctctatgagcaggacagcgcaacgctgattccggttggttccgcctcgaccagcgtgaatctgcaggaagatgtcaacaacaccctgacttactttgctaaatatatggcaacgggcgccgttggagcaggcacggcaaacgcttcgacatcgtttaccgtgacttaccagtaa

SEQ ID NO: 181274 - DNA, 678 bp, Klebsiella oxytoca
atgtttcagaaagtattaaaaaaaatcgccgtgagtttatttctcatttctacagcagccatcagtggcgtggaaataggcggtacccggcttatttataatggtagcagtagtcaggcggccatcagcgtgagtaacccggataatacgccgtatttaattcagtcatgggtcagtaacagtgaaaatagtgacgatggtgacagcgcttttattaccacaccgcctttatttaaactcaacccgcatgcgcagaactccgttcgcgtgatgttaaccggtagtgcgccgcctcaggatcgggaaagcgtgtattggctgaatattaagtcaataccctcgtcgtcggcggatgcgaaaaacgagttgctgattgcggtaaaaagcaagatgaaggttttttatcgcccgacgggattaaaaggcgacgcttcgctggcgtatcagcaactcactttttcagccgccggtgggaagctgaccgtgcataatccgtcgccttatagtgtgtcgctttacgatgtcaacgttaatggcaaaaaattagcaaaacctccaatggttttaccatttcaaacgctatcgctctctcagtctgcggtaacgagtagcaaagtatcgtggcgtgcgatcaatgatttcgggggcatcacggctgaacataaattcaacatttag

SEQ ID NO: 181275 - DNA, 2502 bp, Klebsiella oxytoca
atgctccaggtcaatacgctgtcaggttgtgcgaaattaactcagttatctttgcttttttatttgtgtttacgcattccggccgggctggctgacgattattttgtaccagattttattgagactcgtggacatattcctcgggacatagatatctcccgatttagcaaagccgacggccaggttcccggtgtttatcatgtcgatatttatctcaacgggaactacgtcgactcacgagacattacatttatcggtaatgaaaatgatttatcgccagttttgacgagagccgatcttacccaatggggcgtaaagctgaatgcgcagcccggttggatggcattggaagacacggcgacagttgaaaatatcagcacgctcctgcccggcagtcagcttaattttcagtttaatggcatgcggcttgaactctcgatcccgcaggagtatatccggcgggatcctcagggctcggtatcgccggagcagtgggatgacgggttgaatatgctgtttgtgaattacaacttttctgcggcgaataaccgtggcaacggtgagtcgcgcaacgacagctatttaaacctgcgtagcggtattaatgtcggtccctggcggctgcgtaattattcaacgtataacaacagcaacgggatgacccgctggaacaccattggtacttcgcttgagcgggatatcaaggcgttgagaagccagtttagcgtgggcgatggttatacccagtccggggtcttcgacagcgtgaattttcgcggcgcgcagctctattcagatgactcaatgctgccggaaagcgtgcgcggatttgcccccgtagtacgtggtatcgcgcaaagcaacgctcaggtcactatacgtcagggcgggaatattatctggcagtcgtatgttccacctgggcctttcgtgattgacgatctttaccccaccgccgccagcggcgatctcgacatcgcggtacgtgaagcggacggttccgtgcatcagtttatccagccgttttccgcggtgccggtgatgcagcgcgaagggcagttcaaatatgcgctagctgtggggaagtatcgtgcggcaagcctcggggacaaggagccgacgttcctgcaaagcaccctgagctatggcttgccgagggatacgacgatatacggcggaacgttggcttctcaagattactgggccggcgcattagggatggggaaggggtttggcgattttggctcgctctcttttgactccacgtttgctcgttcacagttgcctgagaaaacgcaagaaggggtgtcgctgcgagcgcagtatgccaaagatttcgcgacgacaggtacgtctttgagtttgaccggctatcgctactcctcatcgggctttcgtgattttcaggaagcaaacggcgatgtgaatccgtttcgcatctcaagtgatgcggcccggcttgatgacagctggcgctatcagcgtaataaacgcagtaaggcccagataacgctgaatcaggggcttagtgaatggggtaacatgaacctttccgcctggcagcagtattactgggggggcgatagcgagcgtagcgttaacgtgggatacaacaccagcgtaaacaatattaattacggcctgaactacagctattcgaagggaccatggcgcaatgacaacgatcgtatcctcgcgtttacgatgcagatcccgctttcgcgtttcctgccggacagctggatgaccgtttccgctaacagcaacaagagaggcgatagcgtttcgcagatggggttatccggttcagcactggaagataaaaatctgagctggaacgtgcagcagggctataacagcaaagattctgatgcgatgggaagcgcttctgccacctataaaggtcgtcacggggaatatcagctgggctacagctattcccgcgataaccggcaggtttctgctggcgcgatgggcgggctggtggtacatccctacggcctcgccgcgactcagcctctcggtgaaacgttggcgctggtaaaagccgataacgcgggcggagtgaaagtggcaaataatagtggtatttacaccgacagcaaaggttttgccgtggtgccgtacgttacgccgtatcggcagaacagcctgtcgctggataccgcgacgttaaatcacaataccgatgtgctcgatgacacgcgtacggtagtgcccacgaaaggcgctttggcgctggcggattatcccaccgtcacgggttacaaagtcatgctgcaactgagcggaaaagcgatcccgttcgggtcaactgcccaaatcaaaaaccgcgataacgtcaccgagggcattgttgacgatcgccagcgggtctggctaaacggcgcgccggataacggtaccgtggaggttagctgggcgggtgaaagctgtcgcgcgacctatcagatagcccgactctctgacaccgtgcaccacgtcaccgcacaatgctattga

SEQ ID NO: 181276 - DNA, 1014 bp, Klebsiella oxytoca
atgaaacctgttttagccaccctgatttttgctgcgctggggctgttttcccgtacggcctgtgcctgggattgcaccacgacgacgccttcaacgaccgtctcgccgcagaatattacgctatcgcgcgatcttcccgttggcgcggttatcggcacgcagctcgtgacgccgacgatcaatgcgttcagctgttacaactccgctgatggtgtgatctccaatcagaccttaggcgtgatggcgaacggcacatttgattcgatggtgaacggccggcgcgtgtataaaaccaacgttgccggtattggctatgccatttcgggttcaacgacgaaatgcgccggcggcagcgcggcggtgaccgggagcaatactattcagggcgacgtaaataccgctaagctctgcgggaacagcagcggaatgatcagcccgacgttgaacggcaccgtgacggtgacgttttataaaaccgcaacggaaaccggatcaggaacgataacggcgcagacggtcgctgcgctggtgttgctgaataactcagtgctgtggcaataccccgaggctgaagtcagtatcaacgcattcacggtgaccactccggcctgtaagctgatgacgacatcagtgcccgtggatatgagagaggtggataaaagcgcattcaggggcaaaggctccacgcccggggatgcctacacccagtcgttcaacctgccgttgacctgcaacgccggcacgcaggttagcgttaagatggaggggagtatttttgatgccagcagaggggtcatcaatacgaccggcggcaataacgcagccacgggcgtggggattcagctgctttataacaatctaccaatgaccttgggttccgatgtcgccgttggagcttcctctgcaggcggtgggttcaatgtgccactcaaggcgcgctattaccagaccggggataagataactaccggtaccgctaacggggtgctgtcctttaccatgacgtatcaatag

SEQ ID NO: 181277 - DNA, 1044 bp, Klebsiella oxytoca
atgacatatctttttatttatgatgagatacattttgttacttttgctccggactcaagaaaccctacggagtattttaaaaatttacctgactgtacggaaatatcatcaattaccaaaaatggtgagagaaaatttttagtcacacgtgatgaagtgaaatctaatttaagtgggggtctggatgagaaatcaattcaagtaattgaattttatcagtttatacagcgatataaaggctttattggagactcaattcattttcacccaaatatgctagcaagtcttttctctacgcttacagataaaataactggagaaggtcttcctatttctgatttgatgaaattatttcttaggcaggatcctgcaattgtagcatttgataagtttcaaaaggaatttcctgaggtaaaaactgaaacattgtgggctacagttcccacagcaatgaaccttgcaaaagaaaaagaattaatactagtaagtgatagctcagagatatctgtcccactattatctaacaaggtaagaagtgtcaagttcttaacaagtattttggctgaagaatgcgtgaagattgctatacctgattgtagctcagctagccctgaagaaatttttgagattagagagaagttgaaagatacgttagttccatttagaatatccttgcaaaagctatcaggtgatttacgaaagtccttagaagaagatatggcaatagaggacattaaaggggaagctaagtttattgtcgaaagtcaaatacaaccggcagtgtttgagttacaacgaagtatagaaaaaagtaactcaaaattactaaataatgtttttggtaggattttaagttggctcccttacgttgcgaaggcttatactatgcctacccctgacaacttattagcagttgcaaaaaaaatgggtgctgattcgaactcagtttttgatgctatagatgatctttcgtatactaaagcccaaggtctatcctttttattacaagtagagcaagcgacaacgaaaaagcaagcgagctaa

SEQ ID NO: 181278 - DNA, 1980 bp, Klebsiella oxytoca
atgaaatcctatttaagaattgaacgattaatccttgttggtgtacgtaagaattacattgtcaagtttgaagatggattgaatattatacatggtgattcagacacaggaaaatctagcattttagagtttattaactatttacttggcgccagtaaaatagagttggctgatgagattatatcatctgttaattatgcggcgttagaggtcataataaatgatgctgcttataccatagttagagatatttacaaaccacaaaatttcattgaggtctatcagtgtcctttcgagaggagggaggcattcatttctagaaaatatgctcctaacttctctaataacaatgcccctgatggattcttttctgatttcttgatggattcattaaatttccccaaattaaaattaaaagtgtcacccactcaggtaactagtcaatttaagcggttgagcttcagaaatatcattaaatattcctacatcaatcaagatgatatgggaagcaagtctctcttgggaatgactgactgggctaaatatacgtatactaaagaagttttcaaatatatatataacgtactagacactgacatatccgatattgagcaacaaatatcagataaaagatctgaactgaacaacttgcgtaaaaagtatgaacatgtttcggagtttttgcgagagacaggttatgaaagtatcccatcaattgatgatgcaatagaagaatgtgatttaatctatgaatcgttaaacattgagcttcattcattaaataatagtatgatggcaaactctaacaattacaatcagcttaaaacgtaccattcagaattcaacctaaaaataaaaatgatcgtaagaagcattgaagaaataaacttaaaaaaagatcaatacattagacttaaaaacgattatattaatgacataaagaaaatcaaagcgattcatttggctaatgaaaagattggccttactcaagatattaaatgtaattgtcctgtttgtgataatataattaccattgagaacggtgaaggtggatttatcaaatccaaaccagagtctctcgatgaagaattattatcattagaaaaaagagaaaaatccattagcgatctaattattaacctgactcatgaacataggattttgctggatgacaaaattcaacttgaagctgatctgaacaaagtcagtggaatgatagatacagaagcaaaacagtttattactccatttctcactcaacgtgattatttattaaaagaaataatatctgtaagtaaaaaaagagagactttagtctcaagcttgaaagttagaaatcgtcaagaggaacttttaaccaagcaaaaaagccttacagataatatagaaactcttatagaaaaacttaacgaattaagagtcaatgctcctagcatagatggcatattatcttctttaggggatgatttgatgactttcttaaccggtgtgaaaataaagaacagaaccgggataagcataagtaaaaaacatttctcgcccattgtaagagatagagactactttaatatcacatctgggggtttaagaactataatttccatagggtatatgtcatcaatattaaagagctctattgactcgaacataaaccatcctcgttttttaatgcttgatactataggtaagtatctcggaaaaaacttgaagccgaaatatgcatccgagaccaatgtaaaagatgatattgatgaaggaatttctgatccagaaaaatatgaaaacatctataatgcactcatagaaataactaattatgcgcagaaaaaaagaagcccatgtcagataattgttgtagacaatgatgtccctgataagctttctgacagattaaaagctataactgttgctcactatagtgcaagtaaggaaaacgggttacctgtcggactaattgatgatgtcatttacaaacattaa

SEQ ID NO: 181279 - DNA, 507 bp, Klebsiella oxytoca
atgagttcattaccttatattcctcttgatgaagatttcaatttaaatgttgctcttctgattattttaatccatacgctaagcaagaatagaaatgatgttctattgttggatagaaataaaattcaaatatttttatatttgattaaaaatccatcaaaacttgaggctgtaatgattttggccggtaaaaaaaacacatccattgatatgacggaaacttatacaattaaaagtctatcattaaacgttgacattcttttcagtactcaaaaaataaaaacacttttgaaaaaattgtcgatactgggatggcttcgtgtaacaaagtctgatggtgcatcttattttagtttaacaactcagggtgaaagcgcttatgaacagtttggcggcgaatactttaactcagtgaaaacttataccaaatcactagataaaataaagtcactaacctccagtaaattaaattctattctgaatgaagtattcaaggtgtcaaaatga

SEQ ID NO: 181280 - DNA, 1209 bp, Klebsiella oxytoca
atgagtatgttaatctggaagaaaaaaaataatgctaaacacttaatcttgtttatacatggcttaaaaggtggaagtgatacgtgggcagttgataagatcacatccttcccacagcttatatgtgaggatgaagatttttgtgatgcctttgatatagcttgttttgagtatttcactaatttcacgaatacctatggtaaaagtagaaatctactcgccagattgttcacatcactaacaaaaaaagaagtcaatcttcctgttgatgaattatcagagttacttgttggtgaatgccaaataaatttatccgattatagcaatataatatttgtcgctcacagcatgggaggtttaatagcaaaatcatgcatcattaaaatgcatgaaagagatctttctcacaatataacgggatttgtttcacttgctgttcctcattcggggtcagaaactgcttcatgggctagtatggtttcatcaaatgtccagcttggggatttaagtgtatttagtaaagaaacagattctctaaaccgcagatgggtaaaattgcctaaactccctgagttaaagtttttgtatggaagctacgatagtattgtagttaaagccagtgcaattcctgttcaagtttctgccaaagagtctatagctgttcaggaggatcattcgacaatttgcaaaccaaaggatagggattctaatgtttatcttatcgttaagaaactagctcttgaaatacataacaaaacggaactaatttcatcttcaccagaatttaaagatgataagcaatatgacaaagaattttttgtattgaaaatgatagtagctgacgtacatggtgatatatcaaaacacgctaaggagtattattataatgcagaattggccagaaatattttcactagcgatcgagatagagaaaccttaagtgttttgtatagaaaaataagggagatatatcaaacacagtatcatgactctatagcaaatcataatacagcaaaccaactcttagctgcgatacacaaaaagatagaagatgaggataagattaaattatcatctcttcttgatacacttgatagtgtacataagaaaggaatgctgcatcagcttgctaataagctagatagagatataatttggtccccagacacatctcttgactctttaaatagtttaaggggtcaaaaatga

SEQ ID NO: 181281 - DNA, 840 bp, Klebsiella oxytoca
atgaatgaaaaacttgctcgtttgatttttgattttcaagaaaagatcttggtcgcgctaaaaataatgcatcgttctggtataccaatgccattgagttgtaatcattggattgaattagatataccaatttctggtgagttagatgatggcgttaaataccataagcatggtgctggttgtctggtaaggcttagttctggggatattgattttgattttggtgctcagggggaggttggagggtttaatttatggaggctaaccctttttgcaggagagaatctgagttcttatggcttcaagaataaggatgaagttgcagactgtttgaataatgcattagataaagaacaattggtttgtattgattatgacctttattatattgctaatgctccatttttctacgctgtagatatagacagcagacatcctggagataagcttcctaaccggaatcaagaccgtgtgttggttcttcttactcattattttcagtcagctgagcttatgtttaagaattacgaaaaacttagacaaaaatcgcatgtcaatggtcatttaaacgagcgtgatgaaatagatataagaatttatctttctacctggttgggttttctgggagtggtttgcgagggtgttcgtaagctaaacctgcggatcttgcttaacaatgagcgtcctgatgattttaaggaattgctaccgatttcaaataatatagggaggttaatgaaagaacacgcggattctctcaggacgtttagaaataatgttttccatctcagggaaaatactggatctttctactgcagatttttttctttcaggaactga

SEQ ID NO: 181282 - DNA, 1212 bp, Klebsiella oxytoca
atgtttccaagaactcgctttccttctttcagtggacactacactgaaaaatccttacacgacgcagtgctcgaattgaaaagcggcctttctcgaatgttcagtgactccgacattggcttgcccgttatacgctcaaataacattaaagattattgtttggattttaatgagttaaaatactggttcgaggaagatcctcaaggtgcaacaacttctaattattacttacgagatggggatattttagttaacttcattaacagccaggcacagattggaaagtctgcgatatattataatgctctgaatagggattgtatatatacaaccaatatactggcccttcacataaataaggagcactctcctgaatttatattttttttctttcaaacaaaaaaatatgataattacatccaaagtataactaaacctgcagtcaaccaggcaagttttacgactaaagattttcggaagatgaaaatctttttccctgacttggctgaacaaaccaaaatcgctaatttcctttgctccattgacgaaaaaatcgcgctactaaataagcagtacggcctactatgccagtacaaaaaaggcataatgcagaagatttttagtcaggaagtacggtttaaggatgaaagtggagaggagtttccagagtgggatttcataagtgcaggaaagcttttcgaaaatagtagcaacaaaaagcataaaggtgacttgcctattctggcagttactcaagaaaatggtgttgttaatagagatagtataaatatagacatcaaaagttctcaggaaagtatcaattcttacaaaataattgacaagggtgattttgtaattagtttacgatcatttcagggtgggattgagcattcatctttacaagggctttgtagccctgcatatacagttttgaaaaatgtaaaaccaataattgatggcttttatcgtttttatctaaaaaaagatagttttattgaagagcttagccaaacagttgttggtatacgtgatggaaaacagatcagttataaggctttttcaattctagaattgccttaccccagcttgcccgaacagaaaaagatctcagactttcttttttctcttgacgataaaatcgccgtaaaaaaagcggaaatagataaattaaaaacctggaagcagggcctgctccagcaaatgtttgtataa

SEQ ID NO: 181283 - DNA, 1878 bp, Klebsiella oxytoca
atgaccagtcgcattggtagccctgatacacaggcagatattgatgttcgtgcttgtctggatagctcgccaccacgttcatttgtcatggtagctggtgctggttcaggtaaaacaacatctctcattaaagccttggcacatttggctgatacccgtggttctgctttacgtcgtgccgggcaaaaaatatcctgtatcacgtatacagaggtagctgttggtgagattgccgctgacgttggtaactcgcagttatttcatatttcaaccattcatagctttctttggtcggtcatccgaccttttcatgtagatatcgcaaagtgggtcgtagcgcgaatacatgaaaaaatagctgaaaagcaagcccattatgataagcccagaacacaagctaaaacaaaatctcgtcttgaagatgaaattgcctatctctctgctcaacttgagtgcattgatgatgttgataaatttatctacgggacaggaagtaactatgctaagggtattctagggcacgatgatattcttaaactcgtccctgcttgtgttgaggctcatccacttttgagaaggattgtagccaagcgctttccatttgtttttgtcgatgaaagtcaggataccgatcctgatgtgatctctgcgcttcgaactattgctaatgacaatcctgacatgtgcataggattttttggtgatccgatgcagaaaatctatatgagcggagctggtgctattccgttaagtgatgggtgggctgaaattacaaaaccagagaatttcagatgtccgacgtctgtacttggtgttatcaattcgattcgagcttctggggatggcctccaacaaattcgtggccgaacaactatcgtggatggtgttgaacagactgtattaggcacagtgaatcttttcatcttgccttcaaatgtggaacgaagtgcctatctcacatctgtcagacgttaccttgcaaatgaaactagcgatgaacaatggctaagtgatacacgcgaaggtgatgttcgtctgcttgttttggtacatcgtatggcagctaatcgactgggattccctaatttattttctgcccttactgataaagcaccgatgagcttgagtgaaggggtgaacgatgggtcagcttggccgcttcgcccatttgtccagcatatccttccaatttttgcggcggctcaggcaaacgatcaatttcagattatgtcgattatgcgtaacgagtgcccaaagctggagccatcacgactgcatggtcaagctatggtggcagttttaaatgaactacaacaaggcatcaatagcctgcttgcactgctggaagaaggatcgcaagcaacagttcgggatatattgctacacgttagagactgtgaactgctacgtcttgacgatcgctttgataaccacttaagtgatgaacctgtgaatgatggtaatgatgacttcggaaatgttcagaattatctaagatgcaatgcctatgaactttgggcgtaccgacgctatctttcagaagaatcaccttttgccactcaccatggtgtaaaaggtgcacagtttgagcgcgtattggttgttatcgatgatgaagaggctcgcttcagccaatattcgtatgggaaatattttcaatacattcccctatccgacaatgatctagccaatcttgaagagggtaaagagtcagtactcgatcgtactcgtcgccttttttatgtatgttgctcccgtgcactgaaagatttggctgttgtcatctttgttcccgatgttgccgtcgctcaagcggcaatcgttgagcaaaatttatttccagcatcggtaattttaggggagcatgatctggcctag

SEQ ID NO: 181284 - DNA, 252 bp, Klebsiella oxytoca
atgaaagaacactcatcaatatttaatcagaaaaataataatcacatgtcagatacagatttcacaaaagatcgccttgtagatatggccttcatcacatcttataccgggctgacagataaatggttttataagctcatcaaagacggtgaattcccgaagccgattaaattgggccgcagctctcgctggactgaaagtgaagtaaagacatggttaaaacaacgtattgaggcctccagagggcattag

SEQ ID NO: 181285 - DNA, 867 bp, Klebsiella oxytoca
atgaatactatgattcgcaatgccttagatgaagtctatgatgacgtatacgaggcttttgaagagaagtttgaaacgttagtaacaaaatttaaagattcaggacaaaacgaagagttgagcatgatacgtacgaatgctcatgaaattattgaggagttcaaggctattgaggaggaactgcctgagagaatcgttgataaatcctatccgggtaatttccgtttgtaccaggagtttattgatgttaatggaattgttgtgccaaaaccatatgtctataaaaaaacttatgcggaggcacgagccaatatacataaagaaatgtttgaggggcgaatttctgggaccattaagttggtgaatgaaaattcccgtttaatttatctgcttatggtatttaaggatttttattggagtgagtatcttttatcgagtggtaataaaaaagatagttgtaagtatttgctttatgcactcttttatatgagctatgtcgaagatgataatgataaaactaagcttggtgattggcatcgattaaatgcaaggttcgatagggtaagagggaaaatagcatcaagttgtggtggaaagggggggcggtacgatattgaatatctaaagccatatatatcatcagcgctatctgattactcaccagaaggtggatggaagagcaaaaaacagttcattgataccattattccctacattgtaatgcttgatgaagaattcactctcagggattgggatgacgaattcaaaaaaagggaagaacaattgcgtaaaaaaattgatgaatggttattgaacgaactcaagaccgattatgataaattcatacgaaataaaaacaggtgttga

SEQ ID NO: 181286 - DNA, 1458 bp, Klebsiella oxytoca
atgagtgttggacgttcgcttaatgatagaaataacaatcctgtaaatttttttcctcccattttaaaagatgccgtggaggagatagaaagagaactacaggctccggtagaactcattgaaacagttgttctggctgctgtatcactggcatgccaggggggaataaaaatacagcatccagacgggagagtgagtccttgctcaatgtactatactgtgattgctgactctggagagagaaaaagcgccgtatttaaattagtcacacaaccattttttgatttcgaaaaggaatcacctcaaaaacatgcgttattaatgctggattacaatgcagaacttcagtcatggaaaagtcaggagaaagcactattgaaagtgattagtaaaaaaaccgagaaaggaattgatgttgaatacgatactcagagcatgaaagagctttaccgaaaaaaaccgcaaccacccgcattgcataagttgatctacagtgatacgacaccagaagcgctacagcagggactctgcagtcatgtgccttcatcgagtcttatgtcggatgaggccggtattttcttcaaaggacgtgcaaagaataacctgggatttttaaaccttttatgggatggagctccggttgatatagaacgaaaaagtggcagatgtagtatggatgaatgtatgtttacaatgttattaatgattcagtccagtgagtttaaaaaatatatcaaacttcagggggattatgcagtaggctcagggtttctgtcccgttttatgataaccggagtaacttcaaaaagaggccaccgcagctctgttaagaataacagtaaaagtaacaccatcaggtttcatgacagaataaaggaactactactgctttctgaagagaggtacaaaaataatgaaaagcataaatatttattcttatccgaagaggctcagtcagcactcgctgtggtatatgaaaatattgaatcacgtatacttaaagataatgagaagcatcctgttgtagaaggcatgttgtctaagatgcctgaaaatattgtcagactggctggggtgtttcatctttttagcgatgagcacggaactgagatatctgagagaaacattaaagcaggtgcagaaacagcgtatttttattatcaacaggctcttgatgctatctcatcatgctcagattcaacagagcataacgctgatatattgtacaaatggttattaaaatacaaggatcctgatgttaattaccctcaaatattaaacactcccaccattctaaataaaatgatagtaaggagaaaaggcccatatgccctgagaaattcaagaaaacttaacgatgcgctatcttatctggaagaagatgagaaaataagaattgaaaaaattaaaaatagtaatggcagcaccagcgaaataatacatatccatcgtcattga

SEQ ID NO: 181287 - DNA, 633 bp, Klebsiella oxytoca
atgtacgaatatatcacctctcacggaaaattgaatcaataccatttaaagaaaatagaacagactattgataaagcattaagtgaacacccaagagtattggctgtaagagtagatttacatactccgcttctccagccattaaatgacatgcctgatgaggctaattttgcaaggacagattcatcagtaatatcccgctttacggattctctgaaagcaaaaatttcacatcatcttaacaaacgggagaaagagggtaagcgagttcgtaagacatcattacgtgttgtctgggccagagagtttgtacctgattcacataagaaacattatcacgttttactgttactcaacggggacactttcaatacactgggagcgtatgatagtaacaaaggtacactacgccgccttatacgtgagtcatggatgagtgctgtcagttttatatacccccccgataaagagttagtccacatacccaggaatccttgttattacctgagtgcaaaggatggcaagcaaagtgagtcatatggctcgctgatttataggacaagttactttgcaaaaaagaaaagcaaatgctttacagatggtgaacgtaatttcggatgtagctttaaataa

SEQ ID NO: 181288 - DNA, 825 bp, Klebsiella oxytoca
atgaaactggccagtcgttttggacgggtaaatcaggtacggcgtgaccgaccgttaacccgtgaagaattgatgcattacgtccccagtgtttttagtgagaataaacacgaatcccgcagtgaccgatatacctggataccgaccatcactattcttgataatctgcagcgggaaggttttgagcctttttttgcttgccagacccgcgtacgtgaccagagcagacgggagcacaccaaacacatgttgcgcctgcgtcgtgccggacaactcaccggccagcaggttcccgaaattatcctcctcaattcacacgatggctcatccagctatcagatgctgccgggactgtttcgtggcgtctgtaccaacggcctggtctgcgggcagtcattcggcgaagttcgggtgccacataaaggggatgtggtggagaaagttattgaaggggcttatgaggtactggggatatttgaccgggttgaggagaaacgtgatgccatgcagtcggctctgttaccgccaccagcgcagcaggcgatggcgagggccgctctccactatcgttttggtgaagaccaccagcccgtcactactgctcagatactgacgccacgtcgttacgaagaccgcagtgacgacctctggacggtgtatcagcgggtgcaggagaacctgatgaagggaggactcgcggggcgcaccgcacaggggcgaagcaaccgtacccgtgctgtgaacggtatcgatggcgatgtgaaacttaatcgtgcgctgtgggtgatggcagagaatatgcttgacctgctgggacaggcataa

SEQ ID NO: 181289 - DNA, 249 bp, Klebsiella oxytoca
atgcggaggaacatacccgtgaacaccgaaacccatccgcaacttccctccggcccgtttacccgtgagcaggcctcaggcatcgcagcgcaatatgacaacgtcgccattgaagacgaccagggaacgcattttcgtctggttattcgttgcgaaggagtgatggtctggcgggcatggaactttgaatctgaagccggagtgatgctgaatcgctacattgctcgttatggcatccgcaggtcctga

SEQ ID NO: 181290 - DNA, 444 bp, Klebsiella oxytoca
atgaacaacgtattaacggataacaccattccgacagacactctttgtgccacacctgttaaagatgaacagcgccttcgtttctggccccagcattttggctgtatcccgcagtggataaccctcgaaccccatatcttttccgggatggaccggttgtgtgcggattacagcggtggcgtctgggctttttacactctcagcaacggtggcgctttcatggctccggaagagagtgacggtctctggtcactgtttaatatcttgaatggtaacggggctgaaatgagtgctgaagctgcgggtattgcggcctgtctgatggcttacagccatcacgcctgccgcacggagtgcgatgccatgacggagcattattaccgtctgcgggattacgcgctgaaccatcctgaacgcaacgccattatgcacatcatcgactga

SEQ ID NO: 181291 - DNA, 480 bp, Klebsiella oxytoca
atggaaaaacagttaccgttgtttgcatatgaactgacggcatcagcacaacagaccatccgcgcggcgctggctctgctggagcgccagttacgtgagcccggcgcatcgtttacctccagcagctcagtacgtgactggttacggcttcagctgaccatggaggaaagagaggcatttgttctgatgctgttggataaccagcaccggctgattacgcacgaaacgctgttcaaaggcaccatcagccataccgaagtccatccacgggaagtggtgaaagccaccctgaaatacaatgcggcagcggtgattgttgctcactgtcatccttcaggtcatgccgaacccagccaggctgacagacgggtgactgagcgactgaagaacgctctggaccttgtgggtgtgcgtctactggaccacctcgttatcggcgggatggatattatctcgtttgctgaacggggctggttgtag

SEQ ID NO: 181292 - DNA, 222 bp, Klebsiella oxytoca
atgaaaattatcagtaagcgtcaggcaatggcgatataccgccagcatccgcagtcccggttgttccgcttctgtaccggcaaatataaatggtccggcagcatctgccactatgccggtcgcgaggtggaagatatcagcggtgtactggccgtattcgcagagcgccgccaggaccgcaatggcccgtatgtcgtattacgcagcgtaagcctgaattaa

SEQ ID NO: 181293 - DNA, 360 bp, Klebsiella oxytoca
ttgtcgaagaacaccacgataacaacgcatgatatcagcgaaccctggtgggggctcagacgcagtgtctccccgtgtttcggtgcccgtctggtccaggagggaaaccgcctgcattacctggctgaccgggcgaatgttagcgggcagttctgtgatgcggatttacgccatcttgaccaggctttcccggtattgatgaaacagctggagttaatgctcacctgcggtgaactgaatccccgtcatcagcactgcgtcacgttgtatgcaaaaggtctgacctgcgaggctgatacgctgggttcgcacggctatgtttatatcgcgatttatcccactcccgtcgccacggcataa

SEQ ID NO: 181294 - DNA, 390 bp, Klebsiella oxytoca
atgcaaacaaaatcaccccccttcatgcgggcggcatcgtcacgtccgtctcccgtgggcgtctggcagaccctgctgacctgcctgctggaacaccactatggcctcacgcttagcgatacgccgttcagtgatgagcaggtcattcagcaacatattgatgccggtatctcgctggttgatgccctgaattttatcgttgagaagtatgaactggtccgcactgaccgcccaggcttcagcatcctgacgcagtctccgtttatcacacccatagatatcctccgggccaggaaagcaacggggctgatgaaccgtgacacgtataaagaggtgacggctattaccagagggcaacatccgcaggtcagcgctccaggcaagcgatga

SEQ ID NO: 181295 - DNA, 846 bp, Klebsiella oxytoca
atggtcgtgcaaaatgttactgaacccgaagtgttaaccgggcacaccggggtgatttgctccaccagcattgaacgtattgtcacaggccgtaatgctgcactgacacggattgaggcgctaattcgtcagcttgatgacgtttcccaacttactttcgggattggtggcgatgtagctaatcattgggcgatgcggcagggccattctttcgactgctggttggtgcaacctgtagataaagcgatgccagtcatcacccgcaatatcgactgcagcatctggcgcgatctgatgttgaagtcagggatgctgacattgatggatgctgaggcgcgtagccagtgggctaagaacctcgaagagggcgatctcccggcaatcagcgaagcgaatatcctgagtacctttgagcagcttcatctcaacaaacaggaggtcttcgagcgtggcatcatcaatgtgttcaggggattaagctgggattacaaaaccaataacccctgttacttcggcaagaagattatcgttaacaatctggtgaagtacgataaatggggctatagcctgagctggggctggcggcgtgaccagttagccgatctggagcgcatgttgttcctgctggatggtaaaaccattcccgataaccggcacgatgtgactatccgactgatggatttcattcgcgataatccacggcagcaggaattcggagatgatctcttcactattcgccttttccaaaagggcagtggtcatatcacgtttaagcgtatggatttggtagagaagatgaacgatatcatcgcgaagcactatccgggaatgctggctgctaagtga

SEQ ID NO: 181296 - DNA, 906 bp, Klebsiella oxytoca
atgcaggatctcaatgacttagcctggttcgtacaggtgatcgatcacggtggttttgccgcggcgggcagggcgctcgatcaacccaaatccaagttgagccgtcgtatcgcccagctagaagaacgcctcggcgtccgtttgattcaacgtacaacccggcagtttgcggtaacggaagttggcctgaccttttatcagcactgcaaagcgatgctgatcgaggcggaagcggcagaacaggcggtggaaaccctgcggtccgagccgcgcgggggcgtaaagctgacctgcccggtaacgctattgcatgcgcatatcgggccgatgctggcacgatttatggtgcgctatccgggcgtgaatctgcagctggaagcgaccaaccgacgcgttgatgttgttggagagagcgtcgacgtcgcgattcgcgtacgtccaaggccgatagaagatagcgatctggtgatgcgtgttctggccgatcgcgggcaccgtctggtcgccagcccacggttggtggagcggcaggggcagcctcaggttccttcagcgctaagcgattggccggggttaagcctgggggcgggcaaacatcagcataagtggcagttgaccggcccggagggggcaagggcggaaatctactttactccccggctggtcaccacggatatgctggcgctccgtgaagcggccattgccggcgttggggtggtacagcttcctttattaatggtgcgcgatcagttggccgccggagagctggtggttgtcctcgatgagtggcaaccgcgcagggaggtgatccatgcggtgtttgcctctcgtcgcggattactcccctcggtcagggcgctggtggattttctcagcgaagagtatcagcggatggaagaggattag

SEQ ID NO: 181297 - DNA, 276 bp, Klebsiella oxytoca; identical to SEQ ID NO: 101078

SEQ ID NO: 181298 - DNA, 318 bp, Klebsiella oxytoca
atgttacgtaaggttaataactttaaagtgttagtgtttttttcgcttttctgcatgtctatatctcaatggtggcaatttgtattttttaaagaatactctcgtaaatgtttgctgggaatcgaatccatatttacaggctatacccatcaatggctcattagtctcgatgagatctttagctgcaagtttaagttttttatctcttatatattttccaaggctgacctctttcacctgcacaaaaatccgctgaagatgccatttggagtatcctgcccgcgcagcaacatcctctatcttcagcggtttatgtaa

SEQ ID NO: 181299 - DNA, 1212 bp, Klebsiella oxytoca
atgtgcggaaaatgtgaagacaatagccagccggacgcgccagcgtccccgacccggagaaaggttctgatggccggggccggccttgctgcagcatcaaccctggcggtcataccgggaaaggtacaggcacaggaatctgccgctcaggcaggtaatggaccctggcgtgttcgtgcctggggcaacagggatccggaggggccatttgttcccctggaaattccccgccgggcacttcgtccgaacgatgtcctcatcgacattatgtactgtgctatctgtcattcagatattcatatcgccaggcaggaatggggaccaccctatccggccaccaattatccctgtgttccggggcatgagatcatcgggcgtgtcgccgccatcggaagcgccgtgacgaaattccggccgggtgatattgcgggtgccggtgccatgattgattcctgcggggaatgcgagagctgcgttaacgatctggaacagtactgcctgaaaggctggacgctgaatttcaactcgccggataaaatttcgggcggctataactatggcggtttttcccagcgtgtggtgatccccgaacgttttaccgttcgcatcccaccgggaatgaatcttgccgctgcggcaccgttaatgtgcgccggcatcactaccttctcaccccttgagcactggtcggttgaagccgggcaacgggtcggggttattggcatgggcgggctcgggcatctggccgtcaagctggccgtcgcgcgcagggctgatgttacggtattcaccaccactccaggaaaagtcacggacgcgaaaaaaatgggggcccgggaggctgttgtctggaacgatcctgacgccctgaagccttatgcgaaccagtttgattttcttatatcaacggtgccgacgagcgtccccactcatccgattactaatatgcttcgcctggatggtacctacgtcatcgtcggagcccgtgaaccgatagaagacgtccgcggttccgggctgtggcttcagcgtcggcaggtctcagcatcactgatgggtggcatggcagaaactcaggagttcatcgatttctgtgcccgccgtaacattgtggccgatatcgagctgataaagcccgaccagatagatcgcgcctttgagcgaatcaaagcaaaagacattcgttatcgttttgttgtggactttacgtaa

SEQ ID NO: 181300 - DNA, 573 bp, Klebsiella oxytoca
atgttaaagaaaaccgaaacctaccataagctgattaccgctgccgcagcctgctttgcagaaaaaggctttagtgcgacaagcgtacgtgaaatttctacccgggcagggatcagccagggagcgatgtacacgtacttcaaaagcaaggatgaccttatcaaggcaatcgttcttgaagagcaaaattctgctttgaccgcccatagtgctccgtctaacggcactaattacgagcgcctttgcgcgcaggttacttcgtgcataagcgatgtaggttatccggttacccatcagttgtgggttgaaatcatggcggagtctgcgcggaaccctgaattgcagaaagcgtatatctccagtgataccatcatgcggcaaagcattgcgggaattatcgcggacggtattgcggcgggagagtttcgcagggatattcaccttgaggaagtcacgataatcctttttgcctttattgatggtttaatcgcgcgcaaggctattaacgcatccttctctttcagtcgcgatttgcctacgttttttgagctaatgtcaaaattattgaaataa

SEQ ID NO: 181301 - DNA, 864 bp, Klebsiella oxytoca
atgactagtaaaacgcttagacttttatttccacaatggcagggtggtaataatcccccctatcatcttgggtcacttcttctctcgtatctttcccccgaatcggatggccccgttgagtcagttcctgtcgatgagcccacagcggagccgcttggtaaagtggatggcattacagctaagcctcaaattgtcaggcagctaagcgatgcagccgctctgattaagaaacatgatcccgattcaattgtcgtttttggtggcgattgcctggtgtcactggctccttttgcccatctcctcaataaatacggtgataaactgggtgttctctggattgactctcatcctgacgtgcagactgcaagacaatatccgaacgcccatgcccatgttcttggagcgctcattggaaccggtgataaggatttagttgctcatgtagcaaccagacttaaccctacaaaaataatgattgcaggtatccacgatccactgccttatgaatctgaataccttgccagtcatggcattgagacgataggtcctgaaaaggttaaaaacgacgctaaagacgtcactgaatggatcaagagagaaaatattgaacatctggcaatacatatagatctggacgttctcgatccgtcactgttccgttcggttcttttcgccatgcccggcagaggagtacatgactttggtgatgtcgcagaaggtaaactatccattgacgatgttctaaatctgatagctcaggcaacctcaaaagcggaacctgtcggccttacacttgctgaacatttaccctgggatatgctgaatctgaaaaatatgctcagtgcgttaccgcttatgaagtaa

SEQ ID NO: 181302 - DNA, 612 bp, Klebsiella oxytoca
atgaatagctggataattgccttaatagataaactcaggatggaagcgatgaggataagcaatggcgggatattaacgaagtcgtacgggttatttatcatcagtattggctttgcatcgatatccattaatcccgcctgggcctatgatacgtcgagtagcgtcaattttaatatcaccggtaaaattgaagagcccgtatgcgaggtctcggttaaaccctccagcgcgatcgatctgggtaccgtatcttatcaaaagcttaccaacaaaccgggcgcgagcagtgatgccacgaccgtgtccattgcctttgataattgttcaacgggtacggcgtcagtgacgataacgtttagcggtaattcatttgacagtacttactccagtatttatgagaatgagctaattgacggcgcaaaaggcgttgggctacagctgctaagcgcggtagatcagaaatccctgggaccaaacgacagctatacctatctttttaatgagggtgcagaacctatttttaatatgagtgccagaatgtatacgccgaatggacgagtcacggcgggaaatgtcgcctatacggtcacttttaatgtgtcatataagtga

SEQ ID NO: 181303 - DNA, 1104 bp, Klebsiella oxytoca
atgaaaaagtctattttattgttgttagcctgcttactaccggcttacagttgggcatgtaaaacgggggcaaactcgggcgatatcgctttaactaatttgcccccgcagatactggttaatgcgggtagctactcggcggggaccatcctttatgattcagggcagataacgcatccaaccacatctcttacggattgtcggggttggttatatgcactgttcgggtggagctcggggaatgcgggcaccttagtgggggataacatctactcgacctccgtgcagggtatcggtattcgcgtcaaattctggctcaatatcacgggtgaatatggcagtgataccgatgattttaatgctgactacagcgttcaccatatcggtgatgaagacttatatctgggaaagccaaatggctttcttgatgacaaggcaagcacatattatgcgccaacgtaccaggtccagcttgtggcaacggggggggcaattgccagtaatagcacgctgacgctggccgatccgatttccacggtctccattctggatcttgacggaacgatggctatttcccagctgcacgtgacgggctctacaaaaattaaactgacccctatgggatgctcggttgattcgagcgcgctgaatttccaaatgggctcagtgaaaacaagtgagtttaatgtttctaacaaagtcggatcggttcagcaaacgcttaccctaacctgtgagccgggaactgccgcgacgatgcgcgttacggcaacagaagcagaaggtgataatcccgatcattccgtgattgcgttaacacccggcgaaaacgtagcgaccggcgttggggtacagttgaatcttaataatgcacccctcatcgtgaattattttaactacaaagtatttggaaccacaaaaagaacggaggtaacgaatcccggctcagatgccagctatttgatcttcaccgatcctgataatcccggcggtgcggcggcatcgaacgtcctgacgtttaccgcgaactattacaaaaccggagctaaagtgacgccaggtatcgcgaatgcgagcggaacgataacctttagttatcaataa

SEQ ID NO: 181304 - DNA, 1101 bp, Klebsiella oxytoca
atgaaaaaattttttttacttgttctttttttactttccccgggttatgtgtgggcctgtggctatggattaaattatggtgatgtatcaatcactaatttaccatccaagctattgcttagcgcaggtaattattctcctgggaccgttatttatgattcagggaaaatataccatcccaaaaccagtgttctcgactgtaccggtagtttatatgcccgctttacatggtcacctggcatagcgactacgcttgtcggtaataacatctatgaaacgtcggtgccgggaataggtatcagagttaacgtatggttaaatactacgggggaatatgatggtgtttcatctgtatttaatgtcgataacagtgaacaccatattggtgatgctgattttcctcttgtcaaaccgggcttttttgctttcagtgccagtacgaattattcccctgtctatcagttacagctcgttgctacaggcggaagcatcgccagtaatagttctctaagctttaccgacccggtatcaaccgtagcaatgaaagacagcaacggcgaattggttatttctcagctgcatatcagcgggacaacccatattcagctcgttcctatgggatgtaccgccagtacggccgcactgaatttccaaatggggtcagtgaaaacaagcgagtttaatgtttcgaacaaagtcggttcagttcatcaaacgctcaccctaacctgtgagcctggtaccttcgtgacgatgcgcgttacggcaacagaagcggaaggggataatcccggtcattccgtgattgcattaacaccgggtgaaaatgtagcgaccggcgttggggtgcagttgaacatctttgacacggcgcttgccgtgaataactccatctacagagtgtttgcagagtcgaaaagaactacggtaacgaattcagaagcggaggccagctattcgatattcaccgatcctgataatcccggcggggcggaggcatcgaacaccttgacctttaccgcgaactattacaaatatggaaccgaagtgacgccgggtgaagccaatgcgagcggaacgctgacttttagctacaactaa

SEQ ID NO: 181305 - DNA, 366 bp, Klebsiella oxytoca
atgaaaaaagttcttataatgacgccggacatagaggggcctgtccgtaacggcggcattggtactgctttcactgcccttgccactactttggcaaaaaagggttatgatgtcgatgtattgtatacatgtggtgactattcggagtcttctgcatcaacttttagcgattggtcacgtatttatagcacctttggtattaatctgctaagtaccggtctggtaaaagagattaatattgatgcgccttattttagggaaggtgcgaataagcaggtcatttcttcccaagctgactcgctgattaaaatttcgcggatctgggccgatttttttcccgcaaacacatcgaatcagcctatttag

SEQ ID NO: 181306 - DNA, 606 bp, Klebsiella oxytoca; identical to SEQ ID NO: 107131

SEQ ID NO: 181307 - DNA, 807 bp, Klebsiella oxytoca
atggcgcgggaaggcaaaaagacactgccgttttgttgtaagctgatggctaaagccgaaggctttacctccacgtttgatttttcaattcatgtcgcctttgcccgctcactgggtaagcgtcggcgtatgcctcctctccttcgccggcgtgcgattgatgcgcttctccaggcaatgtgtttccattacgatccgctggccaatcgcgtgcagcgctcgattaccaatatggccattgagtgcgggctggccacggaatctgccagtggcaacctgtctatctcacgggcgacccgcgcgctgcggtttatgtctgagctgggtctgatcacctatacaacggaatatgatccgcagattggctgcaatattccgacggatatgacgttcacgccagccctttttcaggctctggatgtgtcagatgtggccgtcgtggccgcgcgccggagtcgcgtggagtgggaaaataaacagcgcaaaaaacagagtctgccgcagctggggatggatgaactgatcgccaaatcctggcggtttgtacgcgagcgtttccgcagctatcaggctgagcgtaaatctcatggccagaagcgagcaaccgcgcggcgggatgcttcgcgccaacggaaggacatcgagacgcgtgttcgtcagcagctgacccgtgaatatgccaccggccgcttcagaggcgatcgtgatgcgctcaaacgtgaagttgagcgacgcgtgacggagcgtatgctgctgtcacggggcaataactatacccgcctggcgccgtaccccgacccagtatag

SEQ ID NO: 181308 - DNA, 270 bp, Klebsiella oxytoca
atgtcacaggtcgtaaacgcagttacttcctcatctaaacgtccctacagaaagggcaatcctgtttctgcggcagaacgtcagcagaaagctgttgcccgaaaaaaagcgacgcacaaagaggtgagagtatttgtgcgagacaagcttaaaaaccagcttcaaatcatgtgtgagaatgaaggaattactcaggcagaaatgattgaaaggctgattgaaagagaatctgcgaaacttggaattgacgtaacgacgtcacattcttga

SEQ ID NO: 181309 - DNA, 549 bp, Klebsiella oxytoca
gtgaaaataaaccgtactctcagcagatggtgtctgcctgcattggtcactctgagtctgtgcacacccgtaccgatcgtttatgccgcgagcatcgataccgggttttccccggaaggaactgccctgcggctggttctgaaaaccatcgcgaccgcacgacaggaaatccggctgatggggtattccttcacctccccggaggtggttcgttcgctcatcgaggcgaaacgacgtggggtggatgtccgtgtggttctggatcagaaggcaaataccggaacggccagcgaggccgccatgaacctgctgaccagcgtgggcattccggttcgtacggtcagcgcctacaaaattatgcatgacaaagtgatcgtcgcggacgggcgcaatacagagtccgggtcgttcaatttcagccgtgcagctgaccgttcgaattcagagaatgtgctggttgtatgggatgacccgacagttgcccaacgttatctgcagcactggcaatccaggtgggatgtcggtactgactggcgttcatcgtactaa

SEQ ID NO: 181310 - DNA, 342 bp, Klebsiella oxytoca
atgttcagctattttattttacgcattgagaagcaattattctgttatttgtatgggggcatgctggcgctgtttctgatactcctgtctccgttttttttcacaggagggggactgctcctggtgatgctgtcagttgcgttgttctggggcgggctggccctgtatacgcggcatactgaccggatgagaaagcctgacgtttctccactcgtcagtgtccgggatggtatccaggtggtgcccgagccgccagatgatgatggctggttcctgggctccgtccacgataccggcgacgggccagtctgctactggttccgtcagacgacaaaagcctga

SEQ ID NO: 181311 - DNA, 792 bp, Klebsiella oxytoca
atgaaattcagattcggattgtattttctgctcccatttatttcagttgtcgttttgaataccagttttgctcaggataatgcacctgataaaacgttttccgttacccaggagaaaagaattggagaaatcgcagcggattatctgcgtgctcatcccgagatacttattcagatgagcgagacacttcagcaggagcaggaggcgaaacagactcgcggttttaaatccgcagcactggaacaacagggaaacattctgggtaataaaaatatcccctcctgggggcccggggacggaaaggtgatggtggttgaattctttgactaccagtgcatctggtgcagccgcttcgcgccggaactggagaaggtcatcaggagtaaccaggatgtgcgctatttctttatggagtggccggtcttcgggagccgatggccggtttcattactggcagccaaaaccggtctgctggtctggaaggaaaaggggccggaggcatatctggcataccataacggtatttatgcgaccggattaattgaaggcaggctgaccaaagagacagtcacgaaaacatcaggtgatattcagttcagacaggataccattgatgaagttaataccacgctgaaaaatattaaagacatcgccacggcaacgggattaaccggtacgccgggtattattgtgatgccggtgaagggcgcgacggaagaaaataccacggtattttccggaatgacggagtcggaaagtcttcaggcggcaataaataaatcccgtcactaa

SEQ ID NO: 181312 - DNA, 594 bp, Klebsiella oxytoca
atgagtgaagaaaaacgtcctgtactgagcctgaaacgaaaacccgcggcagacagtgctgcccccaccagtgatacggccactcctggtgtggtacgccgaaaaaaggtcgtggtggtgtcggcgccgcccgcctggaaggtcaagaaagaaaagcttgaacgtgcgaaacaggccgcggaagccgccgcgcgtcaggctgagcccgtaccggtcaaggcaacaaaggctccccctccggtgcgctatcttcggctgttgccgccagagcaggcgatcatgaccctgaaggtgttctggccacagctgttcgatggcaactcgccacgtctgctggccacgggaatgcgtgaacagctgcttgccgatattgcgagtcgtgatctgccgctgtcgcataaacaggtgattaagtgcctgaaaagcctgacccggtctgcaggttatctgtcccgaatgcgggaaggtgcctcccgctatgacctgcaggggaatgtggtggctacggtcactgctgatgaagcgcactacgccagtgagcgcatgatgaaagagctgttacgcgctgaacgaaagatgagtcagaccgtttaa

SEQ ID NO: 181313 - DNA, 720 bp, Klebsiella oxytoca
atgacaacatatgaaacccgcctcaacgctgtcgatcgctggctgctggggctgctgacctggacgccaggacagacggatatcatcaagaccgtcgcgctggttctgatggtcatcgaccataccggtctgttgctggccgggaataatgaggtgatgcgtctgctggggaggggctgttttccgctgttcgggctggtctgggggatgaatctggcccgacatactgaaatccgccagtctcagctgaaccagctctggtgctgggcgttgatcgcccagggctcctttattctcatcggatacccgtggtacatggggaatatcctgtttagctttgcggtcaccggtcaggcgctgcgctggttcagtctgcagacccgcaatgatattctgctggcgatcgccattgtcgtggcctggctccctctgtctgccgacagctacggtctggccggggtttttatgctgatcaacagctggcgactgtgtcgggcgaaagaacccgcagaacgtatcgggtatggcgtgctgtgggccgtcatggtgttgctgatgaatgcccatgatattacccaggccatcgccggcctgatggtcgccttgctggccctggcggtctgttctgacatcggtcgttctgttcggcgcttctggccgcggcatttcttcgtgatgttctatgccgtacatctggcggtgctggggattgttgtctaa

SEQ ID NO: 181314 - DNA, 5259 bp, Klebsiella oxytoca
atgatgtcgattggttcggtaaagtcggcggggagcgccagcaattactatacagacaaggataactattacgttatcggatctatggatgaacgctggcagggaaagggcgcggaggcgctgggccttgacgggaaggtggacaagcaggtgttcactgacctgctgaaaggaaagctgccggacggcagtgacctgacccggatgcaggatggcgtgaacaaacaccggccaggttatgacctgaccttttccgcccctaagagcgtgtctgtcatggccatgatcggtggggataagcggctgattgatgcccataatcaggccgtcacagaagccgtaaaacaggtggaaacgctggcggcgacccgggtcatgacggacggaaaaagcgaaaccgtgctgaccggcaatctcattgtggcgaaatttaatcacgacacaaaccgcaatcaggagccccagttgcacacccatgccgtggtcatcaatgcgacgcagaacggcggcaagtggcagtctcttggcaccgatacggtgggtaaaacgggctttatcgagaatgtgtacgcaaatcagatagccttcggaaaactctaccgggaggtgctcaaacctctcgttgagaaactcggctatgagacggaagtgacaggcaaacacggcatgtgggagatgaaagatgtgccggttgagccgttttccacccgcagtcaggaggtcagggaggctgcaggccctgatgcctccctgaagtcccgcgatgtggccacactggatacccgtaaatcgaaagaaaccctcgatccggcagaaaaaatggtggagtgggtgaacaccctcaaagagagcggtttcgatattcacagctatcgcgaggatgccgataagcgcgctgcagaaatcaaccgtgcgcccgtcagtccggcgaaaaccgacggcccggatatcagcgacgtggtcacgaaagccattgccggtctcagcgaccgcaaagtgcagtttacctatgccgacatgttggcccgcacggttagccagctggaggcgaagccgggggtatttgaactggccagaacgggcattgatgcggctattgagcgcgaacagcttatcccgctcgatcgcgagaaaggtctgttcacctcaaacatccacgtccttgacgaattgtccgttaaagcgctgagcctggaggttcagcgccagaatcatgtctccgtcacgccagatgcctctgttgtgcgtcatgcacctttcagcgatgcggtcagcgtgctggcgcaggaccggccggcgatggggattgtttacggacagggaggggccacggggcagcgggagcgggtggctgagctgacgctgatggcccgggagcaggggcgcgatgtgcatatccttgctgcagataaccggtctcgtgattttctcgccggggatgcccgtctggtgggggagacggtcaccggcaagtctgccctgcaggacggaaccgcgtttatccctggcgggacgctcattgtggatcaggcagagaagctgagtctgaaagagaccctttccctgctcgatggcgccatgcgccataacgtgcaggttctgctctccgacagcggcaagcgtagcggaaccggaagcgcgctgacagtgctgaaagagagcggggtgaatacgtatcgctggcagggtggaaatcagacgacggcagacatcatcagtgaaccagacaagggcgcccgctacagccgtctggcgcaggagtttgctatcagtgtgcgtgaggggcaggaaagcgtggcacaaatcagcggggtgcgagaacagggcgtactcaatggcattatccgtgaagtcctgaaaaatgaaggtacgctgggggcgaaggagatgacagtcactaccctgacgccggtgtggctggacagcaaaagccggggcgtgcgcgactattaccgcgaagggatggtgatggagcggtgggacccggagacacggaagcatgaccggtttttgatagaccgggtgactgcgagcagcaatatgctgaccctcagggacaaagagggggaacgtctggacctgaaagtttcggctgtcgacagccagtggtcgttgttccgggccgataagctaccggtagcgagcggagaacgtctgtcggtgctggggaaaattcctgagacgcggctgaaaggcggcgagagcatcacggtgctgaacgcggaggccgggcagctgacggtgcagcgtcccgggcagaaaaccacccagaccctggcggtgggcgccgggccgttcgacgggattaaagtcgggcacggatgggtggaaagtcccggccgttcggtcagcgaaacagcgaccgtttttgcctccctgacgcaacgcgagctggataatgccacgctgaatcagctggcgcagagcggaagccatatccggctgtactctgcacaggatgcggcccgcacaacagagaagctggccaggcataccgccttcagcgtggtgtctgagcagctgaaggcccgttcaggcgagacagacctggatgcggccatcgcattacagaaagccgggctgcacaccccggcagagcaggtcattcacctttccattcctttgctggaaagtgaggagctgactttcacgcgcccgcaactgttggccaccgcgctggaaaccggcggaggtaaggttccgatgacggagatagacgcgaccattcaggcgcagattaaggctggcagtctgctgaatgtgcctgtggccccaggccacggtaatgacctgctgatttcccgccagacctgggatgcagagaaaagcattctgacaaaggtgctggaaggaaaagaggccgttgcacccctgatggacagtgtaccgggaagcctgatgacggacctgacgtcagggcagcgtgcttccacccggatgatactggagactacggatcggttcacggtggttcagggctatgccggggtggggaaaaccacccagctccgggcggtgacgggagccatcagcctgctgccggaagcgacccggcctcgggtcatcggtctggggccgacacaccgcgccgtgggggaaatgcagagcgccggcgtggatgcgcagactaccgcctcgttcctgcatgacacgcagctcctgcagcgtaatggtcagacaccggatttcagcaacacgctgttcctgctcgacgagagctcaatggtggggctggccgataccgcgaaggcgctctccctgattgcggccgggggaggacgggcggtgctcagcggcgataccgaccagctgcagtccattgcgccgggccagccgttccggctgatgcagcagcgcagtgccgccgacgtcgccattatgaaagagattgtgcgccaggtacctgagttgcgaccggcggtctacagcctgattgaccgggacgtgaaccgcgcgctggcgacgattgagcagattacaccggaacaggtgccgcgaaaagacggggcctgggtgcccgaaaactccgtggtggagttcacccccgcacaggaggagacgatacagaaagcgctgaacaagggtgaaagtgtgccggcaggtcagcccaccacgctgtatgaggcactggtgaaggactatgccgaccgtaccccggaggcgcagtcacagacgctgattatcacccatctgaatgatgaccggcgggtgctgaacagtctgattcatgacgcgaggcgggacaatggtgaagtgggcagagaggaagtcactctgccggtactggtgacgagcaacatccgtgacggagagctgcgcagactgtcgacctggacggctcataagggggccgtggccctggtcgacaatgtctaccaccgtatcgggagcgtggataaggagaaccagcttatcacgctgatggatggtgaagggaaagaacggcttatttcaccccgggaggcgttggctgaaggtgtcacgctctaccgtgagcaagagattacagtgtctcagggggacaaaatgcgcttcagcaagagtgacacggaacgcggctatgtggccaacagtgtgtgggaggtgaaatccgtttcaggtgacagtgtcacgctatctgacggcaaaaccacccgcacgctgaacccgaaggctgatcaagcgcagcaacatgtcgaccttgcctacgccatcaccgcgcatggtgctcagggggccagtgaaccgtttgccatcgcactggagggcgtggcgggtggtcgggaacggatggccagctttgaatcctcctatgtcgggttatcacgtatgaaacagcatgttcagttgtataccgacaaccgtgagggctggataaaggccataaatcattcaccagagaaagcgacagcccacgatattctggagccgcgtaacgaccgggccgtgaaaacggccggccagctgttcagccgggcacgagcgctggatgaggcggctgcaggccgggccgccctgcagcagtccggcctggcgcgcgggcagtctccggggaaattcatttcgccgggcaaaaagtacccgcagccacacgtggcgctgccggcgttcgacaaaaacgggaaagacgccggcatctggctcagtccgctgacggataacgacggacgtttgcaggtgatcggcggtgaggggcgcgtcatgggcaatgaagaagcccggtttgtggcgctgcagaacagtcgcaacggcgaaagtctgctggccgggaatatgggcgaaggcgtcaggattgcacgcgataaccccgacagcggggtggtggtccggcttgccggagatgaccgcccctggaacccggaggccatcaccggcggtcgcatctgggctgatcccctgccgaatcctccgatcaatgataccggtactgacatcccgctcccgccagaggttctggcacagcgggccgcagaagaggcacagcgccgggagatggaaagacagacggagcaggcgacccgggaagtgtccggagaggagaagaaagtgggcgagccgggcgagcggataaaagaggttatcggggacgtcattcggggtctcgaacgtgaccggccaggagaggagaaaacggtgctgccagatgacccgcagacccggcgtcaggaagcggccgttcagcaggtggccacagagagcctgcagcgcgaccgtctgcagcagatggaacgggatatggttcgtgatctcagtcgtgaaaaaacgctcgggggcgactga

SEQ ID NO: 181315 - DNA, 2295 bp, Klebsiella oxytoca
atgagttttaatgccaaagatatgacgcagggcggtcagattgcgaatatgcgttttcgcatgtttggtcagattgccaatattatattttatgtgctgtttattttattctgggtgttatgtgggctgatgctgatgtaccgtctcagctggcagacctttgtgaacggctgcgtttacttgtggtgtacgacactggcgccgatgcgcgatattattcgctctcagccggtctatacgattagctattacggaaagtctctggaatataatgcggaacaaattcttgccgataaatatactatctggtgcggtgagcagctgtggacggcatttgtttttgccgccattgtgtcgctgacaatctgcgtggtgacgttctttgtcgccagctgggtgctgggccgccaggggaaactgcagagtgaggatgaaaataccggggggcgccagctttccgataagcccaaagatgtggcccgccagatgaaacgcgatggagcggcctccgatattaaaattggcgacctgcctattcttaagaattctgaaatccagaatttctgcctccacggaaccgtgggctccggtaaatccgaagtcatccgccggctgctgaactacgtccgcgcccggggcgatatggccatcatctacgacaggtcctgtgagtttgtcaaaagctattacgacccgtcactggataaaatcctcaacccgctggattcgcgctgtgcggcctgggatttgtggaaagagtgcctgacgctgccggatttcgacaacatctccaacacccttatcccgatgggcacgaaggaagatccgttctggcagggttccggtcgcaccatctttgccgaaggtgcctacctgatgcgcggggacaaggaccgcagttacgaaaagctggttgataccatgctgtccatcaaaatcgataagctgcgtgcgtacctgcagaacaccccggccgccaacctggtcgaggagaaaattgagaagacagccatctccatacgtgccgtgctgaccaactatgtcaaggccatccgctacctgcaggggattgaaaagaatggcgagccgttcacgatccgcgactggatgcgcggcgtacgtgaagaccagcctaatggctggctgtttatctcctcgaatgccgatacgcacgcctccctgaagccggttatctcgatgtggctgtcgattgccatccgcggtctgctggcgatgggggagaaccgtaaccggcgtgtatggattttcgctgacgaactgcccacgctgcacaagctgccagacctggttgaaattctgccggaagcccgtaagtttggtggctgttatgtgttcggtatccagtcttacgcccagctggaagatatttacggtgtgaagcctgccgccacgctgtttgacgtgatgaacacaagagccttcttccgttccccgagtaaggagattgccgagttcgccgccggcgaaatcggtgagaaagaaatcctcaaggccagcgagcagtattcctacggggctgacccggtgcgtgatggtgtgtcgaccgggaaggaaaaagagcgggaaacccttgtcagctactccgacatccagacgctgcctgacctgtcctgctatgtcaccctgccggggccgtatccggccgtgaagctggccctgaaatacaatccccgaccgaaaatcgccgagggctttattcagcgccgtctcgatactcgcatcgatgaaagactcagtgctcagctggaagcccgggaagccgaggggagtctggttcgggcattgttcacgccggatgagcctgtgtctgagccagccgaagagaaagccggtgttcagcctgagcagactaaacctgctaaagacagcgtactgcctgtgccggtaaaaacctcgtcgatggcagcagagggtgccggtaagacgtcagccgtcccgttatctggtgctcccgtcacgagagtgaaaaccgttccattaatccggcctaaacctgctgcttcggtgaccggcactgctgcagcggcatccactgccgcggtgagtgcgactgcgggcgggacggagcaggaactggcgcagcagcctgtcgaggcggaccaggatatgttgccggccggaatgaacgaggatggcgtaattgaagacatgcaggcttatgacgcctggctggaaggtgaacagatacagcgggatatgcagcgacgcgaagaggtcaatatcaaccacagccgcagtgagcaggatgatatcgaaatcggaggaaacttctga

SEQ ID NO: 181316 - DNA, 528 bp, Klebsiella oxytoca
atgttaacccataaaataatacaaagtgaaatcgaggagttaaaacagatcctggttcataatgatttagagatcccatcattctggcgctgtatctggcctggcctagtatgcatggtgtggtttttactatcatcctatctctcgtactggttgagtgattatgcttctggtctcgagagactagctgccatggttttttctggtgcaataggtgttttttctatcattgcaaccgcgaataccagagcactcttcctttctttacctcaatccttcagggagaaatcgttgttttttggctttttagctaagaaatgcagaatttatggagtggttgtttttgttatcttctcatgtttagcatttttctccgcatataacgctattaatgcggttgtctttattgttattacaggatttagccttttactaacaattatggtaatgaatattgatcttggtcgctatcagttagcaacacttacgtccgttatcgaatcggtaaaaagcaaagaagttaagtaa

SEQ ID NO: 181317 - DNA, 2844 bp, Klebsiella oxytoca
atgctggaaatctacacgatagccggcggcgactggttcaggggcaacctgaatgccatttccgccttcatgagtaccggtacctggtcctctattgagaaaatgtgcattgctttttccgtgctgatcgtcgccggcagctgggtgaaaaaacacaacatcatggatctggtcggctgggtgtttgcgctgacgctggtctcgatgctggtcgtcatccgcaaaccggtgcagattatcgactacagcaatgtgtcccaggtctatcaggttgataacgtgccaattgggctggccattccggcgtcactgaccacgcgtgtgggcaatgctctggtgcagagctatgagatgattttcgccctgccggacagtgtgacgtacagcaaaacggggatgttatttggcgggaacctggtggcgaaaagtacggactttatctcgcagaatccagaaatcaccaccctgttctcagactacgtgcagaactgtgtgatgggagatatttttctcaatcacaagtatacgtttgaggaactactgaactcgtctgacccctacacgattattttttctaaccccagcccgcttcgcggcgtttttgacaaaaacaatcagtttaaaacctgccaggaagcctcccgtgatttgaaatcagccctggcgctggatacccagaccggcgggaagacctggagctactatgtgcgccagctttttgggggtaaacctaacccggacctgctgttcagccagatgatcggtgacagctacaacttcttctacagttcggggcagaatgcagggcagattatccgccagaacgtgacgatgaatgccctgcgcagcggaatccagagctacgcagcccgcagtggcgatacggccagcctggtgaacattgccaatacctcgtcgctggaaaagcaacgtctggcccaggcgacaatgggacatcaggcgctgcgttctctgcccatgatgcagacagtgatactgggtattatgtttggcctgttcccgatcatggtcatggcggcgatgttcaacatgatgaccatgcaggtgctgaagggctacgtctttgccctgatgtggctgcagtcgtggcctctgctgtacgctatcctgaacagcgcgatggcttactatgcgaagcaaaatggggtgccggtggtcctctctgaactctctcagctgcagctgaaaaactcggatattgccaccaccgcgggctatatctcgatgatgatccccccgctcagctgggcgatgattaaaagtatgggagcaggtttctccagcgcctacagccactttgcttcgtccggcctcagctccacgtcgcaggcctcctccagcgtagtggacgggaactattcgttctcaaatatgcagacggataatgtcagcgggaacagctggaataccaacagcaccaccgcgtttgggcagatgacccgacagctggcgaatggggggatgggtacccagacccgggatgggtctatggtctgggatagtagtggcgccatgtcaaaactccccgtggatatcaatgttggtcggcagatagccagcgcacagcaacagatggcccgggaatcagatgttcaggcagaaagctctctgcacggttataacagcagtgtgacgagtgcctggaacagcctgaagcagtttggcacaaatatggggaccagtgcgtccatgacgtcaggcgctgataatactgagtcgtcgcaggattcgatggccagaagtaaaatgtggagtgctgttgtttctaatgcaaaagccaacaacatcagcaatgaagagtctttccagcagttgatggataagtcaacgaaagggtctgtatctggtgagatgtacggtaatgctaagtgggggtctggtgaccagctggctgggaaactgggtaaatgggctacgggtctctctgctgaggggggggctaaaattagtgctggcttgaatgcatcaagtggctctactgactcgacaaatgaatcaggaagatcatcctatgacagtcgacatgataccagtggtcaggcagccaaagactttaaagaagcatctgattactttaccagccgtaaaacaaccacatcgggtaatataacggacaataatgccagctcgcgtgttgatcagtttgctgcatcactctctagtgctaaaaacagctatgaccagtatacgaacagccggacacgtagccacgaatacagtgaaatggcttcacgtacagagagcatgagcggacagatgagcgaaaatctgacccaacagtttgcaaactttgttcagcaacaggcaccacaggatgctgaagccattctgaccaacaccagttctccggaagttgcagcgcaacgtgaagctctggcgcgtgaattcgtcaaagctcaagttgaacctaagattgatggtgcgtatcaacaaggtcgtgaagccattggccaaaatatgcctggtgtgtcaggcggtggtgacagtgggtcggtaacggccgactacgggcataatgccggtaatatagaagccatgacacgagatgcaggtattaaggataatgtggggccgaaagtggatggaatgatagtgcagaataaccaacagcatcaggaatcccgtgaaaccatacaacagcaaggcgttggagtgaaaaaagagaatgctgaactggaaaatgaccacaaaacaaaaggaaatgatttcaaaagtacttataatgaaaggaaagaaagtcagactaaattgcctggcgcagatacgacaaaagagctattggataaggcagctaagttagaaaaagataaaacaaaaaaatag

SEQ ID NO: 181318 - DNA, 327 bp, Klebsiella oxytoca
atggatgagaaaaaatcgtacggggtggtgatgctgtttgtcggcgtgtttgtcgtttttctgatcagcatcatgtcttacagcctgtggcgagataagcagattaatgcgtttatggccaccaaccgggcctggggtattcagtgtgaccgggtttctcaggccgcgtgggtggttaaagaaggggagcgggtgaacctggaaatgaattcacttccactgtactgcagcgggtatcgctttgaagcccgcaatgacgcaggaaaaacacggcgtcttcttgataaatacagcgtttatcagcacctgacacgccagccgcgttaa

SEQ ID NO: 181319 - DNA, 186 bp, Klebsiella oxytoca
atgaagcagataaccacatttaaagaattaaaaaaatggcgcaaagtcacaggaatgatttttgtgcttgccctgttgattttctgcatggcgacgttattagcgagtgacgatcctgttgtggcggtccgttctcttttatttattgttttcctcacgattatagccagacgacttttgccatga

SEQ ID NO: 181320 - DNA, 237 bp, Klebsiella oxytoca
atgaaaattaactttcataaatatcctgccgtcgattttgtagtgagattactgctgacaataatcattatctcccctgtgctgtatttctcatgggatgccgtcaaagggacgtcaggtagtgattatattgagagtgtggtttttattctcatggtcggttttttctggctggtgagttacctcttctttactgcacttcaggatgtattcaaaaaaaggagggtgaataaatga

SEQ ID NO: 181321 - DNA, 612 bp, Klebsiella oxytoca
atgaacagactggtcaggtccaccatttttttgttttttattctaataatgccattttcaaacgccgcaagcagagaggaactcgagaagctgtattcaatgcagatgcccggcactgtcattcagtgtaagagaacagatgaaacgttttttacaaaaataagaatgatttcccggtatacggttacggagcaaagtgaaaataaaacaaaaatggatgggtgggttgccatgtacgccaccggtctgaaagcgttacgatttgaagctgaatttaaagctacccggacaatgctggatgctcgtgatatgtgggaggtcgaccccgactcactggttatgaaagtatcaggtgaggatgcaaaacgctttaaaaataagggaggggttgattttttcagggataatagcaggttaaactatgacgatcactctgatattcgatttactacctaccccgattatattatcggggaggatgaccccggattctttacatcaaaaggcgcagaggaatgtaccactcgctttgctgacagttttcccgcggggaaaaccgggctgaaggtgaaggaggataacagtaataaggaacacaaccatgaaaattaa

SEQ ID NO: 181322 - DNA, 1944 bp, Klebsiella oxytoca
atgagatcgcttcccgtcattgcaaccgttctgggggcctttatcgggtttgcaggaccagccggtgcagacagtaatacggattacaaagccggttcggatttcgcaaaacaggttcagggaggggggctcgatgccctgaaaaactttaatggtgagcagaccttacccggttatacctcccgacccgaccagacgaaatactacggtggcgtgacagccagcggtgacagttccctgaaaagtgactctgcttcggagttcagccagaacgaggccggacaaagtatcacggagtcgttcaccaaccggccccctgacagtatttcagcggatgccccctttattcaggcggcacaggacaccgaattccgggcggacagcattgtcggcgataccggtcaggcctgtacggcacaggtggttaatcgtagcgagttcacgaaccatacgtgcgagcgggatttgcaggtggagaacttctgcacgcgggaggcgacgctgaaagacaacgccacgacgcaaaaggtcagtcgtacctaccagcaggctgtcccgatgaatttcacccgaaacagcacccgatggagcgggacgctgaccatcccgtcgacagggcggctgctcagcgtgtctgttgacggtgaacctctgccggttccctggatttatgaatgtgacaacgaaggaaaggtcagagacagttgcaagcttgcagtcagtgaaaacatcagcctctttgataaaacattccctgttgatgtgatgacctggccgaatacggtgacgacgtgctccgggggccagaacacacactgtacaagtcattactacgatggcaccgggaaaattcatcagtctttcagcatggaccggaacgttgtcgccgggcagagctttccggtaacgaaaacgtcgaaaacccagccatcagtgaatgttaaatccattcaggtgacggtcatactagtcatggaggagacggaaaccgtatttgcaccagaggtggtctgggttgaaagttgtccgttcagcaaggacgaaggcacgaaaacaggtgaagaatgtatcagcccgggcgggacaaaaaccctcaacctgggcgggaaggcgtattccttcacagaagcatgctggaaatacaaggacacctggctcacacagcctgcggatcatggctcctgtgagagcctgatgaacaatacagcctgcacgctctcttcacgtcagtgtgccttcaccggtgaagacgggacctgtctgcatgagtatgccacgtactcctgcgaaacccggaccagcggtaagcagatgatctgcggcgaggatgtattctgccttgatggtgaatgcgataaagcggtcagcggcacgaacaacggctttggacaggcagtttcggagctcgcggcgctggccgctgcgggtaaagatgttgcggcgctgaacggggtggacgtcagggcattcaccggcaaggcaaaattctgtaagaagttcgctgcaggcttcagcaactgctgcaaggacagcggatggggccaggatgtgggcctggcacgctgcagcagcgaagagaaggcgctggccaaagcgaaaaccaacaagctgacagtcagtattggtgagttttgctcgaagaaggtactggggatctgcctggagaaaaaacgcagttactgccagtttgactcaaaactggctcagatagtccaggagcaaggccgtaacggacagctgcatattgggttcggtggcgccagcagtccggactgccgggggatcacggtagcagaactgcagggcattaactttaatcagctggactttacgaacttcatggaggacctgataaataaccagaaaataccggataacagtgagctgactgataaaacaaaacaacgcataaaagaacttctcacgcagtcttcagcaaaatga

SEQ ID NO: 181323 - DNA, 627 bp, Klebsiella oxytoca
atgaagttgataaatgtattaatgattctggcattacagtcaggttcagcagtcgctgcagttactccgggtagtccgactacagcagacagggagtggctgaaacagcaggaaaacctcagtgaacagttacgtcagcatccggacaaacaactgcagcaggaactggaagcgcagattaaccgtaacccactcgccagcgctgaccgtcagtttatcgacaatctggccagccagcagaatgcgtcaaaccagacaaagccagaagaaggggcggtgtactttgtctccttttcgataccggaagagggtctgaagcgaatgttgcatgagacccggcagtacagcatccccgctaccttgcgaggactggtcaacaacgatatgaaagcgaccacggatgcggtgatgcacctggtgaacgacggggtgactgacggtgtgcaaatcgatccgacgctctacacgcagtacaacatccgtagcgtgccggccctggtggtgcgctgtcaggccggcttcgacgtggtgcatggcaatatcaggctgaaacaggctctggagaaggtcgcagagaaaggggactgcgcgaacacagcccgtcatatgctgggggggacgaaatga

SEQ ID NO: 181324 - DNA, 993 bp, Klebsiella oxytoca
gtgaaatccctgaccctgtttctgagtgccctgatgatgtggggatacagcctcagtgctgctgcggacccctcctgcgagggacgttttgttaacccgatcaccgatgtctgctggcaatgcatttttccgatgtccatcgggagtgtgtcggtcgcggccggtggtggcccggataccgtgaatccggccagtccggttcagtactgtcccgcaccgcccccgatatttgttcgtatcggtctggcgattggctactgggagccgatggccatgacggatgtcagccgttcacctggctgcatggtgaacctcgggggattcagtatcaatctcggcaagaccgggatgggtacggctaagaaggatgacaagcaggtgaacggggccttctatcacgtccactggtacaagtatccgctgacctactggctgaacatcattacctcagccgggtgcctggaaggaggtgatatggatattgcctatttatccgaaatcgacccgacctgggtggacagcagcctgaccaccattctgaatccggaagcgattttgtttgctaacccgattgcccagggcgcatgtgcggcagatgcgattgccagtgcattcaacaaaccactcgatattttgttctggtgcgccggctctcaggggtcgatgtacccgttctccggctgggccagcaacgagtccagtcccctgcagtcatcgctgttactcagtgagcgaatggcctacaagcttcatcggcaggggcaaatcatggagaccgtcggcgcagatgtggcggtctgctacgaatacccgtctccgatcatcccaaaagagcggtggcgctatcagatggtgaatatgtatccggacagcggtcagtgccaccctctcgggcgcagtgtgatgcgctgggaggcgggcagaaatccacccaacacgcggaaaaactacggctacctgatgtggcgtaaacgtaactgtgtctacctctga

SEQ ID NO: 181325 - DNA, 627 bp, Klebsiella oxytoca
atgacgcgactgaaattatgtctgctcgccggctgtctgctttcgccgctgacacaggccgccgacctcggtacctggggggatttgtggcccgtccgtgagcaggacatgctggaacttatcacgcagcggctgcagggactgcaacaatccggccagtgggataagacaatgggcgagtttaagcagcgggtgatcgagaacagccagcgcccggccccggtggaggggctgcacagagcggagaaatatgcgcaacgctggtttgaccccagtattcgcctgacggaagacctgaaggataacgaagggcgggtgtttgctcaccagggcgagctcatcaatcccctgaaaaccgtgccctttatgcagaccctgtactttatcaacggcgacgatcctgaccagatagcctggatgaaacgccaggtgccggaaacgctgatgagcaagattattctggtccggggcagcgtccctgacacctcgtccgcgctggacagccggatttattttgaccagaacggtgtgctttcaaaacggttcggcctgaccagggtgccggcgcgtattacgccggcaccctccggtgagcggctgaatatcgaaacctttcctgttaaataa

SEQ ID NO: 181326 - DNA, 390 bp, Klebsiella oxytoca
atggaaaaccacgcagaacagcagaaaacgacgccccggccgtatcgacgggggctggccatcgttgcgcttgttgtcttcgtcctggcgaccaacgtctttctcacgcgggtggtactggagtacaccacgccgcgggtggtggcctttgatatgaagaaaacgctcgacagttttatggacagtgtcagtcagaaacagctgtcagaggcgcagtccaaagcgctgtcagagcggtttaacagtgcgctggagcagagcctggcggattaccagcaacaacatcatgtcctcatcctggtgtcgccggcggtggttcagggggcccccgatgtgacccgtaaaattcagacggacattgcccggcgaatgaaaggaggccaggaatga

SEQ ID NO: 181327 - DNA, 384 bp, Klebsiella oxytoca
atggctttgattaaaaagtatggctttctgcttattcctgcgttgtactggctcatctatctgggtgtcagattgacttacaacggactggctggagagtacacacctgatttcattcagagtatacgccatgacggtgtgtttattatctgcagcttactggtgttttatattgcctgtttaagagttgatgtcagtgacggagagctttcaggggtgctctttttggctgttattctttttcatgttgctgcattaattatctcgcttcttatctgtttatggcagggggcgctgttgtcggatgttatttttatctggcaactgggcacctcgatgatgatgttagtgttcatccctgtactcacttttagatatgcttag

SEQ ID NO: 181328 - DNA, 402 bp, Klebsiella oxytoca
atgaacgcattttactatggtatcaatctgggatggatagcgggaatatttctggcactctttattgtagggggcatcctggcagcatcaatgtgtgcaatcccacagaagtatcaaagccgtttaaatgctggaaacacctttatctggagctcactggccgccgtggtgggactggctgggatactcccgatcctgattatgacggtatcaatggatgacctggaagcgggtaaacactggcaaacagaatgcaagctaatggaagtcaacattcgggatggcgccttttcagaggctgtgaataagttagattgcgccggggttatcatcaatgtaccttccgaaaaatattatcgttatatctctgagtggcaattgtataaggctaaaaacaaatga

SEQ ID NO: 181329 - DNA, 279 bp, Klebsiella oxytoca
atggacaataataaggctttgctttctttatgtgtgctgtcggtcgtgttgatgagtgctgtgttagtttttaagcaaacccaacccggcaatgacgatttaattaaagacgggaagtactggaccactgcgtgttccctcaaagaagttgatatccccacaggaatgtttaccagtaacattaatcgactggattgttcaggtgttgttgtgaatgtagtgacggataaatacgatcaggcagtatccgcgtataacaaatctaaaaatcatgggtga

SEQ ID NO: 181330 - DNA, 555 bp, Klebsiella oxytoca
atgttaattcctctgggcagcgctttgcttttaacagggtgcgcgggcacagagacggagttcgaatgtaatgccacgacatcggatacctgtatgacgatggagcaggcaaatgagaaggcgaaagcaaaagaggaaagtgcttcggcaaagccggctgcggccgggttgctacgactggctgacggcaatttcagaacgacgtcgccgggttcatacccgttgccgccacaacccgggtttgtgaaaacaaaaagtgcatcggttgcgccggtaaataaaagcaattccggtttgctgaataataccgctgcggcagccagaccggtttataccgtgaatacggttatgccgtcagtgcgtccggtaacggtatcaaccctgacttcaccgccgacggtacccggccaatatccgcgtcccctgagaaagggggaacagataacgtcgttgtgggtggcaccctatatcgacaccgatgatgtttatcaccagccttcgacggttttatttgttgtcacaccatcggcatggggtcagccccgcattaactaa

SEQ ID NO: 181331 - DNA, 1422 bp, Klebsiella oxytoca
atggccaacttcaatacgatcatcaaacgtaagcagtacctgtggctgggcctcattctggtcggtggcgcgggcgccatcggggggggaatgtatctttctgacctgaacctgagttcggaagaagaggcccctgtgcagggagagccggccccggatatgaccggtgtggttgacagtaatttcaacagcaaagtggagcagcatgcgacaacggagatgcaggccactgctgcggacctgaacaagcgctttggcgcgctgcagggcgaagtggacatactgagtaagggccgtgctgccgatcaggttcgtatcgagcaactcagcaatgagaatgccgcgatgcaggagcaactgaggacgctgggcgtcaggccatccgttcctggtggagagccggcgccgacccctccctctccggcacccgggccggaaggtgaaccgcaaccggcaaattatccgccacagcctggtggtgcggtaccaccgccgaccgctttctatccgggtaacggtactgtgcaacccccgcaggtcagttatcagtctgtaccggtaccgaaccagatcaaccgtaaaacgttcatctacaacaaagggaaaaagggcagggagctgccgtatatcccgtcaggcagttttgcgaaaagcagcctgatcgaaggcgccgatgcgaatgcttccgtgaccgggaatgaatcaaccgtaccgatgcagttacgcatcatcggtcgggtggaaatgccgaacagtaaaacctatgacctgaccggctgctttgtcggactggaagcctggggggatgtctccagtgagcgtgccattgtccggacccgcaatatcagctgcatcaaaggggataaaaccatcgaccagccgattaacggtcacgtctcatttatgggcaagaacggtgtgaaaggcgaggtggtgatgcgtaacggcaaaatcctcggctgggcctggggcgcaggctttgttgacgggattggtcagggcatggagcgggcttcgcaacctgctgttggcctgggtgcaacggcatccgttggcgccggtgacgtgctgaaaatggggattggcggcggggcatccaaagctgcacagaccctgagtgagtattacatcaaacgcgctgaacagtatcacccgatcatcccgattggtgccggtaacgaagtcacggtggtgttccaggacggtttccagctgaaaaccattgaagagctggaagcggaaaagaacgggcaacagcaggcgcagaaccaggcacaacctgaacaacccgagagcaggtcgcagcaatccggcgggaacctcaatggttttaataccgatgagatgctgaagaaactgggcaagcttgacccgcgtgagttctcgccgggggctgcacctcagggagataacaatggttaa

SEQ ID NO: 181332 - DNA, 735 bp, Klebsiella oxytoca
atgaaaaacattaacccgttatttctctccggttgcctgtttttttcgctacctgcgatatcggccaccctcagcggtacgctggcgccgaccgttgttcccctggcgaacggcgggcaggcaaacatcgccgtgagtaacacggaccccaacctcttcaccgtttccggtgaccgtattactgcaattaacagtctggacggtggtctgacaaaccaggagcagaccgacagcggtggcgccattctggccacggtcagcaaaaaaccgttcacctttattgtggaaaccgagcgcggactgaacttttccatccgggcggtaccacgcgccggggttggccggactatccagctggtctccgagctcgtggggacaccgggtcccgctaaatcatgggaagaatccggtccgtatgaaggtattctggtttctcttaaccgtgctgttcgccagggtcagatccctgatgaataccaggctgttcctgtcacatcggaatcactgcaggtgcccgctggtctgcgtgcgacagcggaaaaagtctggaccgggcatcacctgaaagtggtgcgctacagcctcgaaaatatcagtttttcgccccgaatgatccgcgaaagcgatttctggcaacccggcacccgcgccatcatgctcagcagccctgctggccagctgaccggtggtggccggatgcaggtctggatcaccacctctgaaggggggcgctga

SEQ ID NO: 181333 - DNA, 567 bp, Klebsiella oxytoca
atggaacatggtgccagacaaagtaccacgcgtgttatcgccgtggggtttatctgtctggggacgctttttaccctcagccttgcgacaaatatcatacagagcattaataactatcgcctgcagacagaacagaaagtggtagtcacgccaatgttgttcagcgcgccatttgctgtatcacagaatcaggcggacgcgtcatatctggagcagctgggcctgagctttattgcattacgtcttaacgtcacgccggaaacggtcgacgcccagcatgcccagctgctccggtatgtttttcccggggcgcagaacagcctcaaaatccagctggcagaagatgctaagcggataaaagacaataatgtgaatgcctctttttatatgacgtctgtccgtgcgtacccggctgaaaatcgggtggatatccgcggagaactgaaaacgtggataggggattctgccccctacagtgaaattaaaagttacgtcctgcagtttaatcgtgtggatggtgtcagctggctggcgcgttttggagaaataaataatgaaaaacattaa

SEQ ID NO: 181334 - DNA, 369 bp, Klebsiella oxytoca
atgaatgctgtattaagtattcagggaaatactttctctgaagaaaccaaaccgtcttttctgtcacgtgttttcaacaaaaagtcagccctgaaagtgaccaaggctgtgctgccggtagccgctctggcggcgttcttcccggacgccgcgatggccaccaccacggcgaccgacctgatgaaatccggggatgctaccgttaaaggcacgttcggtaagtcttccagcgtcgtcaagtgggtggttctggctgaagtcgtagcaggcggcatcatgtacatgatgaccaaaaacgtgaagttcctgttcggcttcgccatcatttcgacctttattaccatcggtatgtcggtcgccggttactga

SEQ ID NO: 181335 - DNA, 192 bp, Klebsiella oxytoca
atgatgtccctctgggatgcgctccggatgaatatgatgatctcatatcaggaacttgttcgcaccttccttagcgcaaagaaccgtagtggcagaactaaatcaaccgaggtcgcgatgcgtctcaaagatcatctgagacgctttccaaactatatcttttctgaacaacgagaggaggaagaaagatag

SEQ ID NO: 181336 - DNA, 435 bp, Klebsiella oxytoca
atgggactttacaggagttcatcacatgtatattggcgttgcaaataccacatagtctggacgcccaagtaccgattcaggatcctgaaagataagctgggtaaggagctgtacaggacgatctatatcctctgtggaataaaggattgtgaggttctggagctaaatgttcagcccgatcatgtgcatctggtcgtcatcatcccaccgaagatctcgatatcaactctaatgggccatctaaaaggacgcagtgcaatcaggctttacaatcgttttcccaatatcaggaagaagctatgggaaaaccatttttggtcccgaggctactttgtcgatacggtgggagtgaatgaagaaattatcagacgatatgtgaggcatcaggagaaaacggaacaaacgcatgaacagcaaatggaattgctagagtag

SEQ ID NO: 181337 - DNA, 945 bp, Klebsiella oxytoca
atgacgatttccctgcatacccagactagcgcccctaacatcgcagcggcgatcagcgtatccccgctggagcagtcaggctcctcaaaaacgaaattttccaaaactaaaaccgatatttaccagactgtcaccgacagcatcattactgcgctggaagctggtgtgaaaccatggacgtgtccgtggcaacgagtatccggtatgtctggcttgccatccaattacgcaaccggtatcgcgtatagcggaatgaatatcatgctgttgtggtgtagtgcgtcagaacagggcttcggtgattcacgctggatgacctacaaacaagcacaggcagtcggcgggcaggttcgcaaaggcgagcatggcacgacagctattttctatacaaccttagagaagaaaaacgaagacggcgaaatcgaccagatcccgatgctgaaaactttcaccgtgtttaacgttcagcaaattgacggcttgcctctgacaactgaaacagtcagcccggaagcaacctttgacccgttaccggaggctgaaaatctgttccagaagagtggcgcaaacatcattgagaaaggacaaaacgcctttttcagcccttcgactgatgaagtctggctaccagagcgccatctgtttttagatgcagctaatttctatgctactggcttgcatgagttggttcactggagtggtggtaaaaaacggcttaaccgtgaaatgaaaggaagattcggcagtgaagattatgcttttgaggagctgatcgccgagttgggaagcgcgttcctgatggcggatctggggattgtcggagaggttcagcacgaaagctatattgcttcctggctgaaagcactgaaaaacgacaagcgctatattttcaaagccgccagcgcggcatcgaaagcgcatcgctatctgatggagaaggtctga

SEQ ID NO: 181338 - DNA, 237 bp, Klebsiella oxytoca
atgaccgcgaaacaacgcagcacgcagagtgtgaccatgacggtagagcgcgccttactgatccgggcacgtgaggcaggcattaacctcagtgcgaccctgacaaccgccctggatgcggagcttcgccactatgaagcgaaaaaatggcaggaagagaaccgggaggccatcgacgcattaaatcgtttccatgatgagcatggctgtttcagtgatgaataccggacattttaa

SEQ ID NO: 181339 - DNA, 315 bp, Klebsiella oxytoca
atgcagttcaccgtatacggaaacaccggtaaaagcgccgtttaccctctgctgcttgatgtcacgagcgatattatcggacaactgaaccgccggatcgtgatcccgctgctgcctgctggcaggtatccggcaggacgccgcccggagcgtcttgtccctgtcgtcagactgacagacggtcaggaatacgcggtcatgacccacgaactggcgagtgtccctgtccgggcgctgggagcggttttctgcgatgcgtctcaataccgcactcaggtgaaggccgccatcgatttcctcattgacggcatttag

SEQ ID NO: 181340 - DNA, 753 bp, Klebsiella oxytoca
atgcttattcataacgttgctgaaagaaacgaagccgcaaaccgaaggatgcaggcattgctgagttttctaaaggaagaaaccttctctgattttttaaccttaaaaaaggtcgtcggctataaaggaagacataaccatgccatgtataatctgctgaataaagcggtggcactggggttgctgagtaaacatgaatatccggtactgaccgggaaaaaggcattgtggggaataaccatgccggggctggcaagggtggttaacgcgaatgaccctgtttttcccgcctattttgagccgggaaaactccggcaccggacgctggagcatcgtctgttaaaccagcgggtcaggcttgccctggaggaaaaaggcggtacaggctggcttaacggtgaccggggggggtttatggcgcggtattctggggtccggcaccgaccggacggcatcattactctgagcagcggtgccatcgttgcggtggaaaccgagcgctcgctgaaaacccgcgcccgctatatcaccattattaacagtcatctgaccgccagcgacgccggacgctggcactatgtgatgtatgttatgccggatgataaaacgaaagaatcgctggtcaggctgtttggcagcatcaggacagtgatgaggaacagcgttcccgttccatttgatgcgaagaaccgggaaatgtttctgttccgcacgatagccgaactggaacaggcccccgacagccacgactaa

SEQ ID NO: 181341 - DNA, 1737 bp, Klebsiella oxytoca
atgggaactcatctgatgcaaaggctgaatgccttttcggatgctttttctttttttctgctctggctgcaatacaacccggtcatattatctctgttcgccgggctgacgctgccctttatttttcatctgccacgcgaagaaagaaaaaacgcccccttctggttaaaatcggtggcgtgtgtgtctatcttcttctttatctccggcacgctgtcgccgctgaccattcaggggctgagttttttctttacggtgctcgataatcacattctgctcaggttatcactctggatactgacggtcggattgacgctggccggtctggcctttcacattaccgcccgacggttactggccggagaaatcgacagtttaaaacaccggatgattaagaaaagcaaactggaaaggaatatcagaacggatgttcgtgaagtcagggatatgttgcctgacagcatcgaatataatccgctggattatattgacctgaataagggtattttcatcgggctggataaagacaatcagccgcaatatattaccgccgaagaatttcagacccagcacgccgaccttatcggcaccaccggctccggtaaaggggtgagcgcctgtgtcctgctttatcaggcaatactgtcaggtgaaggcgtatttgttgaagatcccaaaaatgatgagtgggccccacatgtcctgcgggacgcctgtcagaaagcgaataaacagtttgttcttattaacctgaatgaccttcatttccagctggatttactggctgatatttctcatgaacaactggaggaattgtttaatgccggtttcagtctggaaaaaaaaggcgaaggcgctgacttttatcgtatagccgaccgacgggccgccagaaatacggcggcgatttatgaaaaagacatgacattacgggatttattcaacaccgattttgtgaaatccctcagtgaagatgtgcctgctttttatggcgagctggaggaaatcgccctggttaattccattaacgcccgcaacggattttcattaaagaccatttttgatgagggtggatgctgttacatcatcggctcgatgcgtaatcagaaaatcatttcggcacaacgtatgattttgacccgcctgattcagatagccgaaacgcgggaccggataaaaggaaaaccgcgtccggtcgctatttttctggatgaacttaaatatcacctttcccgcccggcgcttgagggacttggcgcggcaagggataaaggtgtgcatatcatcatggcgcatcagtcggtgaaagatttatatgactgcccggcagatctggagggggatgccgttgccggttcagtgattgagaactgcaagtttatgctggtttaccgccttcgcgatccggataccgccgactgggtggccaggatgaccggctctattctggttgatgatgagatgagaaaagtgaaaacggatatctccctgacggagaaaatggataccgaccggatgatccgccaggcggaacgctattatatcgacagcaatatgctcctcaatctgccgaaatttgtcggttttgtatttacccagaatgatctggcgaaggcgacaaaactctttcacataccggcgaaaaagcaatatatcgacctgctgtcatttgagcataaacacccgctgtataccgaaaaagacaatcaggttcacaaaccttccattaacctatga

SEQ ID NO: 181342 - DNA, 303 bp, Klebsiella oxytoca
atgaaatattccgctattgcggcggtaatgctgtgcattgctgccgggacgcctgtttattcatttgctgctaacccgtgcgaagtggtgctgtgtatgtacgggaaagcaaccggaaacagtggaggaagcgaatgccattctgctgaacgagctttctttaatatcgttaaaaagaataaacacggatttttacccaatcatacgctcaatgccagaaaagctttcctgggggaatgcgccagcgctgatccggaagcggtgaataaaatcctgtccagatttggcagagtcagagggtaa

SEQ ID NO: 181343 - DNA, 399 bp, Klebsiella oxytoca
atgataaaggttatcactatgctgctattctcgctggtactttccggctgttcttcacccccgccaccgcttcctgttgaatggaataaaccgggccagtcagtcaataccggtttaccgcagtggcgtgacaatccggttattattccttctccggtggttaacgatacatggttattatcccttcacgcacggaattttaatgagacacgctggacgctcgccgtattttacgcagtcgcccactctgcgcgtattgttgttgcagcgccatcaggcgcagatttctttacggcaaaaaactggctgcgtcagcatggcgcaaaaggcgttattgcatatcagcctgtctctggctgcctgacatgcagcgatacccgcatttatttttcgcattaa

SEQ ID NO: 181344 - DNA, 1026 bp, Klebsiella oxytoca
atgaccgctaaaaatatctccctggaccgctataagcagcgtttttttggtgattttctggcgcttcccggcctgacggaaatcgccgtcaatcgtcctggcgaacttttcaccaaaattaacggcgtctgggcacagcacgccgttccgctggattacgagggctgctacaactttgccagatgcctggcgaagcatcacggcgacaatatcgaagatatcaagccagggctgtccgccacgctggaatccggcgaacgctgtcaggtcatcgtgcccccggcctgcgagcgcgaaacggtgtccatcacgctgcgtaaaccctcacaggtccagatcccgcatcaggactatatcgacgccgggttttataaccgggtgacgggcacggaaaaaacgcagacgcacgatgaggaattactggccttatatgacgtaaaagacattccgcgctttatggagaaatgtgtggaatacggtaaaaccattgcggtggccggggaaaccagtaccggaaaaaccacttatatgaagatgctgataggttacattccccgcaacctgcgtatcacgaccattgaagataacccggaaatcaccttctttattcataaaaactatgtccaccttttttatccatcggaatcggcagatgaaaaaaggtcaatggtgacgcccgccagcctgctgcgctggaattaccgcatgaatcctgaccgcatactattaaccgaagtgcggggcggcgaagcctgggattttctcaaaataaccggctccggccatgaaggcagtatgacctctgttcatgccggttcggcaagggaagcggtggacgggtttattacccgctgttatgaaaatccgcaatgcgccagactcccgtacacctttatgttacgcaaggtgctggacagtctggacgttatcgtgagtatcgacctggacggtcatatgcgccggatgaatgatatttattttcggccactgcaccgcaacgccttttttgaggagatgaaagcatga

SEQ ID NO: 181345 - DNA, 1254 bp, Klebsiella oxytoca
atgaacgacgaacacccgcatcctgaacctgatgagtcccggccctctccggcgcagacggatgacgacattgccgcgctggagcgcgagacccgtgccaggcgggaagcagagcttctcaccgcgcaggacgatgaagagaacgatccggtacaacccgctataaacaaactgaaaaagcgcaggcgcggaagagccaccgcgtttctggcgctcgccgccgttgcgctgattgcgctggcgtgggcgggcaactgggtataccgcaatcttctctggcagcccggtgaggaaaagcggcaggatgccgcgccacagccgaaccggagcgattaccggcagcgaaccgatctggggacgcacgataccggccccgcagcgccggaaccgtcggacaacagcccacgcagtacgacggtcaccgggccggagacgccgcctgaactcgataaagcccgttttctggttcgccgggacagctctgccgctgcggcccgaaacccggtacggacccggcagcaggaaatgacgcaggtatcctctgccgggcagtcgtcagggacgccatcccctggcaccggtcagcagccagacaccacgccgtcacagccggaacactccccgtcagtggtacggcgtattccttacaacccggatctgtacgtgccggaaaataccgccattccctgttcgctggattaccgttttgtctcggaccgggcggggaaaatccgctgcacagtcgccagcgatatctggagcgccagcggcaacacgaggctgattgaaaaagggaccaccgccacgggcgtttaccagacaggtgcggaaaccgggatgacgcacggccagggacgcgccttcctcatcatcaccaaactgcgtacccgccagcccccttatcttgatattcctctggttgatacccgcgctgccggggaactgggcgaggccggtgttgatggctggatcgactcacatttcagcgagcgattcgggggcgcattactggtcggtatgatccccgatgttgcggcatgggcttccgacagcgcgggtcagaaagatcgtaatacggactacaccgaaaacagccgccaggcgatggccgatatggcgcgcaccacgctggaaaacagcatcaatatcccgccaaccgtgcacaaaaatcagggtgagatcatcaacctgatcaccggacaggatattgatttttccggcatctatacgctgaggatgaaaaatgaccgctaa

SEQ ID NO: 181346 - DNA, 903 bp, Klebsiella oxytoca
atgaaaagtctcattcttttcgcgctcgcgctgatatgcggcacggcatggagtgccgccatcccgcaggcgagccgctacgatgcccgcgttcagcaggtggtttataacccgctgaacgtcaccgtcgttaatacccggcccggcttcatgaccacactggtctttgacagcgacgaggcggttctcagcgccagacccggttttgaggaggcgtgggaagccacgccggacgccaaccgggtcaatatccgcccggtggcgctcgttcagggcgcgcccggcgcggacggtaataccacgcaggtggttatcccgcccaacagccgcgactggcataccaacctgctggtcgtcaccacccgtcggctgtacaacgtcgagctgaacgtcatcaatgataaatcaccgcagcagcccgcctttcaggtgaattaccgctatccgggcgaagcacaggagaaggtcagccgtgaggcagcgaccagagcgctggagcgtgagcaaaaacagcagcagaccgatattcagcaggccctgaatgccgcacaaacaccgcgcaactgggactacctccgatattccgggcgcgacagcgcccggattgtcccggatttcgcgtatgacgatggccgctttacgttcgtgggcttctccccggcaaaatccattccctccgtcacgaaagaactgaacggccaggagcatgtggttaacagcaatgtccgcagaaaaggcaacttcactgtcctggtgattcaggaggtcacgccccgtctggtcctgcgttccggtcacgccgtggtcggcctggaaaaccgtggtttcggcagagtccaggccgctgatggcgccaccgtctccccgcaggttgagcgggtggaaaaacctgcaacccactga

SEQ ID NO: 181347 - DNA, 684 bp, Klebsiella oxytoca
atgagtgaacagaccctcattgcggattcccgcacctttgagcagcagatgattgagcgggacaaacgcgccacaaaagccgggtttatggtgggcggcgcgggcctgctcaccgccatactgtcgcttatcgccgtggtgctgatgctgcccctgaaacagacggtcgtggaactgtacaccgtggataatcataccgggcgggtggaacacgtcacccgtgtgtcaaaaacccacctgacggcggaagccgcttatcagaaggcgatgaccgccagctacgtcagactgcgtgagcgatatgtttacccctccctccaggacgattacgccacggtacaaatttacaacagcccgcaggtcaacgatgactatctggcgctgtatgccggtaaagacgcccctgacaaggtgtatcagaacggggcgcataccgtgcggatcgacatcctgtcaaaccagctcaccgggggcactgaccccgataacgtcgccaccctccgttacaaaaagactgttcgccgcctcgctgacaacagcacccgcaccgaatactgggatgtccgcctgacgttccactccgatcccggcagggagatgagcgatacgaaacgggaggttaacccgttcgggtttaccgtaaccagctggcaggcaggccgtgaaatccggggaggtgagtaa

SEQ ID NO: 181348 - DNA, 138 bp, Klebsiella oxytoca
atgaaacgcttgattgcgctggctttgctgtgcgcgctttccggctgcgcgcagtctcctcgtcctcctgcctttggcggtcagggcgtccccgtgaacacccctcagattatggcggagttaaacagtcatgagtga

SEQ ID NO: 181349 - DNA, 1065 bp, Klebsiella oxytoca
atgcccggtggtgtatttatcggtgttgaaaaacacctgataggaggagtcaccgacgccacaaagggactgatgatgtcatactcctccatgatgatagggctggcggcaacgtcagccaccctctatatcctgtggcgtggttaccagaccctggcgggtaagctgtccacgccgatggaggacgttatgtgggatctcatgaggatggcaatcatcctgtcctttgtagcaaatgtcagcggttatcttgacggtgttattgacgccatcaatggtttaaaggagggattttccggcagcgataatatctggcaattactggatagcttatgggataaagcgaagatattaggtaaaacgttacacgatatggataactcaacctatataaaagatgagggcatgaccgctcaattttatgtctggctcgggatattcgtattaatgatcgtgacagcctttgtctcaatgatcgcggaggtcacggttttactgttgagtattaccgcccctgtgtttatcttttgtctgttgtatggctttttacgccccatgtttaacaactggctgcaaaatgttttcgccgcaatattaacggttctgttttctgcgttgtcgctacgcattgtcgttaattatttaaattcgcggttagatattgcaacacagatatctgcacaatccaacattgtggagttaggcgcacaggtctgcctggccggtatctgcgcagcaatactggtttatctctccgccagactggccggcgcgctggctggggccagtgcaacggtgtccatgcaggggttggcggcggtgggtattggcgcggcggcatttggtgccgggaaactggcagcaggagcccgaaagcagacaacccgctccgtactggacacactccagggctggagagatggcagcgcgggtaaacccggcagcggtccggggtacagcgcgtcgaaagcgcgtcaatacgcgattgagcagatgatcgcccgcaacgaagcccggcgactggcacaagccagagactcggcggttcagaaattccatcgttaa

SEQ ID NO: 181350 - DNA, 228 bp, Klebsiella oxytoca
atgcgtttattaaccctttctttcctgtccttattattcgtcgtcattagcggatgcaaagaagaagccaaaacgacccagtggtacagggatcatcctgatgagctaaaagcggtgtatgagaaatgccagaagaccggcgatgcctcagaaaactgtaaaaacgccaatgaagcccattatcagattcagcagttaaatgcccccactcccgacctgaattcatag

SEQ ID NO: 181351 - DNA, 705 bp, Klebsiella oxytoca
atgaaaaggcgttttcatgtcctgattttcgcgtgcgtgatggtcagcccgctggcacatgccggtattcccgttctggtggatgctgacccactgcgtgaagccgaatggctgaaagaagcgcagcgctggatgcagactgcgcagcattatcagagccagatccaggcgtataaagatcagctggcaacggccaccggcatccgtgatattgctgactttgttgaccaggccaaaagcctgaaatccgaccttgagaagctgcgcaagccagggcaagcactcaatgatctgctgctttccagcggttcttccaggcagttcgatgccctgtacgaaaagtataaaattttcgacacctgcaatacagaacaatccgaaaattacgccagagtctgtaagcaacaggtcatcaataaggcgattcagtttgagcagactgacgagatccaggggcaggtcagccagacgctgggggaaattaacagcctctcgaaccgtattgcactttccagagacacaaaggagtctcaggaccttgccaacagtattcagctaaaatcagtaatgctgaacacgctcactgaccagtgggaaatcagcgtgaaggcagcagaaaagcgcgaaaaagtgctggagaacgagcgtattaaacagtggaatcagcaacagttaaatgcgctaactcctgatttaaacggctaa

SEQ ID NO: 181352 - DNA, 2745 bp, Klebsiella oxytoca
atggcaaagctgctcaaggcaatgaaacgcccggcggcactgtggggggtgccgatggtgcccctgctgggtgtcacgggatttaccatcatcgtcgctgtctggacttccgtcgcgttccttgccctgctcccggttgaatttctggtgatgaagtcgctcacccggaatgaacccatgcggttcagcctgattgccgtctggctcagggcaagaggaaaaccggcagcaaaccgtctgttcggcgcaaccgcctttatgcccgtggagcatgaggccgttgatatcacggagtttctcaccgccatgaaactgaatcagtgtgccacgctcagaaagtaccttccgtattcatcgcatattcatcagcatgttgttcgctctcccaatagtgacctctactgtacctgggaactgacgggcaccccgtttgactgcgagtcagaagacacgctcagcaccgaccggaaccagctgcacgggctcatccgttcattcgagggaatgccggtcaccttttatatccataacgtgcgggagccgttcacggattcgctgcaccaggcgtccggcaacccttacgccgatgaaatcagtcgtctctattatgcctcgctggcggcggatccgtttcgccgtaaccgcctgttcctgaccgtctcctaccgcccgtttgtccgtctggaaaaggccggacgcaggcgcatgaaagagggtcagaaactgaaagaacttgacggtgcgctgcgggaaatgctggacatcaaaggcgcactcgataccgcactgtcacgctacgccgcgcgtcctctcggcaccttcaccgaaggcaacgcggtcttctcctcccagttggccttttacgagtacctgctgacgcaccagtggcgcagggtgcgcgtcacccgcactcccgcgtattcggtgatggggtcggcggtgctgttcttttcggcggagtccgggcagataaaccacgccagcggcacacactatttccgggggctggaagtaaaggagttcccggaagagaccgcaacagggatgatggattcactgctgtacgccccctgcgattatgtgatcacacagtcttacacctgcatgtcacgcgaggaatccaggaaggccatcaaacgcacccgccgtctgttaatgagttcggatgatgatgcggtgtcacagcggctggatctggatgtggcgcttgacctgctgacatcggggaaaatcgcctgtggcaaacaccatttctccctcatggtgtttgcccgcacgctggacggcctggtggctgataccggtgaaatcagcaatgccctgaacaatctcggcatcaccccggttccggcagcgatttctttgtcagcggcgtatatggcgcagttgcccggtaactatcgtctgcggccacgcctgggcgaactgagcagccagaattttgtggagctggccgcgctgcacaacttctaccccggcaagcgcgataacgccccctggggagatgcgatggccctgctgcgcaccccgtcaggggatggctactacctgaacctgcataacacgctggcggacaaggatgagttcaacgagaagaacccggccagtacctgcattctcggcaccaacggttcgggtaaaaccatgctgatgaccttccttgaaaacatgcagcagaaatatggtcgtgtagacagtttttcgcccgatgcgaaaacgaagcggctgacaacggtgtatctggacaaggaccggggcgcggaaatgaacatccgggcgctgggcggccgttacttccgtatcacgcatggcgatcccacagggtggaacccgttttcgctgccgcccacgaaacgcaatatcagcttcatcagtcagttgatgaaactgctgtgcacgcggaacggcgcgaccatcacgccccgagatgaacgccgcctgaatgacgccgtactggcggtgatgagtaatgaaccacaatatcgcatctatgggatcacccgtttactggagaatttgccagagcctgccacccgggaggcacaggagaacggcctgagtattcgcctgtcgcagtgggcgcagggtggcgagtttggctgggtgtttgataacgcctcagacaccttcgatatcagccactgcgataacttcggcattgacggcacggagtttctggacgatgcgaacgtctgtgcgccgatctccttttacctgctgtaccgtatcaccacgctgctcgacggacgacggctggtcatctttatggacgagttctggaaatggcttcgggacccgatctttaaggatttcgcctataacagactgaaaaccatccgtaaactgaacgggatgctggttgtgggcacccagtcaccagcggagatcatcagggatgagattgcgcccgccgtgattgagcagtgcggaacgcagatcctggcagccaaccccagcgccgaccgttcccactatgttgacgggatgaagtttgaaccggaagtgtttgatgtggtgaaaaatctggatccgcaggctcgtcagtatgtggtggtaaaaaatcagttcaggcgcggcgacacccggcgctttgccgcacgcgtgacgctcgatctctccggtatcggcagatacacccgggtcatgagcggcagcgccgataacctcgaaatcttcgactcaatttaccaggaagggatgcagccgtatgaatggctggactcctacctggctcaggcactctga

SEQ ID NO: 181353 - DNA, 297 bp, Klebsiella oxytoca
atgatgacacgtttccacaaactaaaagcggcagcccgctctgtgtctgctggtgtactgaccgctttcactgcaaccccggcgtttgccgacggttttcagcgggcaaacacggtgatggaaaaagtctccaccggcctgcatgggatggcggccatcactatcactgtggccgtgatctgggtgggttacaagacgctctggaaaggcgaaagcctgtcccagtgcgcctacatcatcatcggcgggatcctgattggcgggggcagtgagatcggcgcgctgctgatgagctga

SEQ ID NO: 181354 - DNA, 711 bp, Klebsiella oxytoca
atgctttccaccactgcctttctggcggcggccatgcagtgcgccgccagcattcatccatccaccgcgctcgacgtagcgcgggtggaatccggttttaatccttatgccatcgccgagataattccgaaggccagaggagcctccggtgacccccctgttatctcccatctgcccgccagccgggccgatgcggagcacatcatccgccgccttatggtacaggagcgtcgttactctgtcgggctgatgcaaataaccagcaccaatttccaccattatggtgtgacggccactgacctgcttgatccctgcaccaatctgtctgtttttgaacgcatcctcagcgactgctaccgccggggcggcaccctgaaaagggcgctgagttgttattactccggcaatttccgtaccggacaacagccggaagcggctttttccgggaccagctatgtgcagcggatgggttacgtttcggcgtcttcccgttatgcggtacccggtacccgagaggacacatttccccccgaagccgccctgaaagccatccctgccgatcccccatcccgcccccgcgagatctggccgggggccgtcgtgcggggcatccccgcgaaactccgtcaggacaacaccgccatcgcacagatctccacgccgtcactgcgccggagtctctccctgtcaccccgtaaggaggaagaatga

SEQ ID NO: 181355 - DNA, 234 bp, Klebsiella oxytoca
atgagaaaacccatgtaccacgtatttgtcacccaggaaagtcaacccgatatgcagggcgaaaaaaccacatactggacccgggttggcgtggcattttcccataacagtaatcccggtctgaatattatcctgacgcccggcattgcggtctccggtaaactggtcctgcttgagccacgggaggagaacaattcaccacagagtgccgaacccggcgaaaccgcattctga

SEQ ID NO: 181356 - DNA, 585 bp, Klebsiella oxytoca
atgatcccttcactgaattatgccgtattaaccgacgccctgtatgcacttaacgaaggtaatattcatcactgcgaaaagctcggcttcacattcgctgaaatgcatgcgatcagccagttatctccggatgaactctttaccctgagtcgggccgtgatgcccttcataacagtttcagtacaccatgagatcttacagcagttactgctcttttcccgccaggaatcacatcgccagcaacggattaatcgggctatccggctgggaggttctatttcactgctgaaccattatttcggcctgacatccaatgaagtctgcctccgccgtcggttactgggtgtcagtattccttatggccggacaccggttccggatgaagataccgatgccgaaatctggcgacagtggcaaaaatatcatcaggatgatcccggttctaccgacgcgctggaaaccatgatgcagatcactgaggagttgtcatcactaactgacgtcctctcgctgactgccgtccgcaactgtatcactcagtgtgccatggaaagcacaaaaaaagggggacggtatgccggatga

SEQ ID NO: 181357 - DNA, 249 bp, Klebsiella oxytoca
atgatcccttcactgaattatgccgtattaaccgacgccctgtatgcacttaacgagaccatcatgacatctcatcagttattacgtctgaaacaggttgaagaaaaaaccggtctgaaacgttcacaaatctatctgtatatgaaagacggcacctttccccgctcagtaaaaatcggcccggccagcgtggcatggcttgaatcagaaattgatacctggattgaccttaaattagcccgtcgctga

SEQ ID NO: 181358 - DNA, 186 bp, Klebsiella oxytoca
atgacatctcatcagttattacgtctgaaacaggttgaagaaaaaaccggtctgaaacgttcacaaatctatctgtatatgaaagacggcacctttccccgctcagtaaaaatcggcccggccagcgtggcatggcttgaatcagaaattgatacctggattgaccttaaattagcccgtcgctga

SEQ ID NO: 181359 - DNA, 927 bp, Klebsiella oxytoca
atgaataggggtaatttctcctcccgggtaccgggtatggatccggaatggataaccatcagggaagcgacagaaatcgcgcataatataaaaaaaacaagaattactgacagtgatatttaccgtcatgcgttgtatggcgatattacattgtctatttactttcagtcaccagtcattttgcgcaaagtcagagtatccgaatataaagtgacactaaggccggttcaaaattcattgattcaccggctatgttttcttgaccaaagcagtttcatccgtcattcaggtctgattgtcagtaactgcgggaaatatactttcccgacaaaccggattattgacactccactgagcggtcatgaatctttgctgatacagcatttactggcccgttcactgtcactcccgttaccggaagaaaatgatgttaatcacggtatttctgtcattattgccggggaaatatttcaactattcgaaaagacgacatggagggagaggatcaataaacaaatcatgcgtcttcccgaacatattgcaccggatatttatgcccatccgtcatataagaaaatgaggcgatgttcacatcatactttttttcctctgcattaccttccggccgatgccagcttcgtcatccgctgccgtgaactggagaaactcatgaggcctgatggtggagagaacatatctcaggaaagtcctccccgtacacggatatccaccccgctttcccgcctgttctggctttcctgtcgacgtaatgacaccatcagtcccctgataaatcagccctataagctgctgtcaatttttgagcagtgggcatctgaagaaggtattaccgaccgtctgagcgctgacacactgaaaagcgcgctcgaacggggttctcccggtaagacgaatacgcacaaataa

SEQ ID NO: 181360 - DNA, 3072 bp, Klebsiella oxytoca
atgaattttgctacctggtcaataaagaatcccgttccccccatattgttattcatacttcttaccttgatgggaatctatggtttcaacaagctcaccattcaggatttacctgatatcgcctttcctgaaatagaagtatctttatctctccccggtgcagcgccctcccagctcgaaacagaagttgctcgcaaagttgaggactcaatcgccagcgtttctggcgtaaagcatataaccacattgatcacggacagcaacgtcataattacaatttcatttgttctcgaaaaagaaatttcagatgcactcatagaaacaaaagatgccattgaccgtatacaatccgaactaccaacggatcttgagtcgcccacagtctcagcagttcgcattaacaacagccctttaatgacctacgcagtttcttcctcaaaatcgaatgaggatattttgtcatggtttatggacgatacaatgggcaagctctttatgtccattaacggtgtggggaaattcagcagaatcggaggagccaatcgggaggtcagaattgaagttgatccggtcaaactgacatcgctgaatatcactgcggcagatgtttccagggccataaaacagatgcaactcgaatcgtcaagtgggcgaggctatgtcggacaatctgagcaatctgtcaggacaatagcaaccgtgttgcgcgtatcagatttaaatgccctgcctgttactcttccgggcggacgtcatattcggctggatcaagttgcgaatgtttatgatacccacgccagacgtacaaaatcagtcttattaaatggacaggaaagtattgcatttcaaatatatgcgtcaaaaggagccgatgaagtgcaaatcgcaaaagatacgttcctgaccattgagagtcttaagaaaaaatatccagacttaaccataactccgatttccagcgctgtgacaaatacgctggaacaatatgaaggctctatccgtatgttatatgagggagccatactggccattattgtggtcggattatttctccgtgactggcgggcgacacttatttcagctatggccctgcctttatccgtgatcccaactttcgggatcatgtactggcttggcttttcccttaatacactcacgcttttggccctgaccgttgtcgtaggtattctcatcgatgatgctattgtagaagttgaaaacatcgtgcgccataagcgtataggaaaatcgaccatggaggcaacaaaagaagccgtcaatgaaattgctctggctgttatcgccacaacgttgacgattgtcgtcgtgttcttgcccacgtctctcatggggggtgtgacagggcttcttttcagacaatttggctggacggtcgtcatttctgtgctcatttcgcttctggtggcacgactattaacacctctgatggccgcatattttctgagaaatgataactactgccaacataaagaagacgggatattcatgagaaaatatcttgatgtggtgcactggtgtctcgtccacaaaaagaaaacgctcgttatggctgtcctttttttctgcctgtcactttttatgatgacaaagcttccgacaggttttgtcccatcttctgatcagggatacacaaatcttagcattgaattacctccgggaagtacgctggaggatacactggagacggctgaaaccgtccgcaaatcagtagcgacgatagaaggcatcaacaatatatttacgatcgttggcactgctggggaaaacaccccaaatgacagtagcattggtgatttgcacaaaggttcattgattttgacttttttacccaagtacagccgtccttctcaagacatcattaacaaggaaatcaggagaatactgccagatatacctggagccaaattcacattgaaaaacgatgggccaggtgagggttttgctatcctgctttctggcgagaatatgacagcgttaaccagcactgtgaccgctctggaaagagagttgcgaagtctaaaaatcctgtccaatgtgaattcgaccaccagcctccagcgcccggaaatcaatatacatcctgatttctcccgcgctgccgaactgggaatcacaacagaatctattgccgatacggtacgtatagcgacttccggcgatttcaacccgtatctttccaaactgaatcttgataacaggcagatttatattcgggtaagcatggcagaagatgcactgcagaatatcgatagcattgctaatctccgtattccgacccgggctgaacagaccgttctttccaatatagcaaacattactttaggcaacggtccatcacagattgatcgttatgatcgtcaaagatatgtgacgatcagcgcagacctaggcgggactcctttaggtctggctctggcagaagcaatggctttaccatccattaaaagcatgccttccggtatcaaattgatagaaatgggtgaggctgaaatattgaaagagttgctttcaggatttggtgttgccatgctcaccggaatcctgtgtgtatttttcatcctgattcttttattcaaggacttctttcagtctgttaccattctttccgccttacctctgtctttcggcggttcaattattgcacttttgataactaatctggaaatgagtttacctgcattaattggtattgtcatgttgatgggtattgtcaccaagaactctatcctgctcgtggaatatacaatcgtcggtatgcaggagagacagatgccacttgatgatgccattattgatgcctgccataaacgtgtccgcccgataattatgacgacaattgccatgattgcaggtatgacacctatcgcgatcggcattggagatgacagtttccgccagcctatggcgatggcggtgattgggggattgataacatcgacggtcctcagtcttctgattgttcctgttatttttacctacatcaatatggctaaactctggtttacccggcaagttaaaaaacttcatatcattactaataagcagatatag

SEQ ID NO: 181361 - DNA, 1092 bp, Klebsiella oxytoca
atgaataaaaataacaaattcacaatatcaatgctttatgaatacattgcaggttttgctgttatttctcttgttttttttattgtgatgaatgactcagatgaaaagacgatgacacagataccagtagcgacagccctcactgtaaccgaagcaatagtgaccgaaacccagtggacggagatgattaaagcgactggcccgattgcagcccgacaggaagcgatcattggtgctgagatttccggacaacgactggtcactgttatggctgatgtcggtgatatcgtgaaaaaaggtcagattcttgcaaaattcaattctgaaacactccaggcagaatataccgaattgaaagccaactggatgacggcggaattaaaccaaaagcgtgcgctaagtctgaaaggttccggtgcactaagcgatcaggtcattggggattacgtcaatcgggctgcagtgacgaaagcacaaatggacgtcaaagcactgcaactaaaatatactgacatcgttgcaccggacgatggtgttatcagcacccgtaacgcaacactgggggcagtgggctccttaggtgacgaattattccgcctaatcagacaaaacagactcgaatggcgcggtgaactcacagcagagcaggctgttcgtgtcggaccgggccagtccgtaacccttatgcttccgaatggagagcaggcggaaggaataatacgtcagttggccccttcctttagtccggaaacccgcatgatgacaatttttgttgatattaaagccaacagtagcgccagagtcggaatgtatgcgaaggggcagatcacacttagccaacaaaccgggttaaccatcccggcaaagagcgtcgtcattcgggacggacgcaactatgtttttagtatccacaaccatgctgcaggtgcaactgtcagccagcgtgaagtccaggttggtcagatacgaagtgacgaatcccaaattctttctggtatatctgagggagaccgtattgttctccagggcgcgggttttttgaatgatggtgatattgtgcggtttccagtggtaaacggtggccaggaatga

SEQ ID NO: 181362 - DNA, 963 bp, Klebsiella oxytoca
atgatgtccctctgggatgcgctccggatgaatatgatgatctcatatcaggaacttgttcgcaccttccctaagactgatgcgataaacggaataccttcgcatattcatacacagttcaactataacctgaatcggaaaggtcaacctatgcgttcaatctcacttataagcctgtccctgtacgccatcttgtcctctatcgcgcatgctgaagaaatcctggataacccgggatctgcgccgggccacttgtcccagccaccggcaaacgacaaggactggatttttacgacaggtgctggtgcgatatatggccctgcatatgaaggttccgacaagtttgtggttaccccactccccgatgtttccgtcgagtataaaaacggtttattttttgcaaatatttgggacgggatcggcagttatcctctacagggtgaaaactataaggtcggtgcgtcgataggatggatgcccgggcgtgatgaaaacgacgataagaaaaacctgcgtggtatgggtgatatcgacatggaagcgatactcaacctcatgggggaatatgatatcggtcacataaaaatctccggcaaagtttcaacaggaacagagaattacggtacaacggcaactgtagaggtagggactatgttccccgttaccgggcaactcatgattatgggggcgatcggtccaacatgggccgatgctgatcatatgaatagctacttcggcatttctaccgtgcaatccgcgcgctccggatataaaagttataatccgaccgctggaattaaatcagtcgggcttactgccggtgccttttattccattacagagtactgggatgtaaagtttatgattaaggccgatcaactgcttggtgatgcggcagacagtccgattacaaaacaggattttcagccatctgtatttttgaccacaagttacatattttaa

SEQ ID NO: 181363 - DNA, 246 bp, Klebsiella oxytoca
atgatccagataattattgagaaatgcggagatagcccggtattcaaaataccagaagcaattatggaaaaagttggcttcagtatcggcgatgctattgatattgaagtcaaaaatggctgtatcattattggcccagcggaactggttaaatattcccttgaaaatcttattgagggcatttctgaggttaatcttcacaacagagttgacttcaggctgccaataggcaaagagttgctctga

SEQ ID NO: 181364 - DNA, 366 bp, Klebsiella oxytoca
atgattgatgtcttagggccggagaaacgcagacggcgtactacacaagaaaagagcgctatcgttcagcagagctttgaaccgggaatgacggtctcccttgttgcccggcaacatggtgtggcagccagccagctatttctctggcgtaagcaataccaggagggaagtcttactgctgtggctgccggagaacaggtcgttcctgcctctgaacttgctgccgccatgaagcagattaaagaactccagcgcctgctcggcaaaaaaacggtggaaaatgaactccttaaagaagccgttgaatatgggcgagcaaaaaagtggatagcgcacgcgcccttattgcccggggatggggagtaa

SEQ ID NO: 181365 - DNA, 906 bp, Klebsiella oxytoca
gtggatagcgcacgcgcccttattgcccggggatggggagtaagcttcgtcagccgttgtctccgggtgtcgcgtgcgcagttgcacgtcattctcagacgaaccgatgactggaaggacggccgccgcagccgtcacacggatgatacggatgtgcttcgccgtatacaccatgttatcggagagctgcccacatatggttatcgtcgggtatgggcgctgcttcgcagacaaacagaacttgatggtatgcctgcgatcaatgccaaacgtgtttaccggatcatgcgccagaatgcgctgttgcttgagcgaaaacccgctgtaccgccatcgaaacgggcacataccggcagagtggctgtgaaagaaagtaatcagcgatggtgctctgacgggtttgagttccgctgtgataacggagaaaaactgcgggtcacgttcgcgctggactgctgtgaccgtgaggcactgcactgggcggtcacaacgggtggcttcgacagtgaaacagtacaggacgtcatgctgggagcagtggaacgccgctttggcagcgagcttccggcgtctccagtggagtggctgacggataatggttcatgctaccgggcgaatgaaacacgtcagttcgccaggatgttgggacttgaaccgaagaacacggcagtgcggagtccggagagtaacggaagagcagagagcttcgtgaaaacgataaagcgtgactacataagtatcatgcccaaaccagacgggttaacggcagcaaagaaccttgcagaggcgttcgagcattataacgaatggcatccgcatagtgcgctgggttatcgctcgccacgggaatatctgcggcagcgggccagtaatgggttaagtgataacaggtgtctggaaatatag

SEQ ID NO: 181366 - DNA, 189 bp, Klebsiella oxytoca
atgttattagtaacagtgtcactactttccggtttaatgatttatattctcattatgtacagagcagaactcaatagttcactatctgcaaggtttgtaaaggctttgaaaaatgaagccctgtcgctggtctatcaacctatttacagaattgaagaggctttgttgaataaatcgaacttttgctga

SEQ ID NO: 181367 - DNA, 645 bp, Klebsiella oxytoca
atgttcatcagagcttatttgagagcgtcgacggaagatcagtttgcggatcgggcaaaagacatgctggagcagttcgttcaggaaagagggtataaaatagccagctactaccgggagaacatcagtggtacaaaactggaccgcccggaactgggacgactgctaatggacagtcaccataatgatattttactggtcgagcagatagaccgtctgactcgcctgagcaacagcgactggatgacgctgaaaaagcaaattgagcaacacgagttgcggattgtcagtctggatgtccccacgtcatggcaggctctgtcagataaagacccttcacaggttgacccgataacccgcgctgtcattacggctatcaacaatatgttgatcgacctgatggccgcaatgtcacataaggactggttgagtcgccgccagcgacagcaacagggaattaaacgggcccatacgttggggaaatatcggggaaaacaggccgatcatgaacgacatcagaaggttttgtattaccgacaaatcaaaaaactgagcattagggaaaccgccgtagctacaggctacagcccttcgcaggtatgcagaatacaggctctttataagaccggtgagaacaatacataa

SEQ ID NO: 181368 - DNA, 531 bp, Klebsiella oxytoca
atggaaataacacaagcagatgaaagacatatcaccgcgattcagcagatatacgcttggcatgtattacatggcacggccacttttgaaacagagccacccgatgtggcagaaatgacagccaggcagaaaaagattcatgctgccggactcccgtggtttgttgcgacagagaatggagacgttctgggttattgctacctttcactttaccgggaaagatgcgcataccggttcactctggaagattccgtatacatagcgccttcattccaggggcagggcatcggaaagttattattgtcccgtgctctggcctgggcagaggatcatggttttcgccagcttgtcgccgtagtaggtaacagtgaaaatatcgcatctcttggacttcaccgttctgcgggtttcagtcatacgggtacactcaaatccgtggggtttaagcacggccgctggcttgataccataataatgcaacgcactcttggtatcggtgatacaacgcttccggatatagcatcagactga

SEQ ID NO: 181369 - DNA, 237 bp, Klebsiella oxytoca
atgcgtatgatcaccattcccaatcagtcatcagtagcaaaagcttggcaggaatttgacgaagaaggcaggatgaagccctctgcctattacgacagaattgtggatgtaatggaagagctgattaaatttacgctacttacccgtaattgttctgggtatctggtcgaccgctacagcgagcgtaaggaaagtgctgaagctctttctgagagggttaatcagcgcagcatctag

SEQ ID NO: 181370 - DNA, 324 bp, Klebsiella oxytoca
atggatattgttaaggcggcagatgcactgaaggagctgggccacccaacgcggctcggtatcttcaaggagctggttaaattcggatatacagggttaccagtgggggagttacaaaagcggctggatatcccggcctcgacgctgagccaccacctgtctgctttgttgtcagtgggtctcatacaacaggagaggcagggacgtaccttgtactgccagccgcagtataaacaactaagccagattatcggttttctgctggatgaatgttgcatgggcagcgcagccagtgtttcaacaactacatcaacccgtgagtaa

SEQ ID NO: 181371 - DNA, 984 bp, Klebsiella oxytoca
atgtttgcgtttctcgccgttgaactgtccgctttatttttattcatcagtttactggtaggagtgttgcaaaggcatatcccgccagcacgcatcgaggctttgctgagcgctggccgcttcaggagctactttctggcagccggtctgggggcaatcactcctttttgcagttgttcaactattcctgttttgaaggggcttattcgcgcccgcgccggatttggccccatgatggtatttctttttgcatctcctttactgaatccggtcattattgccttaatgatcgcgacatttggacttaacctgacggtgatttatgcaggtgccgcgcttatggtctcacttttggcggggtggttactgcaaatactgggatttgataagtatatacgcagcgagacgcatacagccgggccttcctgcccgtcggttaaaagctgcaataccatggaaagcagtagttccggctgtggcgaaaaattctccggagacaattcatttcaggctgatattacgaccgctgaaacggggagttgctgtaaccttcgacctgactttaaaaaacaaaccagccgttacagtggattatggcgtgaaacctgggctgatttcatcggcgttttaccctacctgctgacggggatagctattgggagtgtaatttatggttacctgccagcggcgtggcttgaacggtatgcgggacaggaaaacccttttgccattccggttgcggcgattatcggcgtgcccctttatatccgggctgaagcggttattcctctggcagctgcactaatggctaaaggtgtgggtgccggaacggtactggccctaatcattggtagcgcaggcgccagccttactgaagtgatcctgttgcgtgctcttttcacattcagattgctggccgcattcgtacttgtcattattacaatggcaatagtgacgggttacaccacttatttcttcatctga

SEQ ID NO: 181372 - DNA, 498 bp, Klebsiella oxytoca
atgtttcatccttttgatattctcaccttagacaatggcgctaagctgatttttaccccttgccccggaacaaaaggcgttcccgttgctgattccttaaaaacattaaaagaagccggtgcgcaggccgttatcaccatgatgacactggctgaacttgctgaatatcaagctgatgcactcccgtctctttgtgctgaacttcatatggactggtttcaccttcccgttaaggacagttgtgcacctgaagagccgtttgaacaggcatttacccgacagaaaacgagtctgctgactttagtcaaatcaggtgtgacgatggcaatccattgccacggagggtctggccggacaggtatgatggccgccattctgatgcttgagtcaggttatgcgccagcgcaagtgaaaaaacaaatccagattatcaggccgagatcgctgacttctccggttcaggttaattatcttaataagcaatacggttacgaataa

SEQ ID NO: 181373 - DNA, 510 bp, Klebsiella oxytoca
atgatgagtaaaacatacaatgtcctgttcctgtgttccgggaattcggcacgaagcctgtttgctgaagtgctgatgaaccagctcggcgggggaaaattccgggcattcagcgccggtactcaaccggccagttcacctcacccgctgacgctcagggtgcttaacgatcagggattcagcactgaaacgctgaaaagtaaacacctgcaaacttttcagcatcctgatgctccgcgaatggatttcatatttactctgtgtgacagaatggcaggagaaggatgtccggtgttcccgggtggccccataacggctcactggggctttcgggatccggctttagcagaaggaacggatgaggataaataccacgccttcgtggatgttgaaaaacagatagccacacgcatccggctttttttgagtcttcccctggataaaatcgaccggctttcattccagaatcagttgcaggcaatggggaatgctggatctgacgctcattga

SEQ ID NO: 181374 - DNA, 429 bp, Klebsiella oxytoca
atgagcgcaattacgatttatcataacccggcctgcggtacgtcccgtaataccctcgagctgatccgcaacagtggtgtggaacccatggtcattttataccttgagacaccgccagcgcgtgctgagctggtcaggctcatcgctgatatggagatcagcgtgcgtgccctgctgcgaaaaaatgtggagccttatgagcaactgggcctggcagaggataaatggagtgacgatgagctgattgattttatgctgcagcatcccatcctgatcaatcgtcctgttgtggtcacacctgtgggtacccggctgtgccgtccgtctgaagtggtgctggatattctgccggacgcacaaaagggagcgttcagcaaagaggacggcgaacaggtgattgatgcccaggggcagcgtgtcgtgaagtaa

SEQ ID NO: 181375 - DNA, 1290 bp, Klebsiella oxytoca
atgtggctggctgcagctatttttattctgaccattgtactggtcatctggcaaccccgcggactgggaattggctggagtgcgatgctcggcgccgcacttgcactgatttcaggcgtggttcacgtcggtgatattccgaccgtctggcatatcgtctggaatgcgacggcaacattcattgcggtcattatcatcagtctgttactcgacgaatcgggtttctttgaatgggctgctctgcacgtcgcacgctggggaaacgggcgcggacgctggttgtttacctggattattttactgggtgctgcggtagcggccctgtttgccaacgacggagcggcgctgatcctgacacctatcgtaattgccatgctactcgctctgggattcagtaaaggcacaacgctggcgttcgtcatggcagcagggtttatcgcggactccgccagcctgccgctcatcgtttcgaacctggtaaacatcgtctcggcagatttctttaaactcgggttcaatgaatacgcgtcagttatggtgccggttgatatcgctgccatcattgccacactggtgatgctgcatctgtatttccgcaaggatattcctgcaacctatgaaatctcccgtctgaaagcacctgaagaagctatccgcgatctgaacaccttccggacaggctggggcgtactggctctattgctgatcgggttctttggtcttgaacctctggggatccccgtcagcgcagttgctgctgccggggcacttattctgtttcttgtcgccaaaaaaggacatgcgattaataccggaaaggtgcttcgcggagccccctggcagattgtgattttctccctgggtatgtacctggtggtctacgggctgcgtaatgccggactgactgactacctgtcagccgtacttaatcagtttgccagccaggggctgtggatggccacgctgggcacgggcttcctgaccgccttcctctcctcgatcatgaataacatgccaaccgtcctggtgggagcactgtctattgatggcagcacggcgaccggggtgattaaagaggccatgatttacgccaatgttattggcagcgatctgggacccaaaatcacccctatcggcagtctggccaccctgctgtggctacatgtactggcgcagaaagatatccggatctcctggggatattacttccgggtcggcattgtaatgaccctgcccgtgctgtttgtgacgcttgtagccctggtattacgtttatccgtttcgttgtga

SEQ ID NO: 181376 - DNA, 1767 bp, Klebsiella oxytoca
gtgaactatctgaacagtattccgaagtttctcttttttaccgggaaaggcggggtcggaaaaacctcgctttcctgcgcaacggctattcgtcttgctgatgagggaaaacgtatcctgctggtcagtaccgatccggcgtcaaatgtggggcaggttttcgggcagcagatcggtaataccctgacggtcatctctgccgtccctggactcacagcgcttgagatcgatccgcaggcggctgcacaacaatatcgtgcccgcatcgttgatccggttagaggcgttcttcccgaagaggtggtgcgcagcattgaagaacagttatccggtgcctgcacaacagaaattgctgcctttgatgagttcaccggcctgctgaccgatgacgcgttactgaatgattttgaccatgtgatttttgataccgcccctacaggacacaccattcgcctgctccagctgccgggagcctggagcagttttatcgagacaaatcctgacggtgcgtcctgccttggtccgctggccggactggaaaaacaacgggaacgctactcgcacgccttatcggtactggcagacggggaaaagacacgggtaattctggtcgcccgcgctcagcagtcaacgctggctgaagtcgcccgcacgcatgatgaactgctgcatgtcggtctgaagcaccagtacttggtgataaacgggatgatgccggccggagaagcctcacaggacaatcttgccagtgcgttgtaccagcgagaacaacatattctttccggaatgccgccggtacttaccgcactaccgactgacaagttaagcctgcagcaggaaaatctggttggagtgaaggcgcttcggcgtctgctggacaaagataacatcccatgtgtatcagctgatgcgatatcacgctctgaggtcatctctgcaccgtcccttgaaatgctggttgatgatattgccagggacggacatggtctggtgatgttgatgggcaaagggggtgtgggaaagaccactctggccgctgctgtcgccgtggcgcttgcagacaaagggtttgatgttcacctgaccacctccgatcccgcagctcaccttgaaaacaccctgaacggacaatgccataatctccaggtcagtcgtatcgatccgcatacggagacagagcgctaccgggaacatgttcttgccacgaaaggaaatgctctggacacacagggacgcgcgttactggaagaagatttacgctctccctgtacggaagaaattgccgtgttccaggcgttttcccgtgtgatcagggaagccgggaagcgttttgttgtcatggatacagccccgacgggccataccctgttgctgcttgatgcgacgggtgcctaccatcgtgaagtggccaaacggatgggagataagggacattatctgacaccaatgatgcagttgcaggatcctgagcggaccaaaattatgctcgttaccctgcctgaaactaccccagttctggaagccgccggtttacaggaggatttgcgccgggccgggattgaaccctgggcatggctcatcaataacagtctggtcgcaacagagacaacttcaccgctgttattgacgagggccgcacacgaagctactcaaatcaataaggtcaggaccgagctggcctctcgtatggcgctgatccctctgcaacaggaagcgccgacgggtattgagcaactgcaacgtctgatccgtcaggcggaaaaataa

SEQ ID NO: 181377 - DNA, 366 bp, Klebsiella oxytoca
atgaaaacactgtcagtatatgacccggcactttgctgcagttctggtgtgtgcggtacggaagttgatcagactttagtgtcattttccgcagacgtgacatggctgaaacagcagggtgtatcggtggaacgctttaatctgtcacagcaaccgatggcgtttgctgagaacccgacagttaaagcctttcttgaacgctccggcgctgaaagcctgccattgattctgctggatggcgagttcgtcctgtccgggcgctatccgacgcgccaggatctggttcgctggtttgggattgttgaggagaaagctggtagagctctggtaaaaagctgtggcggcggcaacacttcatgttgctga

SEQ ID NO: 181378 - DNA, 480 bp, Klebsiella oxytoca
atgaatatactatttttgtgtaccggtaattcctgccgctccatcctggccgaagcaacatttaatgcgctttcaccgaaagagcatcatgcattcagcgccggcagccagccaaaaggtgaagtccatccccgttccctggctcttctcagaatcaaagagatacccacggatgggtactacagtaaatcgtgggacaacctcccggtgacacctgatgtggtgatcacggtgtgcggtaatgcggctggtgaaacctgtcctgcgtatcttgctccggcagtcagggcacactggggagtggaggatcctgataaggctaccgggagtgaacaggaaatcgacgctgctttcgaaaaggcctggcaaattcttcatcaccggattgaagcttttctgtcgcttccgtcatcagtcatttccggccctgaagagcgtcttcaggctgaactgaaccggatcggtgagaccattttttaa

SEQ ID NO: 181379 - DNA, 354 bp, Klebsiella oxytoca
atgtccccaatcaccgcgcttcagcttttcaaaaatctctcggatgaaactcgcctgaaaatcgtgctgttgctgagagcgtcaggagaactctgtgtttgcgagctttgcggaacgctggaggaatcccagcccaagatatcccgccacctttccatgctacgggaaagtgggctgcttattgaccgccgtgagggtaaatggatccactatcggctttcagcgcacatgcccgcctgggcggcggcagtcattgagcaggcttatttgagccaggaagaggaaattgcgcttctggtcagacgggttgcccgtaacagttccacaaccggtggcagagcggtgtgtctttaa

SEQ ID NO: 181380 - DNA, 183 bp, Klebsiella oxytoca
atgcgtatcgaaaaagtcattagctggcttatcaggcagattccggaccgcttttttgacgttttatccggaaccgaatgcgcggaaattgatggtattgcgcatgacggtttactgcatgatactgaacacaagacagcataccctgttgcaggaagaggtttccgaaaggtggataactga

SEQ ID NO: 181381 - DNA, 543 bp, Klebsiella oxytoca
atggagcaactgaacggcacgccgccttgccttatgaaggcgtggaagaagcatgaacacgaacttctttgctggttactcagacaagtgggtaatgaggctgatgctgatgatctgatacaggaaacctttctccgggcaatacgacaacatgggaaattctgtgccatcgtgaatgccagagcctggctgtttgaggttgcccggcatctgcttattgataaaagccgccagcagcgtccatttatgcctctccacgatgatttatcattgccggataatacgcctgaaactgtcgactcactggctggttgtctgccccgcatcctggataaaatggcagagtctgatcggattatccttacgctctgtgatcttgaggggatgaaacaggctgagtttgcagaccgaaatggtctgacacttgcggcaaccaaatcgcgtttatcccgggcgagggataggctgcataggaaactttccagcaattgccagatcagactggatgagtatggtcgggtatgttgtttcactcccaagtga

SEQ ID NO: 181382 - DNA, 1002 bp, Klebsiella oxytoca
atgttccagattttcactgattttgccacctggctggtctatgaatgccttagtctgagtcctgcaaccaaactcggggaggcgatccacttttttgtcgaagacgtgagcaaaattttcgttctcttgctggtcatgatctactttgtggccatactacgggcctcgctggatattgagagggtaagaaactatcttgcaggtaagcaccgtggaatggggtatttactgggctcctgctttggcgccgttactccgttctgttcctgctcaagtatcccggtatttctggggtttacttcggctggtatccccctcgggattaccatggcctttctcatcacatccccccttatcaatgaagtcgccgtcctgcttctggtcagcctgctcggatggaagttcacgctcatttatattgctgtcggaatggctgttggtatggctggcggtgcttttcttgatcggattaaggccgaacgctggttagccgattttgccgccgatgccctcagagacgggcagcaacatcaaactgatgagatccgacaatctaccatggcaccgcatatgcctctctcaaagcgacatgcctttgctaaagaggaaactctcaccatttttaagcgtgtctggctctgggtcattctcggagtaggacttggtgcggcattgcatggatttgtgcccgacggatggatcgcgtcgcatctcggtgccggtcagtggtggactgtccctgtagctgtgctggttggcatacctctctattccaatgctaccggtgtgatccctgtgatggagagtctgatcacgaacggcctgccagtggggacaactctggctttttgcatgagcactgtggctgccagctttcctgagttcattctgctcaaacaggtgatgaagtggcaattactgtgcaccctgctgttgctgttgttgacctctttcacactggttggctggatttttaacgttgtattcccgttaattccctga

SEQ ID NO: 181383 - DNA, 231 bp, Klebsiella oxytoca
atgaagcatgtaaaagtactgggtacaggctgttccggttgtaaaacaaccatccgccttatccagcaggtggctgatgagagaggcgtcgctattcagcttgaaaaagtggagtcactgtctgaaataatgaaacacaaagtgatggcgaccccggcggttgtcgttgataacatcgttgtacatactggaggaataccatcaagagacattatcgaaagctggctctga

SEQ ID NO: 181384 - DNA, 204 bp, Klebsiella oxytoca
atgaagaaaatccttatgattgatgaagttcttgcgcttgcccggcttagccaggttgcatttgataaacccataaaatatatggatgacacggatgctgaactcatcgctcgttttaaaaaaaccatcacaccagaacttattgagcagatgtgtctcagaatacttgagcttgaagcgaagtttcagactttaaacgaataa

SEQ ID NO: 181385 - DNA, 846 bp, Klebsiella oxytoca
atgtcaggaattaatgctatggacaacaccgttattgcctgcgtggatggatcgtcatcaacacgcgccgtgtgtgagtatgcagcctggattgccgggaagcttgacgttcctcttgccctgctgcatgtgcttgaaaaaaatgaacaaccggcagtttctgaccttacgggggctatcggtattgacagccgggagcaactgacgcaggaccttgtccgaatagaaggggagcgtaaccgcctgctgatgactcagggacgcgccattcttgccggatgcgcggaactgctcagccagatcggtatcccggatgttcagcaacttcagaaacatggcgcactggatatcatcctggctgacctgaagggtattcgtatgatggtgctcggtcgccggggagcacagaacccggttggcagcaatctggagagcattatccgcctgcagaaaaagccggtaatgattgtacctgaaactttttctgtaccttcaagagtcatgtttgcgtttgatggcagtgaggaaagccggagaaacctgcgtcgactgacgctcagccctctgctgcagagcctggaatgtcatatcgtaatggttaacggcgatgctcataccctcgaagaggcaaagcgtagtctgcagtgcgctggcatcagtgcgatatcccggttagctgaaggacgctcggtaacggaggcgctttgtcgttacgccgcagacaacggcgtggatttgattgtcatgggggcatatgggcactcttccctgcgtcgttttttcatcggcagtaacacaactgcgatgctcgaacagaccagagtcccgctgttaatgctcagataa

SEQ ID NO: 181386 - DNA, 1479 bp, Klebsiella oxytoca
atgttgctgtcctcgacgcgtaaggactggctgggtaacgtccgtggtgacgtgctggctggtattgttgtcgcgctcgcactcattccagaagcgatcgccttttccattattgccggtgttgaccctcaggtggggctttactccgctttctgtatcccgctgattatggccttctttggtggtcgcccggcgatgatatcttcatcaacgggggcaatggcgctcctgatggtgaccctggtgaaggatcatggactacagtacttactggctgcctccgtactgaccggcgtattccagctgatagccggttatcttaaactcggcgggctcatgcgctacgtctcacgctccgtggtgaccggattcgttaatgcactcgcgatcctgattttcatggcgcagttacctgagctcaccaatgtgacctggcatgtttatgctatgacggcagtagggctcgccattatctacctcttcccgtatctgaataaaacaatcccctcaccccttgtctgtatcgtggtgcttacggcgattgccatatggctgcatctggacgtgcgtacggtcggggatatgggcaaactgcctgacagtctgccggtcttcctggtgccggatatcccgctgaatcttgatacgctcctgattattctcccttactccgcaggcctcgccattgtagggttactggaatcaatgatgacagccacgattgtggacgatatgacggatacccccagtgataaaaacagggaatgcaaggctcagggcatcgctaatatctgcacctcatttgtcgggggaatggcgggctgtgcaatgattggtcagtctgttatcaacgtgaaatccggcggtcggggccgtctgtccaccctcactgccggtgtggtcctgctgtgtatggtagtctttctcagggacctggtctcgcaaatccctatggccgcgcttgtcgccgtaatgatcatggtttcgattggtaccttttcatggcgttcagttaccgaccttaaaagccatcccatttctaccagcgtggtgatgctggcaacagtggtggtggtggtggccactcataatctggcattcggggtactgaccggtgtgcttatcgcttccctgaattttgccactaaagtggcgcgttttctggctgtctcttcagaactcagggaagagtcccggctctataaggtcaccgggcaggtgttctttgcctccgccgaccgctttatggcgtattttgattttcgcgaagctgcagagaaagttgtcattgatgttacgcatgcccatttctgggatatcacgtcggtcagcgcactggataaggtggttattaaattccgcagagaaggaacagacgttgagatccgcgggatgaacgaagcaacccgtactatcgttgatcgctttggtgttcacgataaacccgaagaaatcgaaaaactgatgggaggtcattaa

SEQ ID NO: 181387 - DNA, 249 bp, Klebsiella oxytoca
atgggaaagaaaatagttgttcttggcgatgctacctcgcatggaggtaaagtagtctctgtatcatctacttttgaaattgaaggtaaaaatgttgcactgctgaatgattcggtgtcctgtccggaacacggttctaaggaaggtgcgaataagcaggtcatttcttcccaagctgactcgctgattaaaatttcgcggatctgggccgatttttttcccgcaaacacatcgaatcagcctatttag

SEQ ID NO: 181388 - DNA, 207 bp, Klebsiella oxytoca
gtgcgcggtctggtaacggagatgaccgacccgggcgacgagctgcaggcctcacacccgctgcgcgacgcgaaggtggtggtggaagatatcgaggacaatccgggcttcttccgcgtgaagctgtacgcggtgccgcacttccaggtggaagggatggacgtgaacctgtctctggtcagccagatgccgaaagcgaaagcgtaa

SEQ ID NO: 181389 - DNA, 2160 bp, Klebsiella oxytoca
atgtcatcagcaaaacataaaacagcagtcaaagatcccgatgaaatcgacttagggcgtctcattggagagttaatcgaccaccgtaaattaatagtttcggtaacatcattatttacgctattagcattagtctatgcgttgtttgctactccaatttatcaagcggatgcattggttcaagttgagcaaaaacagggcaatgcgttattaaatagcttgagccaagtattgcctgatagccaaccacagtcagcttctgaaattgcattgctaagatcacgaatgattctaggtaaaacagttgatgacttaaatctacaggcaaaaattgaggaaaataatttccctgtatttggcagaggtttagctcgactgcttggttacaagtcaaataatttgaaaatatcgcgcttatatctcacaatccccggcgaagatattcctgaagttgaaattaaaattttagataataaaaagtttagtgtaacaggtgatggtattgaattaactggcactgtaggcgaacttgtcgaagcgaaaggcttgtctctgctggtatcagaaattgatgcagaaccgggaaccacgtttactgtttcttatattcctcgtcttaaagctataactaatctccaggacaatttggtgattgctgatgaaggcaaagatacaggcattttgactttatcgcttaccggggatgatcaagcacaaatcaaggatatcattgatagtataagcactaattatctggcgcagaatattgccagacaggctgcgcaagatgcaaaaagtttagaatttctgagtgagcagcttccaaaggttcgcagcgaactagatttagctgaagataaattgaatggttatcgtcagcaaaaagattcagtcgatctgtctttagaagctaaagctgtacttgaccaaatcgttaacgtcgataaccaattgaatgagttaacaatcagagaatcagaagtttcacagttgttcactaaagaacatccaacatataaggcgttgatggaaaagcgtaagattctgcaggatgagaaaaataagctgaataaacgtgtatcagcaatgccagaaacgcagcaagaagtgttacgcctgagtcgtgatgtggattcggggcgggcagtatatatgcaactcttgaacagacagcaggaattaagtattgcgaaatctagtgcgataggtaacgtccgaattatcgatactgcaataacgcaacctaagccagtaaaaccaaataaagtgttaattattttgttaggtgtggttattggtctattaatatctgtaggtttagtgcttgcacgtgtggtattacgtaaagggattgaatcaccagaacagttagaagaattgggcataagtgtctatgcaagtgtgcctgtgtcagaggaatttgcaaaacgtatagaacgctcgagcaaattaaaaaataaaaatctagatgaggcctctgtcttccttgcaattgaaaacccggcagatttagccatcgagtctattcgtgggctacgtacgagcctacactttgcgatgatggaagccagaaataatgttttaatgattacaggtgcgagtccaaatgcaggtaaaacatttatcagctcaaaccttgccgaggtgatctcacagaccggtaagaaagttcttttcattgatgccgatttacggaaagggtatacacataaattatttaacaccgataacaatagtggcttatcagacatattgtctggaaaaacaccaatcgaaattgcggttaaaaatttacctaagattggttttgattttatttcacggggcatggcaccgccaaatccagcggagttactcatgcataagcgctttggtgagcttatcgattgggcaaataatcattatgatttagttatcgtcgatactccaccgattcttgcggtaacagatgctgcagttatcggaaactatgcagggacaacgctattagttgctcgctttgaacaaaatactgccaaagaaattgaggttagtattaaacgttttgagcaaagcggtgtgaacattaaaggttgcatattgaatggtgtagttaaaaaagcaagtaactattatggatatggttataatcactacggctacacatatactgataaataa

SEQ ID NO: 181390 - DNA, 1446 bp, Klebsiella oxytoca
atgacctcatcattaaagaatactgcggttactgggctaatctggagtgcaatcgagagattttcagttcaaggtacgcagtttatcgttacaattatcttggcacggttgatatctcctgaagattttggcctcattggaatgataacagtatttattgcattgtctgatctcattattaatggcggattctctcaggcactaattcaaaagaaacaaagaacacaagatgatttttcaacagttttctattttaatgtaataatagctgtgttcatttatggtttaatatattttcttgcaccgtatgttgcaaaattttataatcaaatgccattgattgatattctgagaatccttgcgatatctgttattttgaaatcattttgcgttgttcaaaatgctattctatcgataaaattgaattttaaattaaggactaaaattaaccttataagtgcacttttaagtggcactattgcaatttatatggcctataagggattaggtgtttatgcattaatataccagaccatacttttttcacttttagtatctgtattctcttttgcattaattagatggttcccatcattaaagttttcatttgattcactgaaagtactttttaattttgggtctaaactactttttgctagcgtggttagaaccattgtagataactgctatgcaattttgattggacgtttcctctctataagggatgtaggatattatactcagggaagaaatatgcctgatgtattatcgatgaacttgtataatgttttgcagaatgtattttttccgttaatgtcagcacatcaggatgataaagagcgtttattaaaaatatataaaaaaggaattcagggcactgcatttattataataccagcgatggttggattgatgcttatagcagatccattcgttcactgcgtgttatcagataaatgggaaggggcaataattgttattcaatggattgcactatcgcgtattatcatcccaattagcgctcttaattgcagtattattaatgcagttggaaggtcagatatctatttaaaaatagacttgctcaaattaccacttacgattggtgctttgttagcaactttctcttttggcctagaagttatagttattggtaatgcaataatttctgcgatatgcttttttattaatgcttattatccgggtaaatggtttggttttggcgcttgggaacagttgaaaaaaatatcgccaattattttttgcacattatgtatggcattgccattatatttcattaaactcgataataaattactggaaatgattctcaaactatgtatgggaccgatcatatacagtgccatgtgttatctgatgaaagttgagacttttatggaaatgtgtacattgtttaagagtaaaattaaaaaggaatcagcatga

SEQ ID NO: 181391 - DNA, 690 bp, Klebsiella oxytoca
atgcatcttgaacgacacagcatcgaaaaagtgggatggcttcgggcggctgtactgggggcaaatgacggaattgtttcgacagcaagccttgtccttggtgttgcgtcagcaaacaccagttcttcgggagttttacttgctggtgttgccggactggtttctggtgcgatgtcgatggcaacgggagaatatgtttcagtctcatctcaggctgataccgaaaacgctgcacttgctcaggaaaaaagggagttggaaaccgattatgaaggtgaaatgcaggaactgacttcactttatatacaacgtggactggatcctgtgcttgcctatagggttgcagagcagctcatggcgagaaatgctctggatgctcatgcccgtgaagaacttgggctgacggatacaaactctgcacagccccttcaggctgctgtcttttctgctctgagtttttctgctggtgccgtgttacctttaatagttgcatggttatctcctccaaagcaggtttttttgtttattatcctttccacccttttttcactggtggtccttggttatatatcctctgttgcaggtaaagcacctcctgtcagggcgatcataagaattatgttctggagtacactggctatgtttttgtcgatggggattggtcattttgcagggcaggtcctgctttaa

SEQ ID NO: 181392 - DNA, 582 bp, Klebsiella oxytoca
atgaatgaaaatttacgtaatgctctccctcacaaagacacaccatttctacgtgtgcttcatatcatcttagctgtattgattttattgcagattgttagttcaaatcttaccgaaagcgatgctctcagtgactatactctcacagggttcgttacatggttccatgttatcactggattatcactgattgttcttgggttaatcatgcttgcatggatgctaacacaacgaggatttcattactattttgcttggctgactcttgattttcgaggtgtggttgaagatatcaaaatgctgatgtcattccgtctccctgaagctcatgctggtgggattgctgccttagtccaggggcttggtgtacttgcgctattgggcgttgcatcatgtggtggtttctggtttgcactcaatacaattcctggaatgtcgccagtgctgacagaaagtgtcctaaatttgcataagtttctgactgtatttattgaaacctatttctgggcgcatggttcgatggggttgctgcatatatttctcaccatccgtagccaaatgaaaaattccgttacggaatag

SEQ ID NO: 181393 - DNA, 216 bp, Klebsiella oxytoca
atgcaggatctgaaatcaacagcagagtccatcttgaacggcccggtagaggggtatgacagggaaacgtatgttgcaggtatgtcacttctgattgatgaggtaactgctgttgaaagtaccgctgaaaaggaaggtcttgacgctgggaaaattgcagcacagaaactgggcagtatgatgagaaaataccataataaacttggcgttgactga

SEQ ID NO: 181394 - DNA, 954 bp, Klebsiella oxytoca
atgcaggtaaacaaatttacggatgatattgatattagttctcatgagcgtttcatcgcggcccgtaaaagtacgtgggttagtgtgcttgttaattgttttctgacatccgggcaggtgattactggtatattttctggatctcagggacttatcgcggatggtattcattccctgtctgatttagtctcagactttgttgtactcattgcaaaccataaaagtaaaaaaaatcccgatgatgaccatcactacggtcatcatcgttatgaaaatggtgcatcattaattctggggacaattttatttattgttggcatcggcatgttatggtcagcagtaaataaaatgaaacaaccagatgatattcctcaggtacatattgttgctctgtgggtggctttagccgcactggttatcaaagagcttctttttcgctatatgcttgccgtagcaacccgagtaaaatccactatgctggtcgctaatgcctggcatgcacgctctgatgccgcttcgtctttggttgtggctattggtattattgggaacttatcaggttttaaattactcgacccagttgctgcaatggttgtcggactgattgtaaccagaatgggatattcatttatgtcagattcgcttcatgacttgatggacagatccgtggatattgaaactgaaaataaaataaaaaccacattattgtcaacgcctggagttgaaggtatccatgatctcaaaacccgtaaaatgggagatcttgttgttgttgatgttcatctggaaattaatggtaatttatcagtgaaagtagggcatgacattgctgttttagccaggaaatcagttttagataatcatcatgtattaaatgtcatgacgcatgttgaccctttttttaaggaggtaagtggccttgattatggaagtgtaaataatcataaacaataa

SEQ ID NO: 181395 - DNA, 831 bp, Klebsiella oxytoca; identical to SEQ ID NO: 119722

SEQ ID NO: 181396 - DNA, 264 bp, Klebsiella oxytoca
atgaagaagcgtttttccgacgaacagatcatcagtattctccgcgaagccgaagctggggtacccgcccgtgaactctgccgcaagcatgccatttccgatgccacgttttacacctggcgtaagaagtatggtggtatggaggtgcctgaagttaagcgcctgaagtcgcttgaggaagagaacaccagactcaagaagctgcttgccgaagccatgctggataaagaggcgcttcaggtggctcttgggcgaaagtactga

SEQ ID NO: 181397 - DNA, 1095 bp, Klebsiella oxytoca
gtgctggcgctgaactttgcctcggtggttccccgtgaggaggtggagaaatggggcgccgacttcggcaagcatccggtcggcagcggcgcgtttgagctccaggagtggaagctgggccaggagctgatcttccgcaaaaacccgaactactttaaagccggcgtgccgcggctggatcacataaagttcgaaatgggacaggatccctcggtcgctctgctgcggctggaaaaaggcgaagtggatattgccggcgacggcgtaccgcccgcacagtttctgtcgtttaaaaacaacccggcctataagggcctgatggtcaccggcgaccagttgcagaccggctacgtgacgatgaaaaccacgctgccgcctttcgataatctcaaagtccgccaggcggtgaacatggcggtcaacaaagatcgcatcgtgcgcatcattaatggacgcgcggcgccggccaaccagccactgccacccgccatgcccggttatgacaaggcatatcagggtttcagctacgacccggcaaaagcgaagcaactgctcagcgaagcgggtttccccaacggttttgctaccgaactgtacgtgatgaataccgatccgcagccgcgtatcgcccagtctatccagcaggatctggccaaagtgggcatccacgccagcatcaaatccctggcgcaggcgaatgtgattgcggcgggcggctccgccagccaagcgccgatggtctggtccggcggcatggcgtggatcgccgatttcccggatccctccaacttctatggcccgatcctcggctgcgccggggcggtagagggcggctggaactgggcgcgctactgcaacaaagcgctggacgcgcaggcggccgcggcggacagcatggtgaaacccgaccagcaggacgcgcgcattgaagcctggcgcaaaatcttcatcactgcaatggatgacgcgccctgggtgccggtattcaacgagaagcgctacaccgtacattccgcacgcatggggggcgaggacgcgctgtatgtcgatccagtgcatgtaccagtcaactacgactatatcggactgaaataa

SEQ ID NO: 181398 - DNA, 162 bp, Klebsiella oxytoca
atggcatttattcttttacttttgtggatcggagcatcgatagttattggtaaattggctcaggccagtggccgttcgttcttcatatggtttgttatcagtatgcttatagaccccatatttggcgctattctttttgctgtagtcgtgaggtcaaaatga

SEQ ID NO: 181399 - DNA, 669 bp, Klebsiella oxytoca
ttggctaataacattagtgatccttcaaatatcataaatttctttgttgcatttggaacatgcactgctgtcgctgttgcattaatagcaaaaggacaatcatcttttgaaaatactttcaatatacttttatcacagcataatgaacaattgaggagactaaaagagcatgaaaattatgaaaacaatttcagctctatatttaacctacaaaaggagtatgacttaactgaattaaatagaaacatgcatcatcttgatgacttttttggaagttatttccgagtgttataccacttattaaaacatattgataaaaaagcaggatatcatcctttcgacttcaaagaaaagaaaaggtacactagtctagttagatcgttccttgataatgaaacagctctattactttccataaactgtgcacatgcaaagcctggaaaccaatactataaatacagatgtctcatagagaggtacgcttttttagaacatttaatccttgacccagagaaattcatagattacattcgggccactagaagaagtatttcctcagcgtatactttagtactgcaagccgaagataatttccatgaaaaattaattcatgaaattaaaagaacttatcatataacagcctttgggaatcatgaagacatcaaatag

SEQ ID NO: 181400 - DNA, 1083 bp, Klebsiella oxytoca
atggagctacaaacaagactagtttttattgatacttccgcatacgaaacaaaaaaacttcagtttggccatttcgttctgggcaggctgcaagtgttggtcgaagaggaaaaaattcatctgctcattactgatatagtgcgttcagaaatcgaattacatctgaaaaagtacgcagaggcggcggtaagggagcataaaaacttccgtaaaaatggcagttttttatgccttgcggatgaggttacagggggcggtctcttcccagagataacctcagatgctgtacttaacgcggcgatacgtaaattctgcgcgttagtagataacggattaactgaaatcgtgtccgttgctgccgtgaatccgaagcagatatttgatgattatttttctggcgccgcgccgttccaccgcgaggcgaaaaagtcagagtttcctgatgccttttcactggcagctgtagatgccgtggcacgatcccgtcatcacaagctttatgttgtaagtgatgacggggatatggctgcagtcgcggaggctaacgataattttatccacctgaaaagcatcgatgctctccttgacctggttaacaggaatgatgaagagttggctgaattgtcaacatttgctgacagcgtacttgagcaattgcaaggagacgttataaggatggcatgggagcagctttatgacgctgaattcatgcctatatcttcagacgagtacgatcctgtaatatacgaaacacagatatcctctatcagcattagtgaagtgcagcttattgacgtcaataaagatgatgcaacctatgaggtcacttttaaggttgatttaacagcctcgtatgattacgaggattactcacgggcgaactgggataaagaagatcgtgtgtactatggtgttgaggtttcaaaccactcctatcgccatcaagagcagtacaccgctactcttgagataggatttatggatgggctaagggcaaatgcagagtttcaaatgctgagttttgatgacagtattttctaccttgatctggataacgcagaacacattgaaaatagcaactga

SEQ ID NO: 181401 - DNA, 180 bp, Klebsiella oxytoca
atgtccgttatttctttttcccgcctgtctctggtggcgctggccttagccggtgccggtctggccgtgcccgcggcgcaggcgcaaaccgaagcgcaggcgcacgccgcggcgaacggcggggtatcactagggaaggtgcgaataagcaggtcatttcttcccaagctgactcgctga

SEQ ID NO: 181402 - DNA, 207 bp, Klebsiella oxytoca
gtgccggcactgcatgatgcggccactcagctgattatcgtgacctcacagggctatcgtggtccgctgcagccgtttctgaaaagaagccgcgcggacatgatggcgcccctgaaatcgaacatgacgtgcctgaatattgcctgcgccggcgccctgattgacgccatgatgcaggcagacgcccggcaggcggcgaccatttaa

SEQ ID NO: 181403 - DNA, 219 bp, Klebsiella oxytoca; identical to SEQ ID NO: 83624

SEQ ID NO: 181404 - DNA, 210 bp, Klebsiella oxytoca; identical to SEQ ID NO: 21597

SEQ ID NO: 181405 - DNA, 234 bp, Klebsiella oxytoca
atgttatacatggctttatgcagttttatgatgatcctggcgctaagtgagatgttccgcacgatgacggcgatcggcaatggcagtttcgccggcaaccgcttcataccgctcgccttagttctgttaacgctggcgctggcatcacctttctttgccacattttatacgatgagccgttctgatttcatggcgacgacggcctgctacatggctgcgtgtggcaggtcttaa

SEQ ID NO: 181406 - DNA, 321 bp, Klebsiella oxytoca; identical to SEQ ID NO: 103996

SEQ ID NO: 181407 - DNA, 870 bp, Klebsiella oxytoca
atgttgaatccggtctggctgaagagcctggtagcgatcgttcaaacaggcagttttcagagcgcggcgagggcgttggggctggcccagccgacggtgtcgcagcacttgcagaagcttgaagagcaggtcggcgtaacgctggtgcagcgcagtcgtagcggctgccagcctaccacacgggcgctggccttcatgccgcatgcgaccgccttgctcgacatgcacgcccgggcgctagaagccctgcatggcaatcgtgagcgcgtcggggccagctccaacatcggcacctaccttctccagccattcgtgcgcaactatctgacgaccgcaaatgagaggggcgaggtggatctgcgcatcgccgccaacccggatgtggccgaccagctactggcgggccagctcgacgccgcgatcatggaatggtggctacctcaccccgacttcgaacaccgcctctggcgggtcgagccgctggtgcttatcgtcagccccgaccatgcgctggctgaagcagggtgcatagaacgtgatcgtctggtggacctgccgatgctgggaggtgaaccgggtagcggtaccggacggcttctgaccgaatactttggcgaactgggcgtgcctcgcagcggtatgcagctaggcagcaccgaggcagtcaaacaagcagtgagggcgggactcggcgtgtcgttggtgatggcttccgcagtacaagacgaagttcgcagtggcgcgctggtagctcttcccatcccggggcttgaaaagcgtctccaactgatctggcgcaaacctcccggaaatctgcacccgccgggatttgtgcggcacttattggaggaggcagatctagctggataa

SEQ ID NO: 181408 - DNA, 1011 bp, Klebsiella oxytoca
atgctgccgaaactcgttataactcaccgagtacacgatgagatcctgcaactgctggcgccacattgcgagctgatgaccaaccagaccgacagcacgctgacgcgcgaggaaattctgcgccgctgtcgcgatgctcaggcgatgatggcgttcatgcccgatcgggtcgatgcagactttcttcaagcctgccctgagctgcgtgtagtcggctgcgcgctcaagggcttcgacaatttcgatgtggacgcctgtactgcccgcggggtctggctgaccttcgtgcctgatctgttgacggtcccgactgccgagctggcgatcggactggcggtggggctggggcggcatctgcgggcagcagatgcgttcgtccgctctggcgagttccagggctggcaaccacagttctacggcacggggctggataacgctacggtcggcatccttggcatgggcgccatcggactggccatggctgatcgcttgcagggatggggcgcgaccctgcagtaccacgaggcgaaggctctggatacacaaaccgagcaacggctcggcctgcgccaggtggcgtgcagcgaactcttcgccagctcggacttcatcctgctggcgcttcccttgaatgccgatacccagcatctggtcaacgccgagctgcttgccctcgtacggccgggcgctctgcttgtaaacccctgtcgtggttcggtagtggatgaagccgccgtgctcgcggcgcttgagcgaggccagctcggcgggtatgcggcggatgtattcgaaatggaagactgggctcgcgcggaccggccgcggctgatcgatcctgcgctgctcgcgcatccgaatacgctgttcactccgcacatagggtcggcagtgcgcgcggtgcgcctggagattgaacgttgtgcagcgcagaacatcatccaggtattggcaggtgcgcgcccaatcaacgctgcgaaccgtctgcccaaggccgagcctgccgcatgttga

SEQ ID NO: 181409 - DNA, 828 bp, Klebsiella oxytoca
atgtctactcattacgacgtgcaggcgctgcctgcagagcaacgcgagcacatccttcgaggcttcggcctcggttggtggcgccagctggggcaggtggcgattgtattcggagtggtgctgttggcctgctggtacgtggggctgctcgatgccaccacgctgctgaacgggctgccctccatcgcgaccctggcaggcgaggccatgccgccagacttttcgggctatcgaagctggattcgccccttgatcgacaccttggcgatgagcatcgccggtacggccatcgcagtggtgttctcgctggtggtggccttcgttgcagcgcgcaatacggcgccgcacccccttgtgttcggtgttgcccgggtgctgctcaatgccctgcggtcggtgccggagctgatcatgggcatcatcttcgttgcagccgtagggttcggcgccttgccgggcgtgcttgccctgggtctgcattcggtcggcatggtcggcaagttcttcgccgaggccatcgagcacgtcgacgaagcgccggtggaagccgctcgggcggcgggggctacgccgatgcaagtgctgctgcacgcggttttgccacaggtgacgccgcagttcgccgacgtggcgatctaccgctgggaatacaactttcgcgcctccaccgtgatgggcatggttggcgccggcggtatcggcttcgaactcatgggctcgctgcgcatcatgcagtaccaggaggttgcagcaatcctgctggtcatcctggccatggtcacgctagtagacgccttcagtggcgtgctgcgcaaacgtttcaaatag

SEQ ID NO: 181410 - DNA, 864 bp, Klebsiella oxytoca
atgaaacgcttatccgcgctcttattgacttgcttgctgtccgctgtttcaagtttgtccgccctagcggccgatgccgatccggatgtgctaaaggttgccctgctgccggacgaaaacgcctccgagctgatcaagcgtaaccagccgctgaaggattatctggaagagcatctggacaagaaggtgcagctgatcgtaaccaccgactattcctcgatgattgaggcgatgcgctttggccgtatcgacctggcgtatttcggtccgctgtcctacgtcatggccaaaagcaaaagcgacatcgagcccttcgctgccatggtcatcgacggcaagccgacctatcgctcggtgattatcgccaatgtggcgtcaggcgtgaatgagtatgccgaccttaagggcaagaagatggcctatggtgaccgggcatcgacgtccagccatttgattcccaaaaccgtgcttcttgagacggccggtttgacgggtgggcaggactacgaacaatattttgtgggcacgcatgacgccgttgccgtcaacgtggcgaacggcaacgccgatgcgggtgggctgtcggaggtaattttcaatcacgtagccgaacgtggcctaatcgatccgagcaaggtgaaagtacttggttacagcggcgaatacccccagtacccctgggcgatgcgctcgaacctgagccccgagctgaaaaccaaggtgcgggatgtattcgtcggtatcgacgatcccgaagtgctgcgcaacttcaaggccgaggccttcgcgccaatcaccgacgccgactacgatgtgatccgcaaaatgggatcgctgctcggcctcgacttcgccacgatgtga

SEQ ID NO: 181411 - DNA, 828 bp, Klebsiella oxytoca
atgatgccccatccgatacaggacgccgtgctgcgggtcgaccggttgagcgtcgtctatccaggcggcgtgacagccctacgcgatacctcgattgcatttcggcgtggtgagttcaccgtgctgcttggtctctcgggcgcaggcaagtcgaccttgctccgtagtctcaatcgactcgtcacgcccactggcggcagtgtcaccagcgaactcggtgagctcggcagcggctcggccttgcgtcagcatcgtcggcgtaccgccatgatctttcagcaccaccagctaatcgaacgtcaaagcgcactggctaatgtgcttaccggtcggctggcctttcacaacacgctccgctcgctgtttcctctgccgcgtgccgatcaggagattgcgctcagttgcctcgctcgggtcggtctggcagacaaggcgctaagccgggtggacaaactgtccggtggccagcagcagcgggtaggcatcgcgcgtgcgctagcgcaacagccggcgatcattctggccgatgagccggtagccagtctcgacccggccacttcggtccgtgttctcggattgctgcgcgacatctgcaaggaagacggcatcaccgccatcgtttcgctgcatcaactcgaatatgcccgccgcttcgccgatcgcgtcgtcgggctggccgattctcagatcgttttcgatgccgcgccctcggaactcaccgatgcgcagcttgagcgcatctatgcaggccgctctacgactcagccagcgaatgctccggctgaaccacctgtcatgctcgaaccttcactggagaagtcccgatga

SEQ ID NO: 181412 - DNA, 636 bp, Klebsiella oxytoca; identical to SEQ ID NO: 104002

SEQ ID NO: 181413 - DNA, 1182 bp, Klebsiella oxytoca; identical to SEQ ID NO: 95492

SEQ ID NO: 181414 - DNA, 2544 bp, Klebsiella oxytoca
atgatgtccctctgggatgcgctccggatgaatatgatgatctcatatcaggaacttgttcgcaccttccctaacgcggtggccgatctttcgcatttcgaaaagggcgatagccaggcccccggtaaatatcacgttgatatttatctgaataagcagctggtctccacggaagacgtgaactttaaagcgacaaaaggcggccaggatgataccgggctggcgccgtgctttaccaccgggcgcctggaacagatgggggtcaataccaaagccttcccggacctggcgaagctggcgccggagcagtgcgtgccctttgccgccataccggaagctaccaccgaattcgactttgagcatcagcagctgaacatcagcgtgccgcaggcggcgctaaagcagagcgcgcgcggttatatccccccggaagagtgggatcaggggatcaacgcgctgctgctgaactatgacttcaccggcggcaacagcggcggtgatagcaaagaagacagctactatctcaacctgcaaagcggcctgaacctcggcgcctggcgcctgcgcgactactccacctggaactacaccagcggcgagggcgacacgcagaacaagtgggagcatatcagcacctacgtcgagcgcacgatcgcgccgctgaaggcggagcttacgctgggggaaagctacaccccgtcggacgttttcgacagcctcggctttcgcggcgtccagattgcctccgatgacaacatgctgccggacagcctgaaaggctttgcgccgacggtccgcggtatcgcgaagagcaacgccagggtcaccatcaagcagaacggctacgttatctaccagacctacgtctcgccgggcgccttcgccattaacgatctctacccgacctcgtcgagcggcgacctgcaggtgacggtaaaagagagcgacggtagcgaaaatacctttaccgtgccgtactccgcggtgccgctgctgcagcgcgaaggacgactgaaatacgccctgaccgccggtaaataccgcagcaccaacgatgatcaggatgaggtcaatttcgcccagggaacggcgatctatggtttgccgcatggtttcaccctttacggcggttcgcaggtcagcaacgactaccacgccttcgcgctgggcgccgggctgaacatgggggatttcggcgcgatctccgccgatatcacccaggccaacagcaccctcgccgacggcagccagcacgacggccagtcggtacgcttcctgtacgctaaggcgctgaacgatctcggcactaacttccagctgctgggctaccgctactcgacggaggggttctacaccctcgacgagacgacgtataaaaacatgagcggctataccggcgacaatgagtggaaggatgaggatcacgacggcaagcaggataagccggtgtggaccgattactacgatctctactacaccaaaaaaggcaaagcgcagctcaatatttcgcagcaggtcggcaaaatcggctcgatttttgtcaccggctccgagcagacctactggcacaccgatgagaaagatcgcatgttgcaggtgggctataacggcagctggaacggcatctcctatagcctgacgtggaactatgacaagtcgccgggggaagaggaggcggatcagatctacgcctttaatatttcgctgccgattggccagtggctctccagcaaccatagcgcggatatctaccgttcggccaataccaccaatatgagcttcggcaccaccaccgaccagcacggtaagaccaccgggaccaccggcatcaacgggacgctgctggcggataacaacctgagctataacgtgcaggagagcgacggcaaccacggcaccagcaacagcggcaacgctaacatgagctatcagggcacctacggtaacctgcaggccggctacaactacagcgacggctaccaccaggtgaactacggggtgagcggcggcgtggtggtccaccgcaacggcgtcacccttagccagccgctcggcgacaccaacattctggtgaaagcgccgggggcggccggggtcgagctggaaaatgccaccggggtgaaaaccgactggcgcggctacgcggtgatcccgtacgccaccacctatcgccagaaccgcgtggcgctgaataccaactccatggggcagaacgtcgatattgacgacgcggtcaccaacgtggtgccgacccagggggcgctggtgcgcgccgaatttaacgcccacgtcggggtgcgcgcgctgatgaccctgatgcataacggtaagccggtgccgtttggcgccacggtcagccagaaggcgggtaacagcaccatcgttggcgacgacggccaggcgtaccttgccgggctgccgctgggcggcatgctggaagtgcagtggggcgagggcactggacagcactgcgtggtgaaatatcaacttccggagagcgcgaagcagcagccggtgaataaattaagtgaaaggtgtcagtga

SEQ ID NO: 181415 - DNA, 1008 bp, Klebsiella oxytoca
atgaaattaattaaatacgggctatttgtattcttcgccgcttttctgtgggggaaaacggataaggcgatggcgagttcttgtagtttgacatcggcagtatcaaacgtgacaattaaccatccatttaattttaaagctaattccaatggtgcaaatgttacaaacgaagatgctcctgtaacattctggagcggtagttccgatgagacatacgtttgcccagcagcaagtcaatcaatgtatatttgtgggactgacgatcagtataatattggtggtcactctacttttatttcgccaggtattaccgcaggcgcagcggttaccaatggttcaccttctgtgaatacattaacttatggaggttgttggggtgtttctatttctggaggaccatatcctgccagcggtcaaatgaaggatagtctgactactctaaatggctggaataaagcactggcatttttctttatatctgactcaactcaagcaagaaacattactattactaacaagcttgttgggagaatatttctcaccactgactgggcagcagatggctcccctttaacaactgtttacgtctcaggtacgataactgttcctgcttcctgtaaacttgcatccaattcagtggtgatattaccggatacctactccggcgattacggcaaagccggtactggagcgaaagtgggaactggcaccacgcagcctatgagcattcaatgtttaggtggtagcgagtctgccaccattgacctgcatgttaccaccagcaaagtttccggtgatgatattgtgacctccaatccagacgtcggtgtaagagttttggatggtagtggtaatactgtatcagcaaataatggtgatgtatcagccaccctcagcgacggcgcagtggatgtaccatttacctatgttcccgtggccattaccgggaaaaacccgacgccaggtgattattcggcgattgaaactatcacggtgactattccttaa

SEQ ID NO: 181416 - DNA, 264 bp, Klebsiella oxytoca
atgaaaatgtattggttatgtttacctttttttctgcttagcggtgtgtccctggcagatacccagattgggacctggaatatgacgattaatggtaccgttctgccttcatcctgtgatattgatagcagcagccagacgcaaagtatcaatcttggaaccttctcagcaaataccttttccagcacgggtgatgtcagtcccgatgttcctttagggaaggtgcgaataagcaggtcatttcttcccaagctgactcgctga

SEQ ID NO: 181417 - DNA, 885 bp, Klebsiella oxytoca
gtgggtaaacggggaggcataagcgtcaatgcctgtatgcagaccagtatccctgacatctacgccgtgggggatgccgttgaaaccccagactttgtctttcaggaacccgctaattttcctctggcagggcccgccaaccgccagggacgcattgctgctgataacatgctagatcgtcacagcctttaccatggcagtcaggggacatccatttgtaaggtattttcgctgagtattggcagcgtcggtgcgaatgaaaagcagctgaaagttcatggcacccgatacgagaaggtttacgtccatgccgctgatcatgccggttactacccgggggcaacgatgatcagtctgaaactgctgttcagccccgataccggtaaaattctcggggctcaggcatcagggaaaaaaggggttgataaacgcatcgatgtcctgtctgtcgcacagcgcgcggggcttaccgtcaacgatctcgaacatcttgagctgacttatgctccaccttttaacagtgcaagggacgtcgttaaccaggctggtatggtggcgacaaatgtaatgaaaggagatacggtcatatgtcatgtcagcgatgtgttacaacgggaaccgggcagttattgtttacttgatattcgctctcctgccgaactgaaacaatttggtgaatatcctgacgcgctatccatccctcttgattccctgcgggaaaaccttggaaaattgcctaaagataaagaaatttttataggatgtcagagtggcctgcgcgggcatgtggcataccgtattctgcaggctcacggcttccggacatataatctgagtggtggtttcataacctggcagacggtaacggagtcaatgagtaaataa

SEQ ID NO: 181418 - DNA, 366 bp, Klebsiella oxytoca
atgattgatgtcttaggaccggagaaacgcagacggcgtactacacaggaaaagatcgctattgttcagcagagttttgaaccgggaatgacggtctcccttgttgcccggcaacacggtgtggcagccagccagttatttctctggcgcaagcaataccaggagggaagtcttactgctgtggccgcaggagagcaggtcgttcctgcctctgaacttgctgctgccatgaagcagattaaagaactccagcgcctgctcggcaaaaaaacgatggaaaatgaactccttaaagaagccgttgaatacgggcgtgcaaaaaagtggatagcgcacgcgcccttattgcccggggatggggagtaa

SEQ ID NO: 181419 - DNA, 906 bp, Klebsiella oxytoca
gtggatagcgcacgcgcccttattgcccggggatggggagtaagcttagtcagccgttgtctccgggtgtcgcgtgcgcagttgcacgtaattctcagacgaaccgatgactggaaagatggtcgccgcagccgtcactcagatgatacggatgtgcttctccgtatacaccatgttatcggagagctgcccacgtatggttatcgtcgggtatgggcgctgcttcgcagacaggccgaacttgatggtatgcctgcgatcaatgccaaacgtgtttaccggatcatgcgccagaatgcgctgttgcttgagcgaaaaaccgctgtaccgccatcgaaacgggcacatactggcaaagtggccgtgaaagaaagcaatcaacgatggtgctctgacgggttcgagttccgctgtgataacggagaaaaactgcgagtcacgttcgcgctggactgctgtgaccgtgaggcactgcactgggcagtcactacgggcggcttcgacagtgaaacagtacaggaggtaatgctgggagcggtggaacgccgcttcggcaacgagcttccggcgtctccagtagagtggctgacggataatggttcatgctaccgggctaatgaaacacggcagtttgcccggatgttggggcttgaaccgaagaacacggcggtgcggagtccggagagtaacggcatagcagagagcttcgtgaaaacgataaagcgtgactacatcagtatcatgcctaaaccagacgggttaacggcagcaaagaaccttgcagaggcgttcgagcattataacgaatggcatccgcatagtgcactgggttatcgctcgccacgggaatatctacggcagcaggccagtaatgggttaagtgataacaggtgtctggaaatatag

SEQ ID NO: 181420 - DNA, 426 bp, Klebsiella oxytoca
atgagcaacattaccatctatcacaacccggcctgcggcacttcacgcaacacgctggagatgatccgtaacagcggtaacgaaccgaccattatttattatctcgatacgccaccgacccgtgatgagctgattaaacttatttcagatatgggaattacggtgcgtgcattgctgcgtaagaatgttgagccttatgaacaccagggccttgatgaagagaaattcagtgatgagcagttgattgattttatgcttcaacatccgatcctgattaatcggccggtagtcgttacgccgcttggcactcgtctttgccgcccttcagaaatagtgctggatattctacctgaaggtcagaaaggagtgtttaccaaagaggacggcgaaaaggtcattgacgaaacggggaagcgggttaagtaa

SEQ ID NO: 181421 - DNA, 465 bp, Klebsiella oxytoca
gtgtatttatacgatcagaaggcgtttttttcgctgggcatgtacctggtggtctatggcctgcgcaatgccgggctcacggagtatctgtctggtgtactgaacctgctggcagaaaaggggttatgggcagcaacgttcggcaccggcttcctgaccgcgttcctgtcgtcggtgatgaacaatatgccgacggtgctgattggcgcgctgtcgattgacgggagtacggcgactggcgtcgtcaaagaggcaatgatttatgccaacgtgattggctgcgatttaggcccgaaaatcaccccgattggcagtctggcaaccctgctttggctgcatgtgcttgcccagaaaaatataacgatcacctggggttattacttccgcaccggcattatcatgactctgcccgtgctgtttgtcactctggccgcgctggcgttgcggctttccatcactttgtaa

SEQ ID NO: 181422 - DNA, 2034 bp, Klebsiella oxytoca
atgaaactcgctgcgcttgccacgttattcgtgcctgggatggcctttgccgcctggactaccaccgactttcctgcttttaccgaagaagggaccggccgattcatcagccagaaagtggttgagaagggtacacgtcccctgcagctaaattttgaccagcagtgctggcagccttccggcggcattaagctcaaccagatgctctccatggaaccctgtcgcggcacgccgccgcaatggcgcatcttccgccagggtctgtataccctggaggtggatacccgctccggcacgccgacgatgatgatttcgctggaggaaaaagaggccagcgccgcagcgccgcagatccgccagtgtccgaagtgggatggaaaacctctgaccatcgacgtcagcaaaaccttcgccgagggcagtaaggttcgcgatttttacagcggcaatgtcgcgactgtcagcggcggcaaaatcacgctgcagcccgccttcggcagcaatggtctgctgctgcttgagcgtgccgagaccgccgccccggcgccgtttgactggcacaatgccaccgtctacttcgtcctgaccgatcgcttcgtaaacggtaacccggccaacgacaacagctatggtcgtcataaagacggcatgcaggagatcggcaccttccacggcggcgacctgcagggattaaccagcaagctggattatctgcagcagatgggagttaacgccctgtggatcagctccccgctcgagcagatccacggctgggtcggcggcggcacgaagggcgatttccctcactacgcttatcacggctattacacccaggactggtcgaaactggacgccaacatggggaccgaagcggatctccgccgactggtggatgaagcgcataagcgcggaatacgtattctgttcgacgtggtgatgaaccatgccggttacgctaccctggccgacatgcaggagttccagttcggctccctgtatctgcaaggagatgagctgaaaaaaactctcggcgagcgctggacggactggaagccgggcgcgggacagacctggcacagctttaacgactatatcaacttcagcgacaaagccgggtgggagaaatggtggggtaagaagtggatccgcaccaatatcggcgattacgacaatccgggctatgacgatctcaccatgtcgctggccttactgccggacctgaaaaccgaatcgaaggaggtctcaggcctgccgaacttctacagccataaaccagacaccgcagcgaaagcgatcccgggctatacgccgcgcgactatctgacacactggctgagccagtgggtacgtgactacggcatcgatggcttccgcgtcgataccgccaaacatgtggagatggacgcctggcagcagttaaaaacccaggccaccgccgcgctggcggagtggaagaaagccaatccggataaagcgctggatgcggcgccgttctggatgactggcgaagcctggggacatggagtgatgcagagcgattattatcgccacggttttgatgcgatgatcaatttcgactaccaggaccaggcggcgaaagcggcgacctgtatggccaatattgacctcacctggcagcaaatggcggacaagctgcagagctttaacgtcctgagctacctctcctcgcacgatacgcggctgttccgcgaaggcggcaccactgcggcggagctgttgctgctggcccctggcgccgtgcagattttctatggcgacgaatcatcgcgcccgttcggccccaccggctcggacccgctgcagggtacccgctcggagatgaactggcaggatgtcaacggcaaggcggcccgcagcgttacccactggcagaagatcggccagttccgcgctcgccatccggcaatcggcatgggcaaacagacaacgctgtcgatgtcgcgtggttacgggttcgtgcgtgagagcggtgaagacaaagtgatggtcatctgggccggacagcagcagtaa

SEQ ID NO: 181423 - DNA, 813 bp, Klebsiella oxytoca
atgacattttcacttttcggcgacaaattcacccgtcattcaggcatcacccgcctgatggaagaccttaatgacggtctgcgcacgccgggcgctattatgctgggcggcggcaaccccgctcagatcccggaaatgaatgactacttccagcagctgctggccgacatgctggataatggcaaagcccttgatgcgctttgtaattatgatggtccacagggcaaaagcgagctgctggctctgctggcgaacatgctgcgcgacgagctgggctgggagatcgaaccacagaatattgcgctaactaacggcagtcagagcgcatttttctacttatttaatctgtttgcaggccgtcgggcagatggcaccacccgtaaggtactgttcccactgacgccggaatatatcggctacgccgatgccggtctggaagaggatctgttcgttgccacccggccgaacatcgaactgctgccggaaggccagtttaagtaccatgttgattttgagcatctgcaggtgacggaagagaccgggatgatctgcgtctcgcgccccaccaacccgaccggcaacgtcatcactgatgaagagctgatcaaactggatgcgctggcgaatcagcacggggtcccgctggtgattgataacgcctacggcgtaccgttcccgggcattatctttagcgacgcccgaccgctgtggaatccgaacatcgtgctgtgtatgagcctgtccaagctgggcctgccgggcagccgctgcgggattatcatcgccaacgaaaaaatcatcaccgccgtttaa

SEQ ID NO: 181424 - DNA, 321 bp, Klebsiella oxytoca
atggctattgaaattaaagaacgctataccaccgctgttatcagcacagctcacatttctaaagatgatgcagtgttattaactgaagcaagctataatccacgttctgaaagtggtcgtaactggattcacgcaaatgaatatggttacattattcggataacttgtgataatcaggaatggaaacaacatttacgtgatgatggtatatcctggcctacaatcgaaaatatcgaaaaagtacttaacgcagggttcgaatgtgttcactttgattgtgatgcagatattgtggatgaacttattgcgtgggactggtaa

SEQ ID NO: 181425 - DNA, 402 bp, Klebsiella oxytoca
atggccagagtgtctattagtgaggctgcccgactgacgggtaagagtagaacaacactgcacaggttaattaaagcaggtgacctgtccacctgtagcggtgaacgcaatgcaaaaatggtagatacttcagagcttttacgtgtctttggtccctttgaacaaccgaagggtgaacaccattctggacagggctctgaacagcgtgatacagcctctgctgaccagggtgaacaggtgattcgtcatctgaaacaggagattgaacacctgaacaccttacttttgtccaaggattcgcacattgacagcctgaaacaggccatgctccttcttgaaaatcaccaggcaaaattaactgaatccccggcgccatggtggaaattctggaaaaaatcctga

SEQ ID NO: 181426 - DNA, 2589 bp, Klebsiella oxytoca; identical to SEQ ID NO: 94630

SEQ ID NO: 181427 - DNA, 1947 bp, Klebsiella oxytoca
atggacgcagtacagaaagccaaatccggtcacccgggtgccccgatgggtatggctgacattgccgaagtcctgtggcgtgatttcctgaatcataacccgcagaacccgtcatgggccgaccgcgaccgttttgtcctgtccaacggccacggttccatgctgatttacagcctgctgcacctcaccggttatgatctgccgattgaagagctgaagaacttccgtcagctgcactctaaaacgccgggtcacccggaagtcggctacaccgcgggcgtggaaaccaccaccggtccgctggggcagggtattgcgaatgcggttggtatggccatcgcggagaaaactctggcggcgcagttcaaccgcccgggccacgacattgttgaccacttcacctacgcgttcatgggcgacggctgcatgatggaaggtatctctcacgaggtatgctccctggccggtaccctgaaactgggcaagctggtggcgttctatgacgacaacggcatctctatcgacggtcacgtggaaggctggttcaccgatgacaccgcgaagcgttttgaagcctacggctggcacgtggtgcgcggcgttgacggtcacgatgctgactcgattaaacgcgcggtagaagaagcgcgtgcggttaccgacaaaccgtccctgctgatgtgcaaaaccatcatcggtttcggttcgccgaacaaagccggtacccacgactcccacggcgcgccgctgggcgacgcggaaatcgcgctgacccgcgaagcgctcggctggaaacacccggcgtttgaaatcccgtctgaaatctatgcccagtgggatgcgaaagaagccggccaggcgaaagagtccgcgtggaacgagaaattcgctgcctacgccagagccttcccgcaggaagccgccgagtttacccgccgtatgaaaggcgagatgccggctgatttcgacgcgaaagcgaacgaattcatcgcgaagctgcaggctaacccggcgaaaatcgccagccgtaaagcgtcccagaacgccattgaagccttcggcccgctgctgcctgagttcctcggcggctccgctgacctggcgccaagtaacctgaccctgtggtccggctctaaggccatcaacgaagacgctgccggtaactatatccactacggcgtgcgtgaattcggtatgaccgcgattgccaacggcatcgccctgcacggcggtttcctgccgtacacctccaccttcctgatgttcgtcgagtacgcgcgtaacgcggtacgtatggcggcgctgatgaagcagcgtcaggtgatggtctacacccacgactccatcggtctgggcgaagacggcccgacgcaccagccggttgagcaggtggcttccctgcgcgtcacgccgaacatgtccacatggcgtccgtgcgaccaggtggaatccgccatcgcgtggaaatacggcgtggagcgtcaggacggcccgaccgcgctgatcctctcccgtcagaacctggcgcagcaggagcgtaccgaagagcagctggcgaacgtcgtccgcggcggctacgtgctgaaagactgcgcgggacagccggagctgatcttcatcgccaccggttctgaagtggagctggcggttgccgcttacgaaaaactgactgccgaaggcgtgaaggcgcgcgtggtttccatgccgtccaccgacgcgttcgacaagcaggatgccgcttaccgtgaagccgtgctgccgaaagccgtctctgcgcgcgtggccatcgaagcgggtatcgccgactactggttcaaatacgtgggcctgaatggcgcgatcgttggcatgaccaccttcggtgagtctgcgccggcggagcagttgtttgaagagtttggcttcaccgtggacaacgtggtcgcgaaagcgaaagcgctgctgtag

SEQ ID NO: 181428 - DNA, 255 bp, Klebsiella oxytoca; identical to SEQ ID NO: 83001

SEQ ID NO: 181429 - DNA, 861 bp, Klebsiella oxytoca
atgagaaaagaaatatataatgaggataaatacaagagccaaatacaaaaatatgctctatgctgtgatgattttaatgatggtgtatacaggaaaccgagagagaaagctaccttaaagaaatatataggatataacaataaatattttataaatggttttgtttttgatgtggatcatgaatatggggcaattgcgtgggatatggctggactgcctaaaccaaatgcgatcatacaaaatacaataaatggtcatgctcatttactttatgctctaaaaataccagtattaaaaacaaactctgcaaaaataaaaccactaagattagcttctgttgtgcagtgtggatttacagaaagattaaaagcagataaatcttacgctgatattctaatgaaaaaccctcttaacatctttgaatggagaaccacgtggacagatattaaagcgtatgatctatactatttagctgatttcgttcctgatgtaattagaaagaatgatagcaacaaaagaaatatatatggattggggcgcaatgttaatttattcgaagatctaagagtaattgcatataaaaatatactaaaatatcaagagagtaaaaatgagcatgaattttataattatttgtatttaacggctgatataattaacaaaaggagcaactctaacaacccattatcacataatgaaattaggcaaatttgccaaagcgtttgtaagtggacgtggaaaaatttctcaaaaaaacagttttcaattattcaatctaaacgagggatgaataatgttggaaaaataaaaaatactgataccaaagaaaaattagaaaaagcattgaggatattattatga

SEQ ID NO: 181430 - DNA, 1023 bp, Klebsiella oxytoca
atgactatcacgactgtcggtatcgatcttgctaaaaatgtgtttgctgttcacggtgttgatcaaaatggtagaactgttctggttaagcctaaagtatcgcgtgctgcacttcctgagttaattgcaagtttgcctccctgtgttatcgggatggaagcatgctccggggctcactactgggcaagattgtttcggcagtatggtcatgagccacgtctgatggctgctaagtttgtatcgccttatcgtatggccggaaaatcaggaaaaaatgatgcagctgatgctcaggctatctgtgaagctgttcgtcgtccgcatatgcggttcgtaccagtgaaagacgaaagccagcaggccatgcagtgtttacatcgtacccgtcagggttttatcgaagagaaaacagcaacgtataatcgtctgcgaggattgatatctgaattcggtgtcatcgcgccacaaagtgctgatgccctgcgccacatggtttctgtgcagaagagctctttaccgcttcaggttcagcaatgtgttgatgatttgatggaacacgttgatcgcattgaagctaacatcactgaatatgaccgaattttgtcccacatagccaaaacagatcatcgcagtcagcggctgatggagctaaagggcgttggtcccacaacggcctgtgcactggtcgccagtatcggtaatgcacatgattttaaaaatggacgtcaactggcagcctggctggggctgacgccatcacaatacagcagcgggggaaagtcgaaactcggcaggatcacaaaagccggtgattcgtatctgcgaacgcttctggttcagggggctcgttcagtgcttattggcgcagggaaaaggactgactcattcagccgttgggtttgtatgttggttgagcgcagagggtactggcgggctgttgtggccatcgccgccaaaaatgcgcggctgtgttgggcatcactacattacggtgatgatttccggctgtactcagtcaactaa

SEQ ID NO: 181431 - DNA, 855 bp, Klebsiella oxytoca; identical to SEQ ID NO: 180797

SEQ ID NO: 181432 - DNA, 699 bp, Klebsiella oxytoca
atgtctctgattgtgtatttagtcgcagcgaaaaagtggctaattaaaatagtgagttttggtttaacccttgtcgtactatttttatcattcaaatatagcctcgcgcgcgtaattgtcatttgcgcgggggcggtaattgtatgtggatatttcttcacatctatgtcgctaataaaaaaatattttctatttttaatgacattattgatatgtagtagcgcaatattttttgtttcacctgactcactcgatttatcgaaatatagattatctaatgttgcaagcactgatatgaactcggtgtcatcaggtcgtgtatcacactggatagatgcagttacattatatgtagaaagtccctttaatattatatttggtgttgggcatcgcatgtcagtacgttttcttgggcatgcagtagaaaacttttttattcaaaaccttcttgattacggtattgtgggaactattctttttatcatgtttttatgggttctgcttaagcctattataaaggattcaagagcaaaaaatggtatttcagttgctattttactagtctttactggtattttcctgcaatggcaatttaacgatatcaacacctactatcaaacatatccagctacattatttttcctgagttggtggagccaaatttgtcgtaaacggaatgctatggacaagaatagttga

SEQ ID NO: 181433 - DNA, 705 bp, Klebsiella oxytoca; identical to SEQ ID NO: 8686

SEQ ID NO: 181434 - DNA, 435 bp, Klebsiella oxytoca; identical to SEQ ID NO: 180801

SEQ ID NO: 181435 - DNA, 312 bp, Klebsiella oxytoca; identical to SEQ ID NO: 180938

SEQ ID NO: 181436 - DNA, 636 bp, Klebsiella oxytoca
atgcgcaccaatatagaagtagcaagattatgcggctttgatcagaactcagttaaccatcccgggattctgctctggcccattcagcgcagttttttactttggatgaagttaacctatgttgtcgaccggcacctgacaacgcagatggccgcgcagcgcctgggtatctccgctggtcagtgccggcgtcttctgtcgcgttaccgtgaatctggcccgccaggtatggctaaccgccgtcgaggaaaccccagcaataaccagctgcctgatggttttgcacagtatgcgctcaatataatccgagatcgctataccgactttgggccgacgcttgcatatgtgaaactcgcagaactgcacgatgttcacctgtccaaagagaccgtccgttcactcatggtcaaagccggtctccggatcccccgcaaacaacgtgcgccgaaaattcagcagccacgctatcgccgggcctgctgcggcgaactgatgcagattgatggctgcaagcaaccatcgctggttcgagaaccgtgcacccgcctgtaccgcactggtctacgtcgacgacgcgacgagccacctgatgcagcttcgatttgtaaaaccggaatcgacattcacctattttga

SEQ ID NO: 181437 - DNA, 228 bp, Klebsiella oxytoca
atgcttgaacttcgccctaattgtgaatgctgtgataacgatctgccgccagaatcaacaagcgcgtacatctgttcattcgaatgcaccttttgcgttgactgcgtgactcagcagctgcaaggccattgcccgaactgtgggggagagctggtgcgccgcccaatacgccccgaatcagccctcctttggcatcccgcctccagcctgcgccgatataaacaataa

SEQ ID NO: 181438 - DNA, 213 bp, Klebsiella oxytoca; identical to SEQ ID NO: 106534

SEQ ID NO: 181439 - DNA, 1059 bp, Klebsiella oxytoca
atgactatttctacctctggttttaaggttaattatttcactggcgcgtacaaagagcggttcggggataatttcctactccaagcgttggatattttcaaagaaaagacaagcccactgcctaaactggaactcgacgagcttcacgaaaatatgcaggccgtttcttccagtgtgaaccgttacagcacggaagtttcagtgacagatcgccccctcgcaaaaaatcgcctgattgaaatcccccattttgtaacagttgggaatgtgagcgcagccgatttccagtcacgtcgccgggcctctacccagcgtcagactctgcgcgatgagttaatctctgatgaggggattcgccagtatctgaaattccgagccaccaaagaagagtatcttgctcgcgcattattcaccggacaggttctgtcaccgtatacacaagatcgtcctgtgctggattttgaagatgaattcgggcagctaaatgcaactgcaaccgtggacgcgaccaaatcaggtgatggcccgttagaagatctggacaccgcagcaaacgcaatgagttttgctctaggtggttggatgtcgtctatgcgtggcgtggtggttctgtgttcaccggaagcgtacaaggcgattaaattccatccctctatgctgacactggttaatcatggcgtgttgccagatagcaacctcttcaatgcgagcgttaaggccagccttcctgcattccaagcaatgaccatcgatggtctgacattcgtcaatagtggtttgctataccgcgagtttatccccgcagggcaggcgttcatggttcctctattcggtgcaaacaatgttgttggtagtgacctgcaaccattcgaggtttaccacgggccagcctcacgagatgcacgtctagcggcagaggaagcagagagccaattcttccagtattcatgggaggaccaccttcacaacaccacgatccagtcagaatatggcctgctgccgatctgctacaaccagtcaatgattacccgtttaacggtgaatacgtcagaaggctaa

SEQ ID NO: 181440 - DNA, 336 bp, Klebsiella oxytoca; identical to SEQ ID NO: 106536

SEQ ID NO: 181441 - DNA, 2166 bp, Klebsiella oxytoca
atgtctaacggcaacattattgtaacttctacagttaacaaggttacttgggtagttgatgagtcaagttacaaacgggcgctcaagcggattaaatccctaaagagcgctcacgagaagcctgctaaagcgctggaggctgcacagaaacgcgcctcgcagagtgaaggcaaagcagcattagccgcagcgaaagcccagacagcgaagctacgccaggccaaacagatcagcgctgaacagcagaaacaagcacaactttcagccaaggttgcccaacaagagcaggcccacgctaaaaagatggctgctattaacgctcgtggtgcagtccagcaaatcaatcaggccgatcaactggcgaaacagaatgagcgccttgcccgtattagcgcgaaggtcagagcggcggcacggtcaagatcgatgacctataacccagatatgggtggcacagctcccgaaccaggattattagcagcgcaaacagcagcaatgaatcgcggccatgcttctatcactaacgatattatccagacgaaaaaggcgatcgccctggaagagaagcgccagcgtgagaaagaagccagcctcaagcgccagagcactgcatacgatactctgcgccgggctagcttgacgatcagccatatcgaaggtgccagcctggctgacaaaatgaaagcggtgcaggcaatcaaagaggctaccaagggatactccgagcagcgttataccattgcagagatgagacacgagctagcgaaagcgactctggaaaccagacgccaggcacgattaaaccgccagattgttaaggataaagcgaaagctgagcgtgctggtcgcattaatgccgaacgtttgacccgtgagcgcaaagagcgcggttatggtggactgacgacggcaggcgttattgcaggtggttccctgattggctcaatgggtgttgctcgtgttggtcagaccctacaagggagcctcgaacgttcacgcgatgtgaaaaagctgcaacagtatggaatctcacaattggagtttaccgcacttcaggatctggctatgagccgcgttggttactcactgagtgctgataaattaagcgatctaaataaagatacactcgaaaagtctggggaattgctgaataccggttcctttaaacgcaactctaaaacaggtgctgtaacgttctctgggggcggtgagtttgcggatatagtgaaccttacgttgcaatccaccaacggcaatcagaaggtagcccagaaagtgatcgatgaactccaaaagctggattttccgacctttatcacttacttgaaacagttgcagaaaactttcaaatggacggacaaccagacccggcacctggctgaggctgtgaatgatggttcggtcttcctcgaagtgttcaatgatgaggggcagggcttgataaatcgtatgcagaaactttctgctgaaggatggaccctatctgatgcacagcaggccaaccttgataagctagcggcattaggtgctgagtataatcgagtgcaaaccagccttgcggatcacttctctgcatcatttgttcagggtcttggagaatacgccaccaatacggatacactccgtcagtcaatgacaggattaatcccgatagctgacaacctgggccaatcgctaggtgaactcacgactaacgttatcgcgtgggcctcgcaaattggtggagaactccagaaaggtgcgacattaccgagcgctatctataacaccactgttgatgaaggcagcaatgccgcagcgcagtggattaaagataagacaggttttgatcctcgtgtcatcggtcagacgcttaagcagatttacccgtggctggatagttctgcacagaacaatatcggcagtggacaggcctggacaaatccggggttaacccgtggggttgcaggattcagtcaaccacaactcaccttcactccgcctgagccattcggttctactggatggagaccagacaactccaggtttaatctgactggtgaggcgacggttaaagtcgaggttgagcagactctgaatgctggcgttttagatggtcttattgatacaaagatcaacgataacaacgtcagacagcagaatatgatactgggtatagctgattaa

SEQ ID NO: 181442 - DNA, 345 bp, Klebsiella oxytoca; identical to SEQ ID NO: 106538

SEQ ID NO: 181443 - DNA, 495 bp, Klebsiella oxytoca; identical to SEQ ID NO: 106539

SEQ ID NO: 181444 - DNA, 834 bp, Klebsiella oxytoca; identical to SEQ ID NO: 106540

SEQ ID NO: 181445 - DNA, 177 bp, Klebsiella oxytoca; identical to SEQ ID NO: 106541

SEQ ID NO: 181446 - DNA, 444 bp, Klebsiella oxytoca; identical to SEQ ID NO: 106542

SEQ ID NO: 181447 - DNA, 561 bp, Klebsiella oxytoca; identical to SEQ ID NO: 106543

SEQ ID NO: 181448 - DNA, 243 bp, Klebsiella oxytoca
atgtttacaatggcattgattattaaggataatcccatgaagaaaattatactttgtgtgctggccctgctgccgctggcgggtcatgcaggaaaaatcaccatgagcaaccccgacgaacaagagttacagggcgggaaaaggctttgcacttacgaaaacagcatctacctatttacctacgtcactaaaggagagtgtaaatatacgaaaacgttcgacacctcgggcaacgaaaagtaa

SEQ ID NO: 181449 - DNA, 1617 bp, Klebsiella oxytoca; identical to SEQ ID NO: 106545

SEQ ID NO: 181450 - DNA, 1356 bp, Klebsiella oxytoca
atgggccacagaaccatacgtcacaccatcacacgcaacgggatttattacgtccgtttccgcctgcccggtaataaatatttccgcaagtcgctggagactgacagccacacccaggcgcagttgcttatgtcctttgcgtctcctgtaattcctctggttcaacggggaaccatccaaccgggtcacttcggtaagcgtctttctgaatatggcaatagcctgaagcagcagaatgaacaatggctggcgcaccaatttctgaatgatgagcagtgcaatattcagccgatagttgctcaggaataccgcgaggttgtcactccttcgggagatgaggaagaacaaacggaagcacaaccaaaggaagtgctaacgctggctggtgcctggaatatgtacaaaaaagagaaggcccagaactggacgaaggcaatctcgcaggccaatgagcgctttatggaggtcctgttgattgtcttgggcacatctaaagatgtgacgacgatcaccaaacaggacattaagcaggtgatggaagttgtagaaaacctgcctaagcgtgttgtgcagccttatcggtcgatgacggttcagcaattaatcgagtgtgatgatgtcccgcccgaagatttggttggcgctgagtctatccacaagcatttgaagatttacaaatcgttattcaaaacctttctgactgacagtaaagatatcctggagaagtctccgactgatggagtggttgccgcaccgtcaaaagcaaggtttggagcatacagtgcagcagaaatgagaaagtttgtgggctgggcgctcaagcaacctgacggatggcagaagtggatcaccctgttgttggcgtatacgggagccagaagaggggagatcgccaagctggagaaatcacagatcaaatttgatgaggatagccagcggtactatctcctgatcgcggaaggggggcagggcaaaactgagaacgctacacggcaggtagtaatccattccaaactgatcgagtggggctttcttgatttcgttaatcgtcagtggaaagagaaaatcttctcgcccgtgtctggcaaaaatatgccgaagatcggcaaagtgttagctgacgttcgcgaccagcttggtattccataccttgatgattacggacagcgccgcttggtgcatagtttcaggcacacaatgatctcagcctgtttagctggctgggttagtaacttggcacacctgcaacaggtggtaggtcatgagaagagcgggtcggggattactcggcgataccttcacacgttcccgctgtccacggtttgctatgtaatagacgggttggattgggaatga

SEQ ID NO: 181451 - DNA, 1446 bp, Klebsiella oxytoca
atggcaattcctgtttatctttggctgaaagacgacggcggtgcggacattaaaggatctgtggacgttcaggatcgcgagggcagcatcgaagtttttccctgtctccctcacatttctacgcttaatcatcgggcaacaacactagggttaactcctgctggaacgcatatgaaagatcagaccctgcgctattttgatgcagaaatgcgctacctgcgtgaagccgcaaaagagttcgcgcaaacccatcccgatcgtgcagcgatgctcgacctggataaagctggtacaccggatccgtatgtcgaacgcctgtttgaaggctttgctttctcgatgggacggctgcgcgaaaagattgacgacgacctgccggaactcaccgaagggctggtcagtatgctctggccgcattacctgcgtaccattccgtcgctttcggtggtggcacttaccccagcgctgcatgccatgaaaatggccgaagtcgtgcccgcggggttggaggtgtactcccgcccggtggggccgaagaacacggtctgtcgttaccgtacgacccaggatgtaatgctcaatcccctgagtgtctcagcggtcaccatgaccaccgaacctgacggacgttcgctgttgcggatgcgcatggcctgcagtagtcaggcggactggtcgcatgccgacctcagccgcctgagcctctatctcggcgcagatgcacccgtcagcagtcagctgcacctgatgctcacgaaacgacaggctgccctgtatatgcgtctgcccgggcagaccgatcgtatccggcttgacgggtacttctcgccgggaggattttcggaggaagacgggctgtggccgaagggggataccgccttcagcggctaccagttgttgctggagtacttcaccttccgcgacaagtttatgtttgtccactttaatggcctggacggcatcacgccgcctgccgggacagagtacttcgacattgaagtggtattcagcacgccgtggccgtctgatctgccggtctacccgcctgcggaagaccgattccactggcgggtgctgagccacctgggctccggattcctgaatatgctgagtaccgctgaagtgctgcgcgggacgcttgcgctctataactggcaggaagatgaactgaacacccggcgtctggaggctattcagcatgtggagcatcaccgccttcagcgctttgagcagggctacctgctacggggcctggatatcgaagtgaccctcgacagcaatggttttaccggtgagggcgatattcatctgtttggtgaaatgcttaaccggttttttgcgttgtatgtcgatatgaaccagttcaaccagcttaccctcatcgttcagccagaaggaaaatgcatccggtggaaagagaatcacagtccgcgcctgccaggctga

SEQ ID NO: 181452 - DNA, 1725 bp, Klebsiella oxytoca
atgcgggatgcgtaccgaagtctgttaactgtcctgggtgccgtactggcgctgtggctcattctgggattctggccactgtccacgggcagccgtgtggcactcagcctgctggtcgttctggtctccggggtgatgttctggcgtcagcgccgggcttcgcaggcacgtgcgaccgctatccgggaaatagtggatgaaaacctgccgccggaagattttcagggggcggtgatcctcgtctgcggcgacaacagcccgctgtttgtgtccggctcctgtcaccgggaaacccggcagggctggtatctgtgggtaaaggatgcggaacagctgccactcctggcacagcatctgagcctggtgcgtccggctctggtgtcgcaaatctccgtcatgctggcggtggtacctgagcagcataccttcggggatgattttacccagtccctgaggggctggcagcgtgctgttgtccggtgccgtgcggcatttggcactatccccccgctgtggaccgtgacctgggtatctcctcctgtggtctgtgcggaggctgagcccgtctggtttaccacggtaagcccgcgaagcggtattcaggtgtatcagtccggtcagggcaatgtgtcactgacggattggacccaggaaatcggaacggacgggcgtctttcgcgtctgagccatggcctgtggctggacagtctgcttgcctggcaaaacagcgcggtgaatgacctgctgtcggtacggcgaggggagttaccggtgatgacgccctgcgtgcagggtatgtgcatggtgccggtgagtggtatcgcaggcaatctctggcaacagcacatcacttcgatgacggcgctgccaccggatgccgttgtgagcacagagccactgccgctgcctgaactgctgctgccggcgttgccgcgccgacgtggcgtgagccgcaggatggtgttctggcgttatgccggattactgggcgggatttttctcgcgctggctatgctggcgtcctggatgaacaaccagcgcctcattcgtaatgttagcgatcaccttgcgttatatcaccagctgaaggggcagcctgttgccccgaaacttcgtgcgcagcagcgcctgcgggccgatggcgcattgctggacgactggcaacgtcgcggggagccactgcgttatcgcctgggtctgtatcagggactgcgactgattccgcccgttgaggccgcagtcagtgactgggcacctccgccaccgccgcctccggtcattaagaaaatcattcagggtccgaaaacccttcgtctcgacagcatgtcgctgttcgacaccggaaaatgggcgctgaaacctggctcgacaaagctgctggtgaactctctggtggggattaaggcgaagcccggctggctgattgtggtggcgggccataccgacagcacgggggatgaccagtctaaccaggtgctctccctgaaacgtgcggagtccgtgcgcgactggatgcgcgacaccggcgacgtgccggaaagctgttttgcagtgcagggctatggcgaaagccgtcctgtcgcaaccaacgacactccggaagggcgtacgctcaaccgccgtgtcgaaatcagtctggtaccgcaggccaatgcctgtcagatacccggcaaatacccggcgtcatcgcaggatgatggcgcatcacaacacaatggagagtaa

SEQ ID NO: 181453 - DNA, 654 bp, Klebsiella oxytoca
atgaatacatcagaaatgagtcaaattgagcgtattttctacccgggctggctgatggccagccagctgcggggcggacaggaggtccgtgacggggaagggctctatcgtcgggcctgccgtctggtgcaggaggcgaaggctgcgctcacagaagccggttacagcgacatcagccgtgaccatatggtgtatgccctgtgtgcactgcttgatgagagcgtgatgaaccggggtacaaccgatgatggctatctgacctggcaccgtgacccgctacaggcacacttctttggtaccctcaatgccggtgaggagctgtgggaaaggatccgagatctgctgaaagatactacccctgacgccgccgtcctgacctgtatgtaccggaccctgcagctggggtttgtgggtcagtatcgcgcccaggatgatgagcgtcgggaagatactgttcgcgcgcttgcagaacgggtgccggccttcacgctggcacaggacgccccgattgtggcccgggcatcacgcctgcgcagcggtcgtcgcgggtactggctgacctgggttgtggccgttgtcgccctggccgcgctctggttcttcctctcgtcttcgcttaccgggctggtaagccagaccgtcaggccggggtaa

SEQ ID NO: 181454 - DNA, 1338 bp, Klebsiella oxytoca
atgaaaatttaccgcccactttgggaggatggggccgctctggccccgcaacaattccagcagcaggcccgctggagtgaatacgttgccgacatggtcgcccggatggggttttctcatccctggggcgtggttgcggcagaatttgatgatgctgcactggcgctcgcgcgcctgaatgccatccgtctggtcgtacgtttccaggatggcacgatggttgatacggatctggcggataatattccgccggtctgtgatttgtatgccgcaaacggctctgaggctgttgaggtggttgccgcattgccgctgctgagcgccagtggtggcaaccttgataacggacaagacagcgagcgcccgcgtcgctggaaagctgagcgtgtggtggtgcaggaactggccggccatgaaagcggggaactcgcgatcttgcgtcatgcgctgaccctgcgtctgtccagccaggaaaacacggcatacctgacctgtccggtcgctcgtctggtgcgtaatgcgcaggggcagtggagccgggacccgtcctttatcccgccaatgctgtctgttgctgccagtccgtggcttgccaccgaactgggtgacctgctggtccgtctgcaggcccgccgccgtcgcctgatggccatgcgtcgtgagagcaatgagcggatggcagactttgcggtcgcggatgtctccctgttctggctgcttaatgccctgaacagcgccgagccggtgctgacggaactgctgcagacaccggatcgtcatccggaactgttgtaccgcgaattgtcccgtctggccggcagcctgctcaccttctctctggaacacgacgccggcgatcttcctgcttaccagcacgatgcaccggaacgggtatttccgccgctgctggcactgctcgataagctgctggaagcgagcctgccgtcacgggtggtgagtatccacctggagcaccaggaccagatctggaaaggtgccctgcacgatgcgcgcctgcgcgaaggggcggacttctacctttccgtacgctcctccatgccgaattatgaacttcagacgaaattcccgcagctgtgtaaagcgggcagctttgatgatgtttcggatgtggtgaatgtggccctgagcgggatggttatcaagccgctgacccatgtgccggccgctatcccgttacgtcttgagaaccagtatttctcgctggatctgagtagtgaggcggcgcgggcgatgctggaagcgggaagttgcaccttctataccccgcgctcactgggggatgtgaaacttgaactctttgcggtgctgcgcacatga

SEQ ID NO: 181455 - DNA, 1545 bp, Klebsiella oxytoca
atgtcagtcaataatgaatcccagaattatacaggcggtgcgacaattgaaaagacgctgccacagaatggtgtttatgcttccctgttcaataaaattaatttaacaccggttgctgaaattggtgacctgaatggttttgaagataataccgtgatggcggaaacatctgctgatgcgcgcgttactgccgccgttcaggtcttcatgcagtgcctacagaagtctggccagaaagttgagaaactcgataaaacattactggatcaccacatcgcagaactggatttccagattagccgccagcttgataaagtgatgcacagcgatgaattccagaagacagaatccgtctggcgcggcctgaaatcgctggttgataagactgattttcgtcagaacgtaaaaatcgagattcttgacctgtccaaagatgaactgcgtcaggatttcgaggactcgccggaaattatccagagtggcctgtaccgccagacatacacgatggaatacgacacgccgggtggcgagccgattgctgcggtgatttcagcgtacgagtttgatgcgtccgcgcaggacgtggcgctgatgcgcaatatttcaaaagtgtctgcggcagcccacatgccgttcattggctctgcaggcccggcgttctttttaaaagagaacatggagcaggttgccgctatcaaggacatcggtaattacttcgaccgcgccgagtacatcaaatggaaatccttccgcgagacggacgattcccgctatctcggtctggtgatgccgcgcgtgctgggacgcctgccgtatggcccggataccgtaccggtgcgcagtttcaactacgttgaagaagtgaaaggcccggatcacgataaatacctgtggaccaacgcctcgttcgcctttgcggccaacatggtgaagagcttcatcaacaacggctggtgcgtgcaaatccgtggcccgcaggccggtggtgccgtccaggacctgccaatccatctgtatgacctcggcaccggcaaacaggtgaagattccgtcagaagtgatgatcccggaaacccgcgaatttgaatttgccagcctcggcttcattcccctgtcgtactacaagaaccgcgactatgcgtgcttcttctcggcgaactccacccagaaaccggcgctgtacgacaccgccgatgcgacggccaacagccgcattaacgcccgtctgccgtatatcttcctgctgtcgcgcatcgcccactatctgaagctgattcagcgcgagaacatcggttccaccaaggaccgccgcctgctggagctggaactcaacacctgggtgcgcagtctggtgaccgaaatgaccgatccgggcgacgagctgcaggcctcacacccactgcgcgacgcaaaagtggtggtggaagacatcgaagacaatccgggcttcttccgcgtgaagctgtacgctatcccgcacttccaggtggaaggcatggacgtcaacctgtcactggtttcccagatgccgaaagccaaatcgtaa

SEQ ID NO: 181456 - DNA, 498 bp, Klebsiella oxytoca
atgtctgaatcatttcagaacgagataccccgcgcgcgcgtaaatataaaactggatctggtcacgggcggtgccaggaagaaagttgaactgccgctgaagctgctgactgtcggcgattacagcaatggcagggcggaggggaccctttcagagcgcgaaaaaatcaacatcaataaaaataacttcaacagcgttctcgctgatctccatcccgaagtaaatatcaccgttaaaaataccctggcaaacgatggctccgaagaaaacgtgaagctgctttttcagaatatgaaggattttgagccagaggcggtggcacgtcaaatacctcagctccgtgcgatgctcgctatgcgtaatttactgcgtgatttgaaatccaatcttctggataatgtcactttcaggaaagaactggaaactattttaaaggacccggcacttactgatgaacttcgccgcgaactgaatgcgcttgccccggtacagggataa

SEQ ID NO: 181457 - DNA, 345 bp, Klebsiella oxytoca
atgagcaagtcattaaacgcgcgttgcatacgtcgctgggaagtggaattcaaacctttctgtgattcaaaagttaacccctactggcgcaagcgtgagctgcgcgggtatatccgcgaagcggctcttaccaccgcttacagcatggtcgagagcatggctgaacgtaacgccaaggttgactatgacggcgatccgaacggctggagctatgagttttctctctggtatcgcttacgccgagaaaaatatctcaaagaagcgcgtgactacctggacgaagacgctaccaacgacgaaatagacgacgaaatagagaacgagctggaggcctggaatgactga

SEQ ID NO: 181458 - DNA, 1011 bp, Klebsiella oxytoca
atgactgagcgcggaatgatttttaatgctgagatggtgcgggccattctcgacggtcggaagacgcagacccggcggattgttaaagggactgacggcgccgtgaagttctgcaaggaatgggacatcaacggagaagaaattttcgttgttctcggcgaaaaagatcacacaggaatgaatcctgttttgggtgctatctcatgcccgttcggcgctgtcggcgatcggctaatcccagcaatgccaattccttcgctggggaaaaggtactgtgctgatgtgtcaggatgcatctggtcaaaggctaaatctggtggggaatggcgaaaattaaatggatctgcaaatggcaagggctaccttaccatcactcctgccgtagacggtaaatataagacccgattggtacatgagttggtggcagaggagttttatggcaagaggccttcgggatcgcaaattagacatcttgacggaaaccaaaaaaataattctccagaaaatcttgactatggcactcaagagcaaaactggtctgacagattagtaaatggagtttctcttggtgagggccatcataacgcgaaaatcaccaataaaatcgctggtgaaattcgcgcatcttcattaagccaaagggctctttccaagcaatacggattatctcagtcaacaatatggtcaataaaaaataatcgaacatgggtagaaaatccgatcccccaaaaacaaaacatgccgcgctgggccagccgcattctgctggaaatcactgatgtgcgcgttgagcggctgaacgctattagccaagaagatgctcaagctgaaggcatggagcttactgggtggcggccaacatactctgacccggatagtggcggcgaggttatgacgccatacgacaattttgctgagttgtggtcatccatctacggcgacgaaagctggaaagccaacccctgggtttgggttatcgagttcaagagcgttgaaggcggtgcagcatga

SEQ ID NO: 181459 - DNA, 141 bp, Klebsiella oxytoca
atgctggcaaatatcggcatccgttttgtgccgatcccggtagcgacagaggaagagttccaggcactgtctgccgagctttcacgaaagcttgagcagatggcggttgaagcggaaaaaagcgaaggcggtgcagcatga

SEQ ID NO: 181460 - DNA, 573 bp, Klebsiella oxytoca
atggcgatccaggactacattattacgggcggtaagtacggcacttacaaccattatcagttactgctgaaaaagctgaaccaggcaaggccggatattcagatatcggtgttgaaattcggcggctgtgaggccatcagtcagataccccgctacgaaatcgtattcaccagcgccacgcccgacatccccgcaaatctgctgattaactacagcgcacagttactgatgtaccccgacggcaagccttacgaaaaacttaaaccccgaattctccccggtattattacgcagtttcgtcagtgcagcacctccgccgatgaaacccgctatgtcgcggtgctcgaacacaaaatggcgcgcatggcgcaggggcacaacagcgcggtgttcctcaatgacagcatcatcagcctgacggaacacaccttcggtgactacctgatagacaaactaagcttcgtctttaagctcaccgatcgctacccgccacgcgattttatgttgcagtatggggaatccgactacgaccacgtttcacgccgtctggccgatagcggtgtgtcgttttag

SEQ ID NO: 181461 - DNA, 903 bp, Klebsiella oxytoca
atgagtacgtatatcatcaagagaacgggtaatcggtacattgatatcagtagcggcaagacaattgatgcttattatccaaatggagacatgaataagcggtcctgtcttgccgttaaatataaaattatcgtctgcgaatccttcgaaattgagacagacatatcaaaggatatcacgtcaacagaagatgcttatctccgtttacatcttctttcatcccgtgaatacaaaccgaatgaaataaatctggaaggaatttttcagcacctgccaaatgtagcctggacgagtgcaggccctgtattcccggaagatgtacaacgtttacgtcaccttattgcggatgattatcatcagcttaccgtattcagcgttgataaatttccaaggatggttgactacactataccttctggcgtgcgtatagctgatgctgaccgcgttcgtctgggtgcctacatttctcagggaacgactgttatgcatgaaggttttatcaactttaatgcaggtacgttaggacaatgcatggttgagggaaggatcaccccgggagtaactgtcggtgatggaagtgatgtcggggcaggtgcctcaataatgggaaccctgtccggtggcggtaaacagaaaaatcagataggtaaaggctcattactgggggctaatgcagggatagggatctctctgggagattcctgcattgtggaagccgggttatatgtgacgtcagggacgaaagtgacgctgccggacggttccgtcgattatgcacgcaatttgtcaggcaaaaacaaccttctattccgacgtaacagcgtgactggtagtgttgaagtgctgacaacagacagcagtgtatggggaggagtaaatgccgttcttcaccagaacgactga

SEQ ID NO: 181462 - DNA, 660 bp, Klebsiella oxytoca
gtgacccataaaaacagtcagaccaggcggggccggcccgtcaacgaggcgcttggccaaaccatcgttgacgccgcgtccgaactctttttggaattgggatttcaggcgacgaccctggataaggtcgcccagcgagcgaagatatccaagctcagcatatatcggcacttcgagaataaagaggcgctgttcagtgcggccatcgtggccggctgcagtcagtcgtttgcaccgcaagtccttctggaaggcgttgagggttcggtcgaagagcagctgatggcggtggggtcattactgcttcgcacgctgctgagatcggacgttcgcggcgtcgaagccatggttacggccgataagaagaatcaggcatcgttaagcaagctccattacgaagccggccctgctcatgtcatcacccaggtcgaggcttttttgcgccagctgcacgcaaaggcgcttctgaacgtgcccgatcctcaccagtccgctcgtttgtttgccgcgcttttcaaaggctccgaccttctgatgatcgcgcgcttcgatgaggccagagcagaggacgacgacgaaatcgaagcttattgtcgctcggccgtcgccatgttcatcgccgcgcacggtggcactccgggggcgctatcgcggccgtga

SEQ ID NO: 181463 - DNA, 894 bp, Klebsiella oxytoca
atgaatgacgttatcatcatcggcggcagctttgccggccttgccgccgccctgcagcttggacgcgcccgtcgcaaagtcacggtcctcgacactgatcggccgcgcaatcgctttgccggctattcgcatggtgtgctcggccacgaccacaagccgccgcaggacatcctggtcgaggcacgtcagcagctggagcgctatccaacgatcgagctggtcaatgcgcgggccgaaagcgtatccggcaccatcgacgatttctacgtcgtcactgacgataacgaaagcctgagggcgcgccgcctgatcctgagctatggcatcactgaccagatgcctgatattcctggctttgctgaaggctgggggacgtccatcataccttgcccctactgcgacggctttgaagtcgccgaccagcattggggcctcatctggtctggcccgcagtcgcacaatcaggtcaggctcttccatgactggaccgacaggttgacggtctttaccgatggtcacgacatcgcacccgatatccgaaccgacctcgtccgccgaaacaaagccgtcgttgaaggcaagatcgtggaaattttcggtaatgaaggccataagtccaccgtccgactcgataacggccccgctgtcgcggtcgatatcctcttcgcacatccccgtaccaggccatccgcaagtttgcataagtccctgggtctcgccacggttgatacgccaaccggcctcgtactcaagaccaatgagcgccgcgaaaccagcatgccaggcatttacgccgctggcgacctcgccaaccccggaatgccctctgtgaccacggcaacatggcagggcgcgatggcgggtatcttcgcccagcagtcgatgctcacttga

SEQ ID NO: 181464 - DNA, 201 bp, Klebsiella oxytoca
atggaatcggtattaagtcattttacggccagtcatgacgaatattatactgatgaaacggtttcaacctttggcatattgcagactctccctgaacacattccgtcaaaagaaaaccatattgtccctgacgaaataattcagaaatgggtaagcgcgaaatatgacgctttattaccgggcctgggggaattcctgtag

SEQ ID NO: 181465 - DNA, 1227 bp, Klebsiella oxytoca
atgcgatatatacctggcaggatccccgttatccttgcagtcagtaatctgttttttacctgtgccgtgtctgttgatctgactattgccaccctggtgggctatcagctggcgccgtctgctcaactggcgacggttccatttgcactcatcacagtcgccggcgcgttctcgagtctgtttgcggccggcatgattggtcggggaaacgaaaaactcgcgtttattctgggctccttatgcggtacctcgggcggattattgtcttttctcgctgtgctgaagggcagttttttacttttttgtaccggctgctttctcgtaggtgtctatcaggctttcagccagtactatcgtctggttgctgccgatcactccccaccggaagtgaaggggcagtcaatctccctggtcatgattggcggcgttgtggcagctatcctggggccgttgctgacgattgttgcacgggatatccccggtctccctcgctttgccggtgtttatctcgttgtggcgggactggggattctgtctgcgcttaacctggctctgttcctcgaacgttcaaaaagagacatcccctccccggacacccgggcgatcccgggagtatcgccaaccagtcgggaattaatgaaacgtccggattatcgtacggcctggtttcacctggttattggctccttcgttatgctttttctgatgacggcggcccccctctccgttacgcaccaccactcgatgaatgatggtgcactggtcattcagctgcatctgctggggatgtatgtcccttcactgtttaccggcctcctgatacgaaaactggggctcaccgttctgctgtacgcggggattgcgctcaacatatccgctgtcgtgataaacctgaccggggaaacgatgctggcatacagcttaagtctgcttctggtcggggtcggatggaactttatgtttgttggcggctcgacgctgctcagtctgtcctaccgtgataatgagcgaaaaaaagcgcagggtctggccgaaaccagccgctttgttttctccgcgatagccacatccggagcgggcgtgatgctggccttgctgggctggaagctgctgggtctgatgatgataccggttttactggtctgtctggtttccacctggcagtacagccaggcgatgaggaaagcaagcgggaccgcctcacgtcctgcagaagacggttcatga

SEQ ID NO: 181466 - DNA, 327 bp, Klebsiella oxytoca
atgacgccggaaaacgaaggcaactacttcgctaacaaaactcagaacttcgaagccgttgttcagtatcagttcgacttcggcctgcgtccgtccatcggctacgtacagactaaaggtaaagacctgcgctcccgcgctggcttctccggcggcgatgctgacctggttaaatacgtcgaagtgggtacctggtactacttcaacaaaaacatgaacgtctacgctgcgtataaattcaaccagctgaacgacaacgattacaccaaagccgctggcgttgcgaccgacgaccaggccgcagtgggtatcgtttaccagttctaa

SEQ ID NO: 181467 - DNA, 555 bp, Klebsiella oxytoca
atggactatttcctggatatccgcgtgctgcccgatccggagtttggcgaagagatgcttatggccgcgttatttgcgaagctgcaccgcgctttaggggccagaagtaaaggggatattggggtaagcttccctgagttttcaatcaaaccgggaccactattacgtttacatggcgacgaatctgcactgtgcgctctggaaaaaacgctctggcgtaaaggtcttaatgattattgtcagagtgggacggtaatgcaggtaccggaaatcaaaggatggcgttgcgtcagccgggtgcaggtgaaaagcagccccgagcggctgatgcgccgttcggtgaaaaaaggctggataacgcaggatgaagcagatgcgcgattgcttaccatgcggggcgagtcgacaacactcccctggctgaatatgaaaagcctttcaaatggacagatatttccgctatttatttgtcacggcgagttgcgggcgcagcgcgtcgcgggaacattcagtagctatgggctgagccatatcgcgactgtcccttggttttag

SEQ ID NO: 181468 - DNA, 984 bp, Klebsiella oxytoca
atgcccgcgaagtatattgccccctcggatttaaaaacgatactccattcaaaacgcgccaacatttactatctggaaaagtgtcgtgtgcaggttaatggggggagagtggagtatgttaccagtgaggggcatgagtcattctactggaatatcccaatagcaaatacaacggccattatgctaggaatgggaacctctgttagccaggcagcgatgcgtgagttcgcccgcgcgggtgtgatggtaggtttttgtggtacggatggcacacctttatatgccgccaatgaagtcgatatcgacgtttcctggctatcgccacaaagtgaatatcgaccaacggagtacttgcagcgttgggtctcattctggtttacggagatgaagcgtctggaagcggcgaaatgcttccagaatattcgactcgcgcaattggaaaaacactggctcggcagccggatgcagcgcgagtcgctattttcagtcaataaagaaaagttgctgggattaacagaacgtgctcgttcaggtatgtccgaggcggatagccataccgcgctgatgcttcaggaagcgcagctcaccaaagcgctgtacaaacttgccgcgcaaacctccggttatggagactttaaacgagcaaagcgtgggggcgggctggatctggcaaaccgcttcctggatcagggaaactatctggcatacgggcttgccgccgtggcggcgtgggtcaccggtatccctcacggcctggccgttatgcatggtaaaacccggcgtggagggctggtttttgaccttgccgatttaataaaagatgcgctggttatgccacaggcatttatctccgccatgcagggggatgatgacagagatttcagacaagcctgtattaatcatttccagcagtcagattccctcgatttaatgattacagcccttcaggaaaccgctgctgtagtggggggaagcgcagaatga

SEQ ID NO: 181469 - DNA, 234 bp, Klebsiella oxytoca
atgtggatgtgtaaaatgatgatttgcccattatgtggaagtgcagcccatactcgcagcagtttccaggtctcttcaatgaccaaagaacgttacaaccagtgccagaatatcaactgcagccatacgttcgtaacgcatgagacttttgttcgctcaatttctacacctaaagaggcccatcctgtgcagcctcaccccacaaattcaggccaggctgcgctagctctttga

SEQ ID NO: 181470 - DNA, 696 bp, Klebsiella oxytoca
atggatttcgataaaataaatgcctttcttgctacggcaattggaggattgatatttaaatggctcgcaggaggagtctcttccttttggtcatggctaaataaaatccatcctgaagaggattttttagtatccaccatcggattagcaaaaccgataattaggcttagcctttgcaagtacaaagttagtactaaaccacacggtaaacgagaaaaaatcaccctcactactcttggcatcattgttatagcaattcccttaattggtttttatcagttcactaaaatcattaccgttgagccaatatactggatttcccatacacacaaagaaacaaatgactcattttggataaaaccaggagcggcaacaagcccaccggatactcctgcgtgggatataacgccagaaacttgcatcgataaaaacaaattggataaaatcacgttaattaaaccagaaacaaaactatttatttgtagttatatgttagatccacaaaaaaaagatgagttatcaaaagagactaataaaaactcccttgcacttatagtcataacgccaattatttatctatcattactatgtttcactatgttaggagtagctatgtttattgatttatatataaacagaaaaatcacaaagcttaataaattagaaatcaagaaaagttatgaatatttaacataa

SEQ ID NO: 181471 - DNA, 1584 bp, Klebsiella oxytoca
atggaaagtaatgcaaactctaagaaaaaaatcgattctgggaaccaaagattagcatccttattagatgacgttacccgtggaaacatcaagctcccggctttccagcgagattttgtttggacagatgaacaaatattagggcttatcgactctatttatagtgggtatccggttggttcattattattatggtcgactaaaactccattgaaatttgaaaggaatgtaggtgggtttcatctccctgaggtcaaagaggattatcctgtaaattatgtgttagatggacagcagcgtttaacaactttgtttggtgtgttcaatgcggataggaaaacagaaaacaatgaattagcatcacgatttaatatacattttgttccttccaatgacgaattctgtaattacaaagatctgccgaatggtgttagtagtgttccactaagtagtattcttgatactgcgaaacttctgccggagttgaggcgattcccagttgatgaacaagataaaattgctaaccttgtagataaatttaaagattatgagtttcctatagttacgattaaagaaagaagcaaccaagaagtttgtagaatatttcagaggattaactcatctggaacaagtttaagtaccattgagctgctgactgcatggacatggtcagaaaaattcgatttacgcacagagatggattcattaaaagattatcttgcatctgtggggtatgaacaagtcgatgaagtccttttaatgcgttgtttgaccgcaataatcaataaaaaaatagattcagatactttgattgatgttgatccaacaattcttttatcctcaatggaggatttaaaaagaggtgtgcgaagttctgttgattttttagcaaacgatttaaaaattaagaattctatattcttacctttccctattatgttagttccgataacctatttcttcgctaaaaccgctcgacctacaggacatcaatatagttctattaagcgatggttttggtgttgtgcattttcacaaaggtataaagctgggacaaatacttatgttatggaagatattatctctatggagggtataataaattcacctgatagctatattcaaccaataccaaaaattgaagcggatttctttaaaaaaacatggcgaataaactcctctgctgcaaaggcctccatttgtttattagctcaactatctcctcgaagtttcattactggtaaagtggtagatcttgattctgcattgtcagcatataacgcaaggcaatttcatcatatttatcctaaggcataccttgctaagcaaggttttgcatttcatgagtcaaatataattgcaaatatagcgtttttaacggctgaagataataataaaatttcagattcaaaccccgatacttattttaaagcagtacatgaggcagagaaagatttgatttttgatgcagcggtaattgatgaaaaattacgagatggtaaaagttcttatggggagtttatcaatcagcgtgaaatggatttaaatgatcttgcttcaaaagcaatgacagggaaaatatag

SEQ ID NO: 181472 - DNA, 132 bp, Klebsiella oxytoca
atggtgcaggatttgcatgatctaaaaaggatcgtaatggtccaaaatcgcctgggttgtcgggttttcaggcccatcatgtatctgcatgaaaacaacttcacaaagctggcagacgtggcggggatttga

SEQ ID NO: 181473 - DNA, 816 bp, Klebsiella oxytoca
atgagcatcaaaatgattgcggtagacatggacggcacttttctgagcgatgccaaaacctataaccgtcagcgcttcctcgcccagtatcaacggatgcgcgagcagggcatccgcttcgtcgtcgccagcggcaaccagtattaccagcttatctccttcttcccggaggtagcgcacgagatcgcctttgtcgccgaaaacggcggctgggtggtcagcgccggagaagatgtatttaactgccggatgccgcaggagcatttcaataccgtcatcgatcatctccagacgctgaccaacattgaaattatcgcctgcggtaagcgcagcgcttataccctcaaccgctataacgatgcgctgaaagcggtcgcggcaaagtactatcatcgcctcgaactggtcgacgattttaatcatattgctgatgatgagattctgaagttcggtctcaacgtcccggaccagctgatccctgagatacagccgaagctgcacgctgcgcttggcgatatggtgaccgcggtcgctaccggctacggcagcattgacctgattattcctggggtacacaaagctaacggactgcgcatcctgcaggagcgctgggggatcgacaatcatgaagtggtcgcctttggcgatagcggcaacgatattgaaatgctgcagcatgccggattcggttacgcgatggccaacgccgccgcgccggtgaaggccgttgctggctatcgtgcgccgcacaataacgaagaaggcgtactgcatattattgataaagtgcttaatcgcgaagcgccgttcgcctga

SEQ ID NO: 181474 - DNA, 327 bp, Klebsiella oxytoca
atgactgccagctattttccttctcctgctgctgattacatagagcagaggctgaccgtcacggccgcatgtgatatcagcgctaactcgcaggttatccagactgaccgcggctatgttgttttggacttgtcgttaaaagtgacgcagggaagcgtcgttcttatccgcctggatggcgaactgcagtttgcaaaattgatgggtagctcttttatcacagccgaaggcgagagcatcgaaggtgaggcgctggaagacgttgaagtactcggagtcgcaacccatgcgattaacgacttgagacaggatacaagtcctgtttga

SEQ ID NO: 181475 - DNA, 213 bp, Klebsiella oxytoca
atgaaattacagaaatgccctgattgcggcgcgttacctgagtaccactggaaagattatatgtttggctcttgctccggcgcactgaaatgcccctttgaccattaccgagtccagcaaagctactgggctggtggaaagaacaaagccaggcatgctctggaacaaaaatgggctgaggcggttaataaaaacgaggttaaaaatggctaa

SEQ ID NO: 181476 - DNA, 3084 bp, Klebsiella oxytoca
atgacgataagaatttacccatcccggcttcccggagaaccgcttgaaactcatgaacacggcacgactacgttgcatcagtggatggtcagaaatgttcccggatacagccaggacagatcacaccccgttgccgttgaattaaatggtcgcccgcttcctcccgatgagtggccgctttgccaactgagccctgacagtgacatcagaatttatcctgttccctatgggacggggctggaaattgccgtctgggtttcgattgcggtatcagttgcctccgctgcttattcattattcttcgggccgaaagtcgacctcggtggttattcatcgggtagcggtcgttcgctggagcttaatccggcaaaagcgaacacggcgaaacttggtgacccgatacgtgaggtgtttggtcgatgccgcatttaccctgattatctggttcagccggttacccgttttgaccctgacgatccaacgcgaatgacggtcgaaatgtttctctgtgtcgggcaggggagattctcgtttacgggaggagataagcggataggtgaaacccccgcggcctcgctgggtgatggtttcagcgatcaggtgtatcagcctggagaagacgtatcttctgatccgcgaagcgaaaactggtttaactcgacagaagtcggcggaacatcaagcggaacagggctggacatggctcagacctcgcctgattccgacgacattatcgctgacagcatgactgtttctggtgcatccgtaacgtttacaggactggacacggacgatgacgacgatgacgacgaggatgataacgctctgcctgcaagctgggttgaaggtacgattgtagagattaaagcccccaccaacttccttatctccacctcgtcaggttacagcgtatttgccagcaagctcctgactgaagttgcgccggtagttgggatgccggtaacgctgagttttaacagcgttgattacgatctctttattgcagcccatacgccggggcaggatgccattccgggagagggtggcagtgcagccgaaattcagtccagcgccgcaccgacgacttacgatttctcgctgggcagcacaacgtttacggttacctggcacggtacgacttataccgtctcgcttgttgctgattatgtgaatatgtccggccttctggcagctataactgaggggctgacgggatcaggactggcggcgcgtgacaatggcggcacggtgctaatcactgaagaagcaagtccgtttgcgggaggagacatcacatcttcctctcttcccccttctgtttttggcgatactcctgtgtatacctcaggcagcgcgtcaacgggtggtagcgcggccattactgcgagtgtgacccttgcctataacagtgcgaccggaactgcgttcgccggagtaccggagggcactcagcgcctttcgctcgcacatcggggtaatgaatatcaggttgtgtctgttgatggaacgacggcaactgtcgcgcgtcttgtcagcggttccgttgatgcttcatggccgggattttccagcaggacgatgattgactatgaagctacggggcttaacgacacgctgagctggctggggccgttcctggcttgtccggaaaatgaagttgtggacgcctttgaggttaacttctcctttcctaacggtatttgcggctttgacaacaaaggtaagaagcgcatcaggcactgtgaatgggaaatccagtatcgggtgtatggcactggctccgggtggatcagcaagcagggagaatatgcgctcaaaaacattaatgggctggggtacacagaaagattttcgctcgactctcccggcctggttgaggtgcggtgtcgtcgccggaatgagcagggcagtaataacgcccgtgacaatatgtactggcaggctttaagagggaggcttctcgcacgacccgcctcttacgcaggtgtaaccacctgggcaatcaccgttgaaaccggggggaagctggcggcacagtctgacaggcgcgtcagtgtggtcgccacgcgaaactatgatggcggtggtgacagaaccattagcggcgcatttcgtcatgtggcaggcagtcttggttttaatgctaaccagattgacgcctctgcgatagaagctcttgaaactgcctggtggacgccaaggggagaatattttgactatgaggcaagcagcgacagtgcctcagcaaaagatattttcgacaaaatcaccgaagccggcatgagttattttttactgtcagacgggctcctgtctgccgggcgtgaaggcatcaaaagctggatcgggatcattactcctcaggatacggtagaggaaatgcagacctcgttcagggcgccttctgacgatgactatgacggcgttgacgtcacctatatcaacccggtaacctgggcagaagaaatcgttcagtgccggacgactgataatcctgtgccgcggaaagtggagtcgtactcgctgggtattgtaatgactgcggatcgtgcttaccggacagggatgcgcaggctcatgaagtatctgcatcagcgcaggacctatgaatgcacaaccgagcttcttggctggtgctatcagtttggcgatcacatcattctctctgatgatattcctactggtaaaacaatcagctgcctgatcgaggccatggcattcgatgatgaagttatcaccttaacggtcactgagcctctggactggagctacgctaacccgcgttgctggatacagtttcaggacggtcggccatcaacccgcttattaaccccgacgcgcgtcgatgactttactctttcaataccgtacaacgccgatctgcatcctgaagactggacgatggatgacccggatattgaattaccgcgcctgctgttttgcgacagcgagaagggtgcacgacacggaattattcaggaaatagtcccctcggatgacggcacctgtcaggtgaccgccccggaatataaagaaattttctacgcatacgacgacgccacataccccggcgacgtcgcgtaa

SEQ ID NO: 181477 - DNA, 381 bp, Klebsiella oxytoca
atgttcagttctgataaatacctttcggtcaaatggctgaagggcgggcgcgcttttcctgagctcgactgcttcggcattatcaatgaaatccgcggcgatctcctcctcccgttatggccggatttttccggcgtgacgaaagatgagggaggcctcgatcgtgaggcccggaagtttatgaaatccctcacgcgctgcgagccctgcatcggcgccggggtagcgtgttattccggctcaaccgtgacgcatgttggtatcgtcgttttgctggatggtcagttgcaggttgctgaatgtaatccgggaaccaacgtcacctttctgcctcttcctcgatttgtccgtcggtttaaccgtgtggagttctggcaatga

SEQ ID NO: 181478 - DNA, 486 bp, Klebsiella oxytoca
atgacaattcttgagcaactttatgccagcagcggttctgaggtcattcacgacacgctgcagatcacggcaggtgatcagaactactggcttacccgtggatgggacaacattaccgccacgttagaagacgggcagcaggctacgtttgagggatgtgctattgatattgcattacccgccaggaatgctgacggcacgcaggacctgaaatttgccatcagtaatgtcgacggtgtggtatccgatgcgattgacaaaatcctggacgaaatgacgtcggcaaccctgacttttcggcggtacatctcctctgatttatctgcgccggctgcatcgccttacacccttgatgtgaaatccggatcgtggacggctacagcggtgcaggtgactgccggatatatgaacattcttaaaacggcctggccgcgtaatcgttataacctggcggaacatcccggccttcgttacatgtcctcctga

SEQ ID NO: 181479 - DNA, 474 bp, Klebsiella oxytoca
atggcggatattatctatccggatgaatacctgcccttgccgctgatggacgggtacggttttaagcccatatcaccgttactgcgaacggagatgacgtccggtcgtgcaaggcagaggcggcgatacacctcaacacctgctcaggcatcagtgaaatggattttccagactgatgcgctggctcaggtttttgaggcctttttccgggatgcgctgaaagacggccagtcctggttctatctgaaactccagacccctatcggagtaaagccctataaagccaggttcgtggatatttacgaagggccgacactggttgcaccgaaatactggcagtacagcgcaacgctggaattgtgggaacgtccgttaccacctgccgggtggggaaattaccctgaatggctcgctggtcagtcattactggatattgcactgaataaagagtggccgaagcatgacaattcttga

SEQ ID NO: 181480 - DNA, 3579 bp, Klebsiella oxytoca
atggcaaccctgcgtgaacttatcattaaggtttcagcaaactctcaatcatttcagactgagatcgcccgcgcttcacgcatgggacaagactattataaaaccatgcaaaatggtgggcgtcaggctgctgcggctgcgaaagaaagtcaaaaggctctttccgagttaaccgatggatttgcttctgctggtcgagcagctacggctgcggctgcagcatttgctacaggaaaactggttcagattgctgatcaatggaactcagtgaatgcacggcttaaacaagcctcagtgtctacgaatgattttactttatctcagacccgattaatggcgattagccagagtacgggcactgcttttactgataacgctaatttattttcacgcgcggcagcatcaatgcgtgaatttggctacagctcagatgaagtgctcaaaatcaccgaagcggtatcaacaggacttaaactatctggtgcaagcacagaagaagccggttctgttattacccagttcagtcaggcccttgctcaaggtgttttgcgtggcgaagagtttaacgcggttaacgaatctggtgatcgtgtcatccgcgccctggctgctggtatgggcgttgcccgaaaagaccttaaagcaatggctgatcaggggcaacttaccattgataaagtcgtaccagctttgatcagtcaattaggtgtattacagggggagttttcctcgttgccaccaacagtttctggatcaatgcaaaaagtcactaactcttttatggcatgggttggtggggtgaaccaggcaactggcgcgacagatgcactttctggcggtcttgatgggctggcaggtacgctggattctcttacatcttccgctgtcagcggggccctcagtgacgtagcagataatatgtcactaattaccaccgctgctggtggtttggttgggatcggattagcccgatatcttggtgggattgttaccagcgcaagcagtgctactggcgcacttatttcagcggcaaaatctgaggtagcccttgcagtcgctcaagaaaaagcagcgcaatcttctgttgccgcttcccgcgccgctgtttatcgtgcccagcaagctcttcagagtgctaaaagtgcagatgttcaggcggcacaacaggagagggttgcggccgcagaagccaaggttactgctgcgcaaggtcgattgacaacagctctctccaccggaacagctacagaaaaagtacgagcacgaacagctctggagcgggctcaggcggggcttgtagctgcaaaaaatgccgatgcacaggctattgctgaaagaaagcttgccgcagcgcaagcggcgcttagccgtaatatttctggtagggtttctgctcaaaataatcttaacagcgttacttctgtcggcacccggttgatgagcggggctcttgggctggtcggtggtatacccgggttagttatgctgggtgctggcgcatggtacgctatgtatcaaagccaggaacaagcaaggaagtcagctcaggaatatgccagccaaatagatcaaatcagagaaaaaacctcttcaatgactctacctgaggtagatagtaatcgtaaattaacggttgaggcgatgcaggagcaaaagcgcttaatcgaagaacaagagcggagcgtaaaaagccttaacagacaaataaatgatttaaatgaaagtagaagcaagccaggtattactcaagaaaatgatttaaatattacaaaggctattgcaattttgaccgagcaagttgtcgtagaagaagacaagcttcgtcagatgcgagaaaaatccagtgatatattaaaggcacttgaggagaatgaaagaagaagaaacgatcttataaaagaaagagcatggcggcaaaatgctgaataccagagtctaatattgatgactggtaagtattcagaagttaaccgtttgcttggattgggaaatcagcttttaatggaaaggcaaggattagttaacgttccaatgcgaatgcctcaggctgatttaacatcacagcaagccaatgcactggaaaaaagtcggcaggaccttgaattatcgaagcttaaaggagaggcaagagagagagcccggttaggttatgctgctgacgaattagggctcaaggatgaacctcagtttaaaactaaccgcgatctgtttattaatcaggggttggcgaaatggcaaaacgatgaatccaataagcccacccggaaagcgccaaaaagcgaagaggttaaagcggctgaaaagacagaggacgtttacaagcgccttattaaacagcagcaggaacaaatagccctgggaagccagaataccgaactggctaaaatgaaatatcaggtgacgcagggggagttagcctctcttgagcaagccaaaaaagaaatgatcctgcaaaatgctgcactaatcgatcagaaaaacattgctgaacagttgcaaacgttccgtgaggggctggctgacagtaatgccgctgcgcgtgaccgggggaatattgattttcttggtgccgggatgggggataaggcccgcgaccgtatgaaggaaatggcggatattcgtactgattttctcaaacagcagcgggacctgcagcgggatttcagcaaaggtcagatttctgaggacctgtacaaacagcaaacggaagcgctacaggcggcgcttactgaacggctccagattcaggaggactactacaagaaaaccgatgaacagcagtcagactggcgggcggggatcagcgattcactgatgaactacgccgatcaggctgctgacctcagttcaatggcagcatcagcgaccagcgagattctcaataacaccacgaactctatctccaacaacctgaccagtgtcctgactggtgcgacttcgttcaaagatgggatgtcaaatatcttcagctctctgggtgaaacggtgattaagacgctgatccagatggcaacacaggcgttaatcaccaaagcgattatggcgtcgttcggcggtggggctggtggaatgttcgggagccttcttggtggaggtgggggaggtggcagcaccgggacggccattcagagcgctggcgctaatttttcgtttaatgctctgggtggtgtctacaattcaccctcgttatcggcttacagcaatggcgtatacagcactccgcagtattttgcctttgcgaaaggcgcgggcgtgtttggtgaagctggtccggaagcaattatgccgctgacccgtggcgctgatggttcgctcggggttcgtgctgttggacgtgagtctccggcagtccaggaggctgcaaggcagattgaggcgcagccacgaatcgcggtcagtgtggatgcccgtagcacgtttagcggtcaaccggatgacgcaacgatgctggcagtagatcgaaggaatgctgcactggaacgacgcatcatcaacacgctcactgctgaagttaataacccccagaagaaattcggtcgcgccatctactccaatctacagcccaaaaaaccacgataa

SEQ ID NO: 181481 - DNA, 297 bp, Klebsiella oxytoca
atgcagttcctgatggcgctggcgctccggatgggccgcacgctgggcgaactgcgacaaaccatgacggtcggcgaattcaggatgtgggctgaatacgaccgtatcagcccgatcggtgatatccgtggcgatattctcaatgctcagctggtttcagcgatgtacggggcgcagggaggtaaagtcaccatcgaagatgctcaactcaagtggagcacagaagaggacgaggtaatcgacagtggcgatccatttgccggattagaggccgctttgctcgccgcttctcagtga

SEQ ID NO: 181482 - DNA, 705 bp, Klebsiella oxytoca
atgtcagcacaatttgaacgcgcccaaaaaacgaaaattatgattacgtcagtgccggtcactgctgatgaaatggcgtcggcaacctggcttgagttgagttgtactatcaaacaggccagctttaccgccggtcagaaaaacgatattgacgtgacgacgctatgctctgatgaaacagaaaatatcaacgggcttccggcaccgtctgaaatgtcactttccggtaacttctaccgcaacacggcacaggatgccctgcgcgcggcttacgataacgacggaatacatggatttaaggttattttcccttccggaaacgggtcccagtttcgcgcggaagttcgtcaacacacctgggattctcagaccaacggtgtcgttgctgccacgttctccctgcgtctgaaaggtaaggcaaccaatatcgacgctccgggcattctgactttcgcgacagaccttcctgcatcccaaacggtcgcggcaggaagcgccctgacaatgggtgtggtcgtccagggtggcacggcgccttatacctacgtctggaaaaaaggttcgtcaaccatcagcgggcagaccagcgcaacgtttaataaggccagcgcagtatcaggcgatgcgggtgtttattcctgcgtggttactgatgccgatggcaccgttatcacctctgctgaccacactgtcaccatcagttaa

SEQ ID NO: 181483 - DNA, 345 bp, Klebsiella oxytoca
atgcaggcaggacgattacggcacagggtcaccattcagaacttcacaacctccagaacgccttccggtcagccggttgaaaaatgggaagatgggaaaaccatctctgctgaagtgaaaggaagaagcgggcgggaaatgatggcgtctggtgctgagcatgctgaagcaacaataagggtatgggtgcgatttaaaagcggatcgagtatttatgctacctccaggttgaaggtgctctctggtccatataagggccaaacgttgaatgtggtagggccgcccatacctgaccctaaagggacccagcttgaaattctctgcaaacaggggaccgaaaaatga

SEQ ID NO: 181484 - DNA, 495 bp, Klebsiella oxytoca
atggctggaacggcggggcgttccgggcgtagaccaaagccaacggcgcgcaaggagttggccggaaaccccggcaagcgagccctgaataaagaagaaccagtattcacccccatcaatggcgtagcacctccggactggtttgccgaagaggaactcccgttagcatccatcatgtgggagctgacgaccaaagaattatgcggacaaggcttgctctgcgtgaccgatcttgcagtgctggagcgctggtgcgttgcctatgagttctggcgaagggcggtaaaaaatattgctgttgatgggttatccatcactggcgcaatgggcgggaaaattaaaaaccctgaacttacggccaaaaaagaacaggaatcggaaatgagttctaccggttcaatgttggggctggaccccagcagccgacagcgcctggtcggtctggccgggaagaaaaagaacgaaaacccattcctgaagatgatcacgccatga

SEQ ID NO: 181485 - DNA, 351 bp, Klebsiella oxytoca
atgccatctttgataccaagggcttgtcgtaaacgagggtgccccggcactactaccgaccgctcaggctactgcgagaagcatcgcaatgaaggctggcaacagcatcagcagggcaagagcaggcatgagcgaggctatggcagccagtgggatattaagcgagcacgcatccttaagcgtgataatcacctgtgtcagaactgtctgcgtaatggtcgtgcggtagctgctaagaccgtggaccatatcaaggctaaggctcatgggggtaccgatgatgattcgaatcttgaaagcctgtgctggccctgtcacagaacgaaaaccgggcgtgaacgtttcaaatga

SEQ ID NO: 181486 - DNA, 150 bp, Klebsiella oxytoca
atgggtatattcgataaaactccgtcagacaaacggggagtgattgattacggtaaagaaaagaaagatggcgggcatgaccaccgacataataagggagaggaccgaaccccctcccagaaggaaggtgataagaatcgccgaaaatag

SEQ ID NO: 181487 - DNA, 207 bp, Klebsiella oxytoca
atgacaatgttgatcgggagctgcgcgaaaagtttacccgccccggtagtcgttgataccgcctgcaactgggtgcgaattatctacctgaccgaccacgatatcgacgtgatggataagcagaccaagcgcgacatcctggcacataacaaatcagttcagactaactgcataaacaagaaaaacgccccgaaaggggcacggtaa

SEQ ID NO: 181488 - DNA, 276 bp, Klebsiella oxytoca
atgggcattgaaatgattattggtctggcaactgcgttactggccgttatcgctggcgcatttgggttaggccattcacgcggaaccagcaaggcagaagccaaagcagagcagcagcgtatcgaagagaacgctgcggccagcattgccgcggcagaacgtaaggcggaagttacgaaaggggccagtgatgtacagcagactgttagccatatgcctgatgacaatgttgatcgggagctgcgcgaaaagtttacccgccccggtagtcgttga

SEQ ID NO: 181489 - DNA, 630 bp, Klebsiella oxytoca; identical to SEQ ID NO: 179162

SEQ ID NO: 181490 - DNA, 396 bp, Klebsiella oxytoca
atgtccgatcctgtttctgccacaacgatagcggctggtggactgttcggcgccagcctattcggcctggcaactggtattgattacggcgtggtatttggtgcgtttgctggtgcggtgttctatgtcgcaacggcggtgaatattagccgcataaagctggtgggctatttcattacttcattcatattcggtgtgattggtgctcctctgctggggtcgtacttctcaaagtggactggttacaacgacaggccgcttgatgcactcggagcggtaattgtggcagccatagctataaagctgctgacattcgttaacagtcaggacctgggtagcctgtttgggattctctctcgcttacgtggaggagggacaagcaatggtaacaagtga

SEQ ID NO: 181491 - DNA, 549 bp, Klebsiella oxytoca
atggatgctcttccaggctttggtggcgggtttcgcatgaacgaaccgacgacgccaagcattatgagtaataacatttcaaaaattataaagaaaattaatccgaagggcgaaatcaagtcaaaatactttacctataccaagccctctactttctcaccttatgaacaagaatgttactataatgtagccaggatgattagagagcacggtggtgaggctatatatggctgggtactgtgggaaagcgatatcatgatagagggggaggctcactgcctttacaaggatcagtctgggaatgtctttgatataaccccgcgggtttctggtgaagagaaaatactattcatagaagattctcgcctcaatgtctcgctaaggcatattaaaggaacccatttttctatgattcagcacacgaacccacagctaatctttagtttagatttatttatggaatcgaaggcaattccattggagtttgaccaaaatgaaataagggttataaaactaatcgattacaaagatagttttttatttcaataa

SEQ ID NO: 181492 - DNA, 1356 bp, Klebsiella oxytoca
atgacgccagtgtggaaaaacgaagatctggaagaggcggtcatcggcgctatatttttacgccgtgccgaccctgaggtactggatattctttcccggctgccggcgagttccttctcggttcgtcagtaccgtgaaatttacacaggtatctgccggcaggcccgcggcggcggagtgattgatccgctgttgctgtgcgaaacactgccggcacttcagacaaccatcctggaagccacccgcgtcagctgggcgaaatcggcgctggtctcttacgttgacgttctgcgtcgcaacgccggcgtgcgtgatgctgaatccgcactggaaaaagcactggagcaaatcaaaagcgccaacaacggagattctgcgctggccgcccttgaagccgcgaagctcgctgtgtcagccatcgacatttcagcggataccgtccagcctgtccacatctcggagctgctcaccgcagtggccgacgaagtggaatcccggagccttgggaaggaggagacacgtagtctgctcaccggcattgaggagcttgatgcaaagacgggaggcattgaacccacggatttggtgtttatcgccgcacggccatcgatgggcaaaaccgagcttgcgctggatatcatcgacaaagtgtccgcgcagggacacggagtgttgtttttcagcatggaaatgtccgatacccagattgccaaacgcatggtatctgcggctggcggcatgtcgatgtctcgcctgaaagccgtggataaattcgaggacgaggactgggcacgattttttaacggcatggagcgaatggctacgcgcaatatctggatcaccgacgccaccggcctgactatcgaccagatccagcaaaccgccacgcgctaccagatagcgcatccggaaatcgcgctggtagtcattgactatctggcgcttatcaaaattcagagtgctgcgcgttacgacctggccgtgggtgaggtgtccaaggggcttaaaaacctggctaaagccaataaaacccccgtactcgcgctgagccagctttctcgtggagtggaatcccgacccaacaaacgccccatgaactcggatctaaaaaactcaggtgaaattgaggccgatgctgacctgatcctgatgctgtaccgcgatgaggtttacaacccggaatcgccggcaaagggcattgccgaaatcaacgtgacaaaacaacgcaatggtgaactagggaccatttaccgccggttctataacgggcacttcctgccgatcgatcaggaagaagcgcggcagcgttcaatgcctaaaccgaaaccgcagcaacgtcgctatgcaaaatcctga

SEQ ID NO: 181493 - DNA, 882 bp, Klebsiella oxytoca
atgttaaatttattgaatcagcagaaagagcgcgcagacctgaaagcaaatcaggagcgcctgaacgaagagttggctttcgcggtggagcacaggctcccgtggggctacgccgggtgggaatcagggaaatccgagaccatcacctgcgaaaaacacggtaggtttgagcgttttaccctggtgggcaaagcttttcgcggcggtgagaattttaaacactcacgatgcccggagtgcctgaaagaagatctcgcagaggtggacgcaaaactgcgtgcactgcgtgttgatgatctgctggatcgtgctggtatcgcgcgccgcttcgaaggttgcgagttcgataactaccaggccgtaaatccggatgcagcgaaaaacctctctgcatgccaacgctatgctgaaaactgggagcattgctttgatgccgggctgggcctgctgatggtagggaagtgcggtaccggaaaaaatcaccttgccgtcgctatggccaaaaatatcatccgcacccacctggcccgcattgaaattactgatgtgatgcgtgtgatgcgtgctgtgaaaagcacctggcggcataacgctgaagcgacggaagacggcgtgctggatcattacacgtcgctggacctgctgattatcgacgaagtgggcgtgcagttcggcagcgcatcagagcttgcaatccttcaggagattgtcaacgcccgctacgagagcgtattacccaccatcctgatcagcaacctgacctttgagcagcttaaggactccatcggtgagcgcatcgttgaccgcgtgaccaatggcggacgcaaccgcctggcgtttaactgggaaagcttccgcggcaatgacggggtgtcggcatga

SEQ ID NO: 181494 - DNA, 816 bp, Klebsiella oxytoca
atgagtatggatcttatggttcaggccatgaaaatcagagtcgggaatcctctacgaaagctggttctgctgaagttggcagataacgcaagcgatctgggtgagtgctggcccagctatcaacacattgccgatcagtgcgaaatcagtaagcgttctgtgatgaatcacattgaggcgctttgcgagtgcgggctgattaaaaaagagcttcgtactggtcctaaaggtaattccagcaacgtttaccagctcaatttacgtagtgcaggagattcaccagggggtagtgcaaatcgttcactacctggtgcagcagattcactaggtagtgcaggagattcaccagggggtagtgcaggagctgcacccagaatcagtcactcttttgaaccagtcaaagaaccagtcaatgaacctataaaacattctggcgcatcggctgacgcctctgcaccggcccgttctgcaaagcaggattattctcctgatttcgaaacagcctggcagtcttacccaaaacgcgctggtggtaattccaaatcggcggccttcaaagcctggaaagcccgcctgaaagacggggttaagcctgatgacatgctggcaggcgttaagcgctatgcagcctacacccgagcaaccggcagtgtcggcacccagttcgtcaaacaagcgacgacgttctttgggccagatcggcacttcgaagaatcctggcaagcgccatccgcccccggaggtgggcgccctggtgcgctgccggtttccgggtttagcgagcaggactatggcgaatcaggttgtcagtggtaa

SEQ ID NO: 181495 - DNA, 747 bp, Klebsiella oxytoca
atgacacaacagtcaacggtgcctcaggcacacgatcagctcttcaaggctggggagaatttctgctggctccctgataactggagtaatccatccgtcttcatagacctcactcgctttcagtgcaccaaaaaagtcatctatggcttgctggtaatttctggtctgactgctggtcaggtgagggcgcagtctcctgaaatcctctctggataccctgggcatgtctcgctttccgtcccggcagtcatcacggaaagaatccaggatcagaaacaactcatcagcgacggcattgaactctttccgcttatctcggtttttggcaagccagtgtccgagccaggcgccaataccaaaagtaccaaccgtccagatgaacgtaacgaggggagggttggtgttgaacagaataacaaactcactccagatggtacccataaattctggcgactccttttgacccagttgtcagcttttgcagctgcgttttccgtcgggatttatctcagtatgcgcgcgaatattcgccgcgactggcgccagcatatcccgaaaggacggctcccgaaagtgcccgccgtggcgatgctctccatgttttgtataccacggaagatcaagccttttcggtggcggttgtgggagcagcgttcgtggttcctggatatgaagattcgtcatggctttgaggtcgcgtaccgggacgcctggtactggaaaaagcttgtcgcggagaggtggtga

SEQ ID NO: 181496 - DNA, 240 bp, Klebsiella oxytoca
atgtccgaattttctacaattttacgagagattggtttcgaggtggttgcaaaagcaaccaagagaacaacgaggcaggtttataaatgggagaagcaaaagactctgccgagaagtgactttactggtgaaacattccttgcgcgagcgatagcccaggcctccggtggaatttattcagagcaagaaattcttgaggctgcaatcgcagggcgccgtcaatcctctgcggaggcgtga

SEQ ID NO: 181497 - DNA, 678 bp, Klebsiella oxytoca
atggttcaaatggataaagtgcgtgaagaatttgctcagcggctggcactggcctgtaaagaagctgggcttgatgatcatggccgtggtatgtcaatcgccagagctcttaatgtttcaccaaaaggggtcagtaaatggcttaatggagagtcaatccctaggcaagataagcttaatcagctagcgcagttcctcaaagctgaccccatctggttgcagcatgggactaattctgagggctccaatgtggaatacattgggcaagtaaaacccatgcgatcctaccctctaataagctgggtaagtgccgggaactggtatgaggctgttgaggcatacagtctaaaaagtattgacgaatggtatgaatccgacattcatgtggtgggagacggcttttggcttaaggttcagggggactcaatgacctctcctgttgggatgagcgtacccgaaggaatgataatcttggttgacactggaagggaggccatcaacggcagtttggttatagcgaagtcatctcgaacaaatgaggctacgtttaaaaaacttgtaaatgatggtgggaattattatctaaaaccactaaaccccgcctaccccatcatccctctcaacggtgaacacaagatcgtaggtgtcgtagtagaggctaaaattagatttatttaa

SEQ ID NO: 181498 - DNA, 213 bp, Klebsiella oxytoca
atgaaaatgtcaggcgctgaatttgatcagtttaaagaagttgcggaaaaaacattccaggcggaattaatttgctctctcttggaggatcacccacatcagttagaagaacgtgaactttctgcaattacctctcttgttaaaaaactcgctggcgatgcatatgcctacatgaacgaggtcatttaccagcaagagaggactgacaaatga

SEQ ID NO: 181499 - DNA, 411 bp, Klebsiella oxytoca
atgaaaactcccgtacaaatgcttgaagcagtcgcgtcaaatataatcgaaaacaccgtccttcttgaggttatctataaaaatagcagtgagaattacgagacggattgcgcaatagcttgtttgattcgttcaatgcaaaagacagttgataacatgaacgaatttattcaagagttaggcagtgtctcccccccccatcaggaaaagagtgagggcgatattgcagatgatgtttttcacacaactattacggcaagaaaactcgaagagcttgcgcatgtttataatgaggtttacttcaccgatgaagataacggtaagcccgcaatgtatatggcatcagcaattttcgactatgcaattaaggttagcagtgaactaaaaaacatcgaagcgaaattgaactaa

SEQ ID NO: 181500 - DNA, 210 bp, Klebsiella oxytoca
atgtgggaccctgtaacaaatacctgcattgaagatgcagcgttatcagcaaataaccttaatgaattattagatctaatgtatgcgaactatggaagaatgaatttacctcaatgcgaggcattgctgggtcttgctctaaatttatcagccgaagttgctatttggttaaaggaggaggaaaagcgccgtgaaaacaaatctgattga

SEQ ID NO: 181501 - DNA, 582 bp, Klebsiella oxytoca
atggatcacacagtatttaacccggaaccaacgtctgccggcatccggttatctgaaagcaggattattggttactccgccgctattcgtgaactggataacggtcactacgacaaacgtctcgccgaaggtatggagattctggcctgcatcatggaggcggtcgaaagcagatggatcacgcccaacatcgagaagcagatcatcgtctggcgctggttgctcgccgccgtattcatcaccgaggagcgggagaagaacgggactgtagacgttctgaacgacgaaggcggcgttgatacagccgttatctattccggcgaacatggtgcaataagtgtctaccccggaccagagcgctttgcactcgctaaccatattgaggctggcgccattgagaaatacgggtctgatgttggccagcagctggcgctgcggatgtatcaggacatggtcgttattgacgacaaattcggctacaggctatccgcaatgggccgggaaggtttcaacatgttgcacgacggctttattgagcaaatccagaccgaaggcatgccagacatgccggttatgcactga

SEQ ID NO: 181502 - DNA, 189 bp, Klebsiella oxytoca
atgacgatggcgcagtttttccacagccacatccggccagacaacagcaatgccagtgattatgcgagtcttcggcatagcctccacgacgccgtaaaaccagcccctgaaggcatggcccgcatgcaactaactcgcaaccaacgccgccttgcgaaaaaactcggcatcgcactgaaggaggaataa

SEQ ID NO: 181503 - DNA, 750 bp, Klebsiella oxytoca
atgaacacagtaactatcaataataaacaactcccggccgtcgattaccgcgggcagcgcgtagtaacgctggcgatgatcgatgaagtccaccagcgcccagaaggcaccgcacgggcgacatttaaccgcaaccgtgagcactttatcgcgggcgtagattacgaagaactaggttcggacgtaatacgtacggacctcccggaaggcactttctccaaatttgccccgtcagggattgtactttttgaatcaggttacctgatgctgacaaagccattcaacgatgatcttgcatggaaagtacagcgcgaactggttaactgttacttccgcattcaacgccaaaaatcacaggcagagctgatcgccgaaatggctctgctgaatgttgagcaggagcgccgcctctaccaggtggaggaacaggtggaaaccgtagccgaagctgtcgaaaacattaagcgcggcaccatgcgggccgggtatgtcggttatcgccaggtggtcgctaaaagcggtatgactgatgcaaagtgccgtaacctggttaacgcctatcgtatcccgaccgacacgcatgagtttatgacgcctgacgggctactttctcgccgggctatcgtggagcttgagccgttcatgaaagcttttcgccagatgatgtccgaagcggaaccccgcggcactcgctggtatcacccgaaaatgggcctgtttcaggctatcggctgggagggtaaagcatga

SEQ ID NO: 181504 - DNA, 567 bp, Klebsiella oxytoca
atgatcattccatcaagactgatccgcgccgctctggtgtgcgctgcaaagaacgatgttcgctattacctgtgcggacttcacattacgccgaggtacatcgaggcaacaaatggtcatgtggcactgcgcatggagcatggcatcaagacgaagaaaaatatcatcgttcaatttgaaggtaccgttccggtcaaagcggaaacaacggagcttatttttaataaagagcctatcgccattcaccgcgatcagttccagcgccgtctgtccattaccgggattaggttagtggatggtcgattcccggatttagatcgcgtaattccgaaaaaactggacctcaacattcacccggtgatccaagccgaatttctcagttacccgaaaaaaatgtttgggcgtgaacgtacttttattcctgtgcaactgcggccttcaggtgattgtggtgcggttcgtattcagttcgacccagctattaactcaacttacgggaatcctgaatttgtagtaatgccctgccgtgatgacgcattcaaagtggtagaggagcacctgggatga

SEQ ID NO: 181505 - DNA, 225 bp, Klebsiella oxytoca
atgaaaatcgaatatcaggactacggatccgttgcaaacattgtggtcacgagcaccgtttttgaatttcgtaaacacaaccgcgcaattgatgtggccctcttcctggttcctagcatgaccagcaatagcagcggtttttttattatgaaaacggttctgagtggcaaaacaaagcacgccctccgggcctacaagcatctgatccgggaggccaagcgatga

SEQ ID NO: 181506 - DNA, 315 bp, Klebsiella oxytoca
atgtctacctatagctgtctgaataaatggagtcagatgccgcagcgagagccagacccgaaaacggtttgtagcttctgcaagcagattaccgttgcggaaaaactgatcggcggacccagcgtaaacatctgcaccaaatgcgtcgacctctgcaacgacatcattgccgatcggcaggatgtacaccgcaaaaagacaattgaggagatggcaaaaacgctctgtcagtgcgacacggctctggtggccgaaagggccattgcgcttgccagcagcatttttgatgccggctatcgcaaggagaaaatctaa

SEQ ID NO: 181507 - DNA, 192 bp, Klebsiella oxytoca
atggtagacattgaaatgattgatgaggaagaggcgatgaggatgatccgcgtatcttcacgcgtgaccatccggaaatacaccgagcgctacaatttccccaaaccggtcctgacctatcctaagcagtacctgcgctctgctgtcgttgagtggatcttaaatgggggtgtcaaccagaaatcttcctga

SEQ ID NO: 181508 - DNA, 1182 bp, Klebsiella oxytoca
atggcaatcagtgacacaaagctccgctctatctatggcaagccatattccggcccggctgaaattacggattctgacgggcttggaattcgcataacccccaaaggcgtgatcagctttcagtttaggttccgatgggaaggaaagcagaaccgaatggggctcgggcgctatccagcactgacgctgcgcgatgctcgtaatatcgttgcagaccttagggagtcagccgacaaaggaattgatccccgaacgctggctggtggcaacaaacccaatactaagccaacggtaaaggattgccttgattactggaaggacaattacgttgacttaacgctaagacctaagacgatagctctttataagtcaacggttataaagcatatgcgtgatgcttttcccggcattccggttgaggatatccccgtccgcttgtgggttgaaagatttactgaagaggaaaaaatcaacccgcgtcgcgcccggcatttattgatacagctcagatcggctattggttggtgtgcgcgccgacagttcattagctcgaccgaactcatgcttttgcagccgaaagatattggtgttaaaccggcggttggagaaactacactcacctataaccaactcgccaaaatctggatggctattgaaagaagtcgcgggtcaacctctaaccggttgcttcatcagctactaatgctgtacggcgctaggaatagcgaaatccggctggctgtaaggggtgaattcgacagagaggagggattgtgggttgtgccggtagagaaaagcaaaaccaacaaaattatcaggcgccccattttctccgctgctgatgatttgcttaaaaaagctgaaatgacgtacggaaatatactttttccgggcgaagatctgaaaacccctataaccatttctggtgcaaataaatttcttagaagaatcaaggattcgttggggtttggtgagtttacttcacatgatttccggcggacattggcaacccggctatccgaagagggtgtggccccgcacgtcatcgaaaaaatgctggggcatgagcttggcggcgtgctttctgtttataataagcatgactggattgccgaacagaaagacgcctatgaattatatgccgaaaagatattctggcatgtcaggaagatttctggttga

SEQ ID NO: 181509 - DNA, 591 bp, Klebsiella oxytoca
atggattggttatggggcgttgaaaaattatcacctgcggtagttgggttccttggtgcctggctagggagtcgctggggggtaactaaattcaaacgtgaaaagcactgggaaaccaagatcaaaacatatgaaacagtgatccattgcttcgagactattggttactggggagacaatgaaggtaatgaggcatttttagaagttcgtgttggagggttagaggagggggtagagcagttccaccatgctatgcgtcagttagcacaagttggagtgactggagcaatttatttatctcctgaatttagaaacactgcttatgaaaaacgcttaaaaattcaacaaatgtatataggtagaatacgtgaaataaatgacgaacttggtcatggagaagattacatatactacaataaggcagaattatatataaaaatcagcaaattagcatatgagtcagtagaggagcttaatctgattgctgaaaaagatattggtgttgaacgtaataaacttctccctcacttgtcagtaaaaatgaatgagattacgaatgctattcgggattttcagaaggatttgcggtaa

SEQ ID NO: 181510 - DNA, 1140 bp, Klebsiella oxytoca
atgtcgatagcagacacgctgacaacagcagccgaagcgtatgtagaaaaattaagtgaggtcgtaaagacgccagattttagtattacgttgggtggtgtagccctgaccgaactggccgaccgaatcacctcgctatctgttacagataacaacggttttgatgctgaccagctaactctgtcagtagatgactctgacggagtaacggatttacccccacgcggtgcggagctggcggtgtccatcggctggctgggtgaggcgttgatctacaaaggcctctacaccgttgacgaggtggggcatagcgggccgccggatgttattgacatcaccgcacacagcgctgattttcgcgaagagatgaacgtcaggcgggaggtgtcctggcatgatgtgacggtagagcgggtggtatcggccatagcccggcgttatgacctgatgccgatgattagcgaggccctgatcgacattgagatcgaccatgcggatcagaccgaagagagtgacatgtcgtttttaacacgcatggcggagatgctgggggccattgccaccgtgaaaaatggctgtctgctgtttatcctgcctgggggcggcgtcagtgcatctggtagggcgctgccatcggctgagataacccgtgccagcggagatcgtcacaggttccgcattgccgatcgtgatgcttacactggtgtgcgggcgtactggctggatcttaatttcggcaagaaaaaaccggtcaaggtcactaagcgcaaaacaaatactgccagaaaaaagcctgaggagaaaagcagccggccggagggggattacatggagggcgctgaaggtaacgtgtatgttttgcgtaaaacctatcagaacgaaacggcggccaggcgcgcagctgcggcaaaatggatacagctccagaaaggcgcggcacagttttcgataaccctggcgcgcggccgcgccgatttatatccgggtatgcatctgaacgtgtcgggctttaagcctgaaatcgatactcaggattggatcattgccagagcggaacatgtgataggtgataacggatttaccacgaaaatggagcttgaggcgaaaataagcgactggattgcagaaactgaacagtag

SEQ ID NO: 181511 - DNA, 318 bp, Klebsiella oxytoca
atggctaaaaaaactaaaaacctgttcacactgatgcagccggtagttcgtaaagacagtgagatcggtcaggtggaaatcaccggcgccatcagtcaggccggatcgttgcgcggcctgaatcttatccgcgttgccaatatggatgcagactcaattgccacgctgttgacgcgagtcaccgcacctgcgctgacacaaaaagaaatcaacgaaatgcacactctggactttatcggcctggcagagcttctggtccctttcttgaatccgccggagcctggagcgtcgaacgtggcggagacggagagcgagtaa

SEQ ID NO: 181512 - DNA, 672 bp, Klebsiella oxytoca
atgattaatagacctatagtgtacagtgcaaatgctcaggcacatgtaaacacattcaacggcgaagccacgcattgggacggtatgtgcgcagttcgtaaaaacttccgaaaggaggtgcgagattattaccgtaatgaacaaggttttacatgtccatactgtggaagattgagagaggaatttcatggtggacagtgggatattgatcacatcattcctaagtctttatacccagaatatctttattgccccaggaaccttgctgtcgcgtgtaaagattgtaatacacataaatcaacaaataacccactattatccccgctggaacatttatcgccttatcctgaaaactctagatcttacaaaataatacatccacattttgattcctatcacgaacatatcaggctaactagagataataatgggagaacctgtcacgaggtaattacagataaaggtcgagaaacatttcatgtatgccatttaattcgattcagcgaagcactttctgggacctctgagtatgttcctgagctgggtactgaaattggtattattaacgatgttagtgagtcagttcagatgtggctggacggctatgacgctctaactccacatgatgcggaaatcgccttacaggctctcatgcagagaatacgtcgttga

SEQ ID NO: 181513 - DNA, 1521 bp, Klebsiella oxytoca
atgtttagaataaaatcaattatgaatgaaggtcgggataagatatatgtacatgatattagtgaggattcaggcaacaattattactcaattcttactggagataatgcgagcggaaaatccagcttattaagcaaggctattaatttcttcctatttagtaataaaagagacgaatttcttgagcctgctatcgaactttcctcttgttctgagtcttatcctagcaaaattattgcgttgtgtaactcaagatttgataagttcacatcaaacaatttcttaaaaaataaagataaccaaagaaaaaatatagcttctatgaattacattcatcctgagttaagtgataattctagaagggggatgtcaggaattgttgatcaatgcctgaaaaatactttacgaaatacaaatgctacaagtatagataaatctaatcaagtgcaagaagcatttagtatgtttggactgcaatctcacttgcaccttaaatgtgttttagatacgaagaatataacatacatactggctataataagtggtctgataaatggacaaatgatattgtcagatgagagtattaagcatgcaaggaaaagtcgttatttaaaagacgaagagttaaaaaatagaaacataaagttagacgagtcgattgcaataatttgtagagaaagtgaaaacaaactcaccttagatgttctttgtgatatcttactaatgttggaggccggtaaatttcctgaagaaaatctcaatgatatttatttctctgtcgctaaagggagagtttactcagaaagaaaaagtttggtttatgatttcaacggaatcgatataataaagtatttgtttattttagatgtgataaatgtttctgatttccaagtaatgcatcttaacacccaaaaagaagtcagtataatttcactgagttctggacagagaactttgtttggtcatgcaattgtattaagtagctttgcagaaaaaaactgcatggtttgtattgatgagccagaaaatagtttacatcctgaatggcaacttaattttatgcatttcatatctcttttgtgtcctgatactcttggagctcatgttttcattgcaacgcattcacctcagatcatttctggcatgcggtttgataatggctgtgtgttatctctcgcaaacagagataatatagaactgttaaagatgacagataaaaaatatgataatggtggactgtatgaactacagccgttgaaaatttacagggagcaatctgcagacaaacaactaacaggtgtttttaaaagtcctggttataaaaatgactttatcataaggaaattgctcttaatactatctaaagcttcgaaaaaaattaaccttacaaaaaatgataatgaatttattagcgagattgacatcctctttgaaaaaaagagaataccagaaggagatcctgtgcagttgttattgaagcaggttttgagcttccaaaaagcaaggagttctgatgattaa

SEQ ID NO: 181514 - DNA, 213 bp, Klebsiella oxytoca
atgaaaacattcaatcaattaaaaagcctgatcgacttttgtcagaccgatgcgtttttcctggaacacctgaaccgacttcagatcgctggcgtgatttatcttgatgaaggcgatatcgatgctgaccgcaagaccgtaagtgatgatttttatgatcgacttgccagcgtgtacggcattgagccagaaataaaaagtgaggaggcataa

SEQ ID NO: 181515 - DNA, 1299 bp, Klebsiella oxytoca
gtgacctatttcggcacggtcttttctggttgcagttcgctgaaaacggtcggcgcgggtttatttgccgggtgcagccaggcgcagacattcgcctctgcattttacagctgccgctctcttgaaactgtagcgaaagatattttcagcggctgcgtagaggtgacgacctttgccagtacgttttatgggtgcagcagcctgacggcgctcccgtcttttactgactgcgcgaaagtcaccactttctcatacgcttttgctaactgtggatcgctcacgaaaattgatgctgacgcttttgctgagaaagcgctgataacgacattcacatacgcttttgtaaactgtacttcgctggtttctgtggggaacggcgcatttcggggatgtagcgcgttaaccagcctgggctatacgttttcaggttgccgctctctggtttctctcgcgggagatatgtttgccggttgcgccaaagtgacagtcgtcgatttcttgttcgaaaagtgctccgcgctggctggactgccaaaacaactattcagcgacatggtgtccctgaaaggcatgggatcgacattccgggattgtactgcactcatcgcgctaccatccggcctgcttggtggttgcatcaatctcacttcgttaacgctgacattctcgggctgcacctcactggcggtattacccggcgatttactgaaaaacaacaccttgctgaccagtgccggatcgacgttctacggttgctcctcactgataaatattcccccgacgctgttcgcgtcctgttcgcttattacctcttttggcgccacgttccagaataccggcgtggaggagataccggaaaacctgttcagcggcaacccgctggtgacctcttacggccagactttcaggggctgtaaaaacctgcgctcagtgccagccggtctttttgccgccagcataagtgccacggtattcacgaatgtcttttcggaatgtagtgcgctggaaatcgtcggggcgggattactcaacaccacggcggtcacgacggtggggtatctgtttgacggctgcgcgtcattacgcagcgacgttaacacgatatttaatcttgcgagttacccggagattgtcaccacaacggcaatattcaggagctgcgcattactgaccggcaaaggcctggtatttatgggtaaggtgccgaacgtcaccgcgcactattacgcgttttatgcctgtgcaggtctggacgattacgacgatttacccggcaactggataacgaacaaattatga

SEQ ID NO: 181516 - DNA, 1062 bp, Klebsiella oxytoca
atggtaactttgaaaaagaaatacggtaaaaagccgatagccggcaccgccggccctgacattgtggagtcactgaaggccgatcccgcgttgacagcgttcagctttgacggcccttatcccgtgcgggatatggccgatttgctggacaatctctattgcatggacaacgggcgatactatgagacgccagtagacttttacggactggctaaagctccgcgtcagagcgcctggcatgagtcggcgttgtatttcaaacgtaatgtgctcaccggctgttttatcccgcacaaactgctcaatcgccagaccttttccgcgtttgcgctggactggttcacgtttggcaatgcctatctcgaattgccgcgtaatcgcctgggcggcccgcttcccttcaaacactctcttgcgaagtacacccggcgtggaagcacagatctcgatcaatactggttcatccggcgctggaaagaggaacactcgtttaaaccgggttcagtgtgtcacgttctaaatcctgacattaatcaggaggtctacggcatgcccgaatatatggcagcactgctggccgccagcctggcccactccgctgacatgttccgtaaactttactacgacaacggatcgcatgctggatgcattgtttatattggcgccggacagattgacgataaaagcatgaaggcagtcaaagagacgttgaccggcgcgcgtggtaaaggcgcatttaaaaacctgctgctgcatgcgccaggcggcggcaaagacggcgtgcaaatcctccccttccagcagatcactgcgaaagatgagtttatcaacattaagaacgccacacgtgacgacatactcgcagcgcaccgtatcccgccgcagctgatgggcgccatgccagagggaaacggctcatttggggatatcgagaaagccgcacgggtctacgctatcaacgagctgacgcccgtaatggaggcgctgaaggtggtcaatgagtggatcggagaagaagtgatccgctttaacccttacgcgttgcttaccgctgagaaataa

SEQ ID NO: 181517 - DNA, 2265 bp, Klebsiella oxytoca
atgaatgattataattttaatgttctcaacgataaagagttcgaaaaactagcaattgagctcataggtaatcaggaaaatgtattagttgaacgatttgctcctggcagggatcaaggtatagatggccgtttttattcaccttcaggaggttctgtaatcattcaagcaaaacattatgctggaacaggcttgggcggattattgagaactcttgaaaatgatgaactaccaaaaataaaaaagctaaacccaagtagatacatcttagttaccagtgttggattaacccctcaaaataaaaacaccataaaatctttacttcacccttatatattaagcacaaacgatatatatggaaaggaaggtgtcaatgatttacttacacaatacccatccgttgaaaaaaacttttataagctttggatttcaagcactaatgttttaattaacattctaaataatggaatcgtacaaaaaagcaagtttctaattgaagaagcgcatcttgaatcagctagatacattcagacaaaacagttcgatgaagctttagacatattaaaagaaaaacatgcgcttgttatcaccggttcaccaggagttggaaaaactactttagccaagcaattagcactttttcactcctataaaggatatgagatttatcacattgaagactcaattagtgaagccgaatcttgtttttgcccagaaaaaatgcagtttttttattttgatgattttctcggcgcaaactatttggatgttatagaagggaactttgattcaaagataatgaattttatccgaagagtaacattagataaaaataagagacttgtattaacatcaagatcaaacatcctcaatagagcaaaaagtattagtgatatatttaactttggaaacatatcaaaccgtgagtatgaaataagtgtaaccgaacttactcaaattgaaaaagcgaatattttatataatcacatttggcacagctccctgcccactgagttttcagatgtgtactttgataataaaaattactgggaaataatcaaacacaaaaacttcaaccctcgattaatatcaattataactgacggtgaacgattgtctggcttgtctaatgaggaatactggccttatataaaaaacgccttgaacaatccagagattatttgggatttatatttcaaaaggcagatacctgatgaaatttatgatctcgttaatattgtcgtcctaaatggtggaaatattgaagaaacaaaatgcaaagaaatattaaagagagtctttgagaaaaaacacaaaaataattactatgtcaaagttcataaaatagatgatctcatcaaagaatcgttgaaatcaaccctcaatagaaatattcgattaaatcaaacatcgcacattgcaagtataaccccttttaacccatcaatttctgactatattatcaatcgcatagcaaaagatgacactaatctttctttgtatatgttggcatcaaaaacctatcagtcgattaacaccttattttttttagcagttaacaacaaattagataataaaacatttaattcagttttaaacatattaatatccgacgccatgagtaaggatattaataattacgcaacgcatttatattacaaagttttaacatcagatatatctgacactgaaaaactaaaaaaaataccgccgtctacatttttaaatataaataaaagccaagtatcttatgattctgaaataggtgagtgtattatttgggcaattgagaagcaaccacacctattctcaaagaaattcgctattgatttcattgactatgctctttgctcaagtaaacaatactctttataccatgaagactatcttccccttgcaaaattaatgacattttatcctgatatagagcaggacattaaattcagagaattaaaagatcatataatagatttttgggagtccggatttgatgagatccttggtgactcagctaaaatccaaaatctctcccctgatgattttgacacagcggatgatgttgctttgaattatcttcatgagtttctcgacgagtatcctttcgaatttcatgaaagagatattgagtccattatggataatattgacacatcctcacatttaccagactatagctattatcatgatgatgatgatggatacagacctaaagccacccagtatgtaaatactgtaagctatattgacgatttattcagcagatga

SEQ ID NO: 181518 - DNA, 528 bp, Klebsiella oxytoca
atgtatgatgattatgatcagcgagaggcgaatattgccagcttcctgtcgaacaaaataaaacgatgcatcaaatgtgggcatgagctggactacaaagagaagttttattacacagatcgaatttgcaatctctgtcgcgggcttcaaccgttcgatagtgagggcgttccggaggaagaatctgaaggtaagtcaccttttccaattattaatctcgacttatcaaagtatgaggacaaaggacagcaaaacagatctgattttgagaaacaggtctttagccgttatcctgaatggcaattattacgagaaaaagcggaaaaagattgggatgcagctcatccgcggcctgaaggaataacctttgttactgaagttcctagttataatttaatcattactgatgagcgtatagcagagctgattaatcaatatgatgcgaatggggcagtgagcattaaagttgaagagttaatttcattgctttgggaaataaggggttatcggaaaatttgtaataagtga

SEQ ID NO: 181519 - DNA, 936 bp, Klebsiella oxytoca
atgattaagtcacctcttaagtgggctggcggtaaaacccgcgttttgccgcgactgctgaattacctgcctaaagccgattgcttgattgagccctttgtaggcagtggcacagtctttatgaatacggaataccgccgctatgtgctttgtgacagcaatcgcgcattgatcaatttcttccgcgcgctcagggaagaccctgaaagattgatactgatcgccaggaacgtattcagaaatggcaataacgaagatagctattacgaagagcgcaagttgttcaaccacctgtcgtgggatgacgagtgtgcagatgattacgttgtacggtgggctgcatcatttttatacctgaaccgccactgctttaacgggctttatcgcaccaacagggatggcggtttcaatgttccatttggcagctataaggcgccttattttccagaagcagaaatgcgcctatttgccgaaaaggcgcgggatactcacgcgctctttctttgtaatgattttcgtacttccattccgtacgtcgccaggaatcgcctggactccgtgatttactgcgatccgccgtacatcccgactagcaaaacagccaattttaccgcttacggcaagccatttaccctggatgatcaccgcgctttggttacggcgttgctggacgttaatcgccagcatggaacgcgatcggccatctcgaatagcgacacaccagaaacacgccagatctactccgctttcaatctccacgccttcagagttcgacgttccgttagcgccaaaacccgcgatatggccggtgaagtgattggcgttcttcgcgtgtgtggtggttgcggtcgttctggtggtggaggttgcccggactgtggggcggtgatgggtgatgcgacatatgccgaaatgtttggcgcgccggcttgttaa

SEQ ID NO: 181520 - DNA, 567 bp, Klebsiella oxytoca
atgagctggtcttcgttggttaggataaccattggtacatttctattagctgggttgtcgttctctacatacgcgaagaactgcaagaaaggtataccatgcggtaatttgtgcattgcggttggaaaaacgtgcaggattggatcaagtacctcttctgcgtataaaaattattcttactcttacccatcatcttctcttcatagttcaatccctaactcctcttcacattccccttcagcgaaggttgagggaaaaaacacagcttcaactgcgaaaacctatctctgtcagtacgctattgcagcagtacagaatggtagaataggtgctttacgtgtgctgggtagtgcagaggtaacgttgtatgtcgatagcttcaaagctaaccgtttaaacggtacatacctgctctcaccaaagctgaaaactaacggtaagttgatgatggcagatgataaaagcaaagtgtatgcctatgattcgtcgctgatgaactttgcaattagtgaccgcatcgcaagaagcactgagcaatgggataattgtaaactggttcacaattaa

SEQ ID NO: 181521 - DNA, 498 bp, Klebsiella oxytoca
atgaaaaaattactaatggctttcgtgattctaactttacctctgctctcattcgctaagggtattggttatggaaatactaaatgggacatgaatccgtcagaagttgttgcggctcagggcaatggcgcacatttgatctcaccagagaagtataaagataattttgggaaagtgcggattgataatgtatcgatcggtagcggtctttatactgtcacattcctttttaatagcgcagatcgtcttgtacaaacgaatgtagccagtaatgagaaaaaaaatgaaggtatcgctgcgagtcaatttggcacattgagtcaattgttaactcagaagtatgggaaacctgagttttcagattcagataaagcaacctggaaacttcctgaaactacggttgagttaagtaagatggtcatttctgggatcatggcccaaacagttgttcgttacattccaaacagtagggtggcaagcgatacttctaatctttaa

SEQ ID NO: 181522 - DNA, 309 bp, Klebsiella oxytoca
atgggggagtatcaaatgactaacagttacggattgaaaacgcctgaacaatggcaacaagaaagtattcttaccctgctgtttcattacgatcacgttgaagcctgtttcatggctgattcaagcaaggagctaccagaggatcacgactggaacagagcggaggagtatttagaaagcctgatagaatggctggctggttatacggacgaaagcgaggtgagaaaggctatcgagtgttacagcatcaaaggcagtgaagagcaaacagaatttttcttaggtgcaattctcggagatgagtattga

SEQ ID NO: 181523 - DNA, 198 bp, Klebsiella oxytoca
atggagattatagagatgaacgaacacacaaccgctttcagccctattgagagcgaagaagaattgaaattcgccgtagcatttttggacatgtggcagagaagccaggagcacggcgtgaactttgaacatgtgttgaaagaggcaattcaacaagcaacaccaaacgaggatcgtaaatgggggagtatcaaatga

SEQ ID NO: 181524 - DNA, 579 bp, Klebsiella oxytoca
atgaaaggtattagccaggcgctaaagagtgcagacgatgttaaggcagtggcagcagagctacagcgcaacgccagaagcaacctgttctattgcttgtgggtgtttatgtatgagagcgggttacgtatctctgacgtgctcaagctcaagtatgaggatgtagaagggcaatctcacctcaaggtgaagcaggaaaaaacggggaacgtggtaaggccaaaagttacagcgtccatgttgtcagtggtggcagaacgcaaggcagaacaagctaagatgcctgtagctacagattacattttcagtgctgccacattacgcagtagaggaaaccccgttacacgtaacacggtgtttgccgagttcggcaagatgggccgtagatcgggattctctaacgtgggatgccatacaccacgaaaaagtcggggccgaattttattcgagaatggggtgccgattgaacagatcgcccatttcctgggacagacagatccacggtcaacgatgtattacatcgggtatggtcaggatgtgcaggacgatttaacagacgagttttctttagaatggtga

SEQ ID NO: 181525 - DNA, 168 bp, Klebsiella oxytoca
atgagcgacattataaattcgaagaaagaaccgcgcacttgcttacacattcctgatgaaacgttccaggccttatttaaggaggcgagaaatcaaagagtgacagttacagaatacatcctcaatgttctgaataaagaggcaaccaatcttaacaagggcaagtga

SEQ ID NO: 181526 - DNA, 558 bp, Klebsiella oxytoca
atgtggattctgaaaataagccacgtcaacgggcataaatttactgatggttctaaaaatctctattgctatttaagggggtttgaccgtgcatttccttcttacgcaaaaataggtgatgtgtttggaataacgccaagagccgcagaggaacgagttaagaaactgcttgaaatgggattgattattaaagatctgcgccctgggacttctaacctttatcaagtattagaaattccacgagaagaatctccagaaatacagcctacttcccttgaagttcatgaaagtgctccagcaactacgccagcccctgaaccaataaagaccgcagaggaaaagccggatgatgatgtgattattgattcagtgtgcgaactgctgtcaaagcctgatagtttacgacagcaaaacaggggagatacatttataaattatgctcgtcgtgtaatgcaaagtaaccataagaaactaccttccagattcgaagaagagttagagatgagatttgaaaatcgttatccacactttcatgaacgattcggaacaccattttaa

SEQ ID NO: 181527 - DNA, 282 bp, Klebsiella oxytoca
atgaacaaactttacctattgaacgaagccacgcttcatcaaatagaatgtaacaccgtctgccaacgtctttattatcaccttgcatctctcaagcgtgaaagcggagcaataaaagccaccgtgaaacacattgctgatggtgtcggtattagtgaaagcggggcgcggtattggatgttattaatgcacgatgcagccgttattactatggagcgtcacggcaagtattacgacattaccgttaatgatgcggtgagttttatcactacaccccactga

SEQ ID NO: 181528 - DNA, 387 bp, Klebsiella oxytoca
atgggaagaaaagaacgcagtaacattgttagaatcgaaaaagcagtgagagcaacaatacgtaaatacagccataagctaaaagattattcaagagaatctattcctggcgagatggtaacgacaattatagaacaccctccaacggttccagccggatcagagtttgaattattgcaggatgttctatcgtcaacggacaacgtttattacaaaccgcgacgtagaaaagaatactttattgacagtagccaacttaaatcctggcaaattatcgggtttgagcattacgccgattatgtcgggtattcacaaactaacggcctgagtggtcacactgccgatttggattttttatttaatgacgatagggattataatgactaa

SEQ ID NO: 181529 - DNA, 339 bp, Klebsiella oxytoca
atgactaacgacacaattcaatctctactccttagtttcgaagataattatcatctcccgctactacaggaagtgaataaaacatacatcacagcaacgcctgagagcctcctgaacgctgtcagacatacagagcaagccattacagcccttgagcacctgcaaacctctgtagcgcgtttggtggagcgtgacggcagcacaataaccgctgatcaggcgtggcgagcagcaaatgcccttgaagagcttgcttgctccctgcaagtcattacgcttgagctgggagagcttgccgttagcattgcagagaaatacgccgcaagtgaaattgaatag

SEQ ID NO: 181530 - DNA, 225 bp, Klebsiella oxytoca
atgttcttattaaataatcgcgaccgaatcctaaaatacaaagatgaagtgattttgtgtaaccctgaaatgatagctaaagtggctgaaatggcaggatgcactgtagaagaaatagaaaaggctgtagagcgttatttcccttctgaaaacaccactccaaataagttaagtattcaggaacggatcgccaataaagtaaaaaaggaatcaaccaaacaatga

SEQ ID NO: 181531 - DNA, 363 bp, Klebsiella oxytoca
atgattatcaccctatcagacgtttttccggttcgtaaaagctacacagacattgtgagtgctgcgaccgataattttgcagcagtagacagtaaagtgtttgcttctcttcctgctgatgtgcagtgcggcgatgttatagacgcttccggcgatctctatacatctgggaatgtggctttcgtagtcgtcagtgaatttgtcactgctggcagtaataagcctgtaaacgtcctacgcgctcccaacgttggatcatacgttgccctcaagagcgacaacctcaacgcagctaaccacgcagcagcgatcagcgcattacaggcgcaaggcttcgccactcgtgaatttttcacctcttaa

SEQ ID NO: 181532 - DNA, 1032 bp, Klebsiella oxytoca
atgattattggaaatgaacgtgtggatctgagtccactattccagctaaccagtacccgcaattttttactgtcgtcactaaacatttttgatggcgacggagttacatctcataaagtgagtgtttcccgtttactggaagataacaccagcctttataatcagcctactgcaaggttctccaacgaacataacgtaacatcccgtcaaagcggtaaagaatggctgatcgagcttccgtatttcctccgtgaggatcttattgtcccggcagacattcagggcaagcgtaagcctggaagcgacattcaagaaacggtgactgacatttacagcgattacatgaataaacacgctatagcgtttatgcgcactcgcgaaagctatcttgcacgatctctcttctctggtcaggtgtatacgcctaagacagacgatctgttaatcgactttggcgacctgttcggcgtagcgccaatgaacaccacgcttgatctgtctgctacagacagcagcaccctacgtgcgattgatgacatggtgagtcaaattaccgaagcggcacaaagccaggcgtcggcagtggagcgaattattgtttttgctacaggctcattctatagcgatctgcgtttcagccctgcaatggaagcggctttccgctatgtcagcccattggacgaagggaacgtagtgttccagcgtcgtgacctcctgccaggcgtgagcacttttagcattccaggcacgaattgcgatgttgtgaaagtaactgatccgctgttacttgcacaaatgggtgattctgacgctatcgctatcgcgaaattccaagctggatcaggtatttaccagaacatttacggcgcggcttcgtcaacgttcgaactccttaatgcagcacctgcggaagtttatagctggagcttcgaaagcgagcgcggaaacgcgattaacgtgatctcggaaaactcggcgttgcctgtgaatcacgggttgggcttctccgttcacattaaagccgcagaataa

SEQ ID NO: 181533 - DNA, 1857 bp, Klebsiella oxytoca
atgtctgatggtggattatcgatcaacgttgcttctattaagacaaccgtttcttttgtggtcgataaacaaagtattgcgcaagcccgtaaagctggcgatgacctgaaaaaatactttgagaaaatcgcagatcctaagattcgttttcagaatcaaaagaaaaacaggcagaaagctcgtaaacaagccgatgatgcgaagtttaatagctctcctaagaatacggctgaaatgaaagcgcagcggacagcagagaagcagaaagcgagagatgaaaaagcacgcttaaaggatcaggcgcagctacagaaacgacaggaaacagccgagctaaaatttcgccatgcagggctacaagtttcaggaattaaaggtaaatacgggcttgatcctaagtctcagtatgaagcgttacgtttcatacgtcagcaaacagaggaatttgccaaaggcaatctgaccagcgcccgtatgaacgcctctattcgtgagcgtgtaaccctgttacgcagagaagccgcacagcaagcgaaggtgacacaggcacagcgtacccagtatgcagcagcagccactaagctaaaggctcagaagggcgggagtgctcctatcgtcggtggtggagtgttaggaagccttgcgttaacggctggctccctcggagtgggacagcgaattgttgccaaagggaatgagaatctggacttagttagaaaatcggaacttgttaagactaatcctaacgtagttaaaacgatggtggcatgggggcagcaacacggagttgatagcgccaatgtcgataaggtgacggacaacttcaaagatgtgcgtgaacgtatcgctatgaccttgaacgatagccagtttaaaaacggcgaatggaaaggcggtgatggcggtatcacttcaattatgaacaagttcggatggggtaaagagcagattaaatccttccaggatcgtcctgccgatctacttcaagcagttaccaatgaagggcaacgccgtggtatgtcacaggctcagattggtacgcttatagagagtttaggtgatgacctgatgcactacaccgatatgttcctgaataacggtgcagagttcaacaagacgctaaaaaccctcgttgatagtggtcagacgctgaacgacgagcagatcaagcaaacctacgcttacggcgatctgtctgtggcaatgggtaatctgatgaatagtgttgataacagtctgttcactggctttatgtccagtttcgctgacgggggcgacgagcttgttagaaatacgcaagtgatcacagaatcagccggattgcttggagagggcttaggcgaccttgctaaacaggtgacgggctttgttggtgagatttccggcgtagtgtctgatcttaacagttcgctacgtcagcgcttccctgattggtttagcgatgctaacaagccagcggcccaggctctctataatggtgctgtgggtggttctgcgaatgctacagcggattggattcaggataatacaggctttgatactcgctcagtggggccagctatcatggattggttaggcgttggtggcagtaatgctggaacagcggcaaatcaatacagcgtaaatggtgattctcttcgtgattctgcaatgtcactcagcagcggcaatgcgccagtgtacacggtgaatcctacattcaatctaaaccttgaggcatccgtaccgctcactatcgccagcgattcgagcagacttgcggattatgtggattttcaggcgaaaacctcacaagccagcttcatgcaatccctcacgttgtctactttgagcggtcaatcatctacaggggggtga

SEQ ID NO: 181534 - DNA, 279 bp, Klebsiella oxytoca
atggctaataatttgtttgtaacctatgaccttatcaaaaccaaggattatcctgctgttcacgaagctattaagtccttgggtaactgggctaaagtcacagagtccaattggtatgttaattcgaattattccgtagaagatgctgcaaaaaaagtcagagcggctatggatagtgatgataagttgattgtcgttgatgccaaaaataactccgccagttggtataatcttttgccagcagttgagaatcaaatacaaaacgaatggaataaatga

SEQ ID NO: 181535 - DNA, 1182 bp, Klebsiella oxytoca
atgtctatcaagggccaatcttatctttatcccacttcggaaggggtctggatgtttcagatcttcattccggtatacatgcggcacattttcggcgggaaacgtctgtaccgtaaatcaacaggaactaaagatctcaccgccgctaaacacttccgtaatcacatgctgatcgagtggaagacgctcaaggaacagtattccccaaacacggaggaacggcgtattcaaaaggccatagccggattgcataagcaaaccacgctacgcgccccactccagaccgtgccaacattaaccgccatgcgtgatcaatacgctgacagatacagtgataagcgctcattctcgacgctggctaaatctgctcgcgccgtagaggtgtttctcacttcgcttgaccgtgcagacattcagatcacggagatcagacggtcacaagtggcgatgtttatcaatcagcaggacaagaaagcccctcaaaccgtgcagaactggctaacgtgcctgggaagtttgtacgagtatgcacggagaggttacgacgacatagcaccagataacccgtttcacggtcacaatctcgaagcgagggcgacgattaccagctatgccccattcacccctgaccagatgcaaaagctacttgatgcagcagagccggaaatcaggaacattataatcatggggctgttttcaggatgccgccttgatgaactggcaagcctcaagaagtcagaaatccaaacggtggaaggtgtacgcacgttcttcatttcaaagtcgaagactaaggctggtatcagacatgtgccgcttcactcccggctatctgcgatagtcgatgaatacatgagccatagttacggcgaatacctattcccacaggctaacaagatcaatcgtgctgacgggaagaaaggccccttctactctcaagcgttcaccaggctacgccgtcgtgtattgcctaccgctacagaccgtcaatgtttccacagcttgcgcgggatgttcatcacctgcttagaccgtgcaggagtccccgaacaacggatcggagccatcaccggacacaccgaacagaaagcgaaaaccgaagcatttagaacctacagcaaaggcgcggggatgaaggaactatcggagtatgttggattagtcgcttacagctttcagtaa

SEQ ID NO: 181536 - DNA, 852 bp, Klebsiella oxytoca
atgcaaactgtaaaactgaacaacggtattgaaatgcccctgctgggcttcggtgtgtttcagatgtctgatcccgctgaatgcgaaagagccgttattgatgccatcgatacgggataccgcctaatcgataccgccgcgtcttaccagaatgaaacccaggtcgggaatgccctgaaacagaccgatatcgcccgtaacgagctctttgttacaaccaaactttggctacaggatacaaattacgaaggcgctaaagcccagttcgaacgctccctgaatcggctgcagttggattacgttgacctgtacctgattcatcagccttacggcgatgtccatggagcctggcgtgccatggaagaactgcagaaggcaggcaaaattcgcgccattggcgtcagcaacttccatccagaccgactggccgaccttatcgcctttaacaacgtggcccctgcggtgaaccagattgaagttaaccccttcaaccagcagctgcatgccgttccatggaatcaaagccgtggcatccagccggaagcctgggctccgtttgctgagggtaaaaatggcctgttccagcatcccgtgttaacggcaattggccagaagtacggcaaaagcgtgggccaggttgtgctgcgttggatcttccagcgaggcatcgtttcgctggcgaaatcggtgcgcaaagaacgtatggctgagaacatcaatattctcgattttgaactcagccctgaagatatgctgcagattgccgccctcgacaccgcaacaagtgctttcttctcacaccgcgatcctgccagagttgaatggttggccggtcgcaaactggacgtttaa

SEQ ID NO: 181537 - DNA, 984 bp, Klebsiella oxytoca
atgaatgaaaaacttgctcgtttgatttttgattttcaagaaaagatcttggtcgcgctaaaaataatgcatcgttctggtataccaatgccattgagttgtaatcattggattgaattagatataccaatttctggtgagttagatgatggcgttaaataccataagcatggtgctggttgtctggtaaggcttagttctggggatattgattttgattttggtgctcagggggaggttggagggtttaatttatggaggctaaccctttttgcaggagagaatctgagttcttatggcttcaagaataaggatgaagttgcagactgtttgaataatgcattagataaagaacaattggtttgtattgattatgacctttattatattgctaatgctccatttttctacgctgtagatatagacagcagacatcctggagataagcttcctaaccggaatcaagaccgtgtgttggttcttcttactcattattttcagtcagctgagcttatgtttaagaattacgaaaaacttagacaaaaatcgcatgtcaatggtcatttaaacgagcgtgatgaaatagatataagaatttatctttctacctggttgggttttctgggagtggtttgcgagggtgttcgtaagctaaacctgcggatcttgcttaacaatgagcgtcctgatgattttaaggaattgctaccgatttcaaataatatagggaggttaatgaaagaacacgcggattctctcaggacgtttagaaataatgttttccatctcagggaaaatacggaatatgtatatgatttttttgatgtgaattttgagcgccttccatgggcacgtgaattacatatggcgctttctgatttttttacacagtatagaatttattgtgaagtgcattatgtcattaatggacgtaaaggtgagagtaatttgataaataaaaagggagcgcggcgtaaaagataa

SEQ ID NO: 181538 - DNA, 1050 bp, Klebsiella oxytoca
atgaaattcacgcttattagtgcaatgctactcacggctatggccggagtgacctcagtcaatgcggctgattacaaaaaaaatccattcactctcgtctatgacggagccatcaccgagaacgtcaaaggtaaggtcaacattcacccagtgaaatacgatctgcatggcatccagattgctgcgaatgtctatacccctgctaactacgatcccgccaaaaaatacccggccgtggtggttgcacatcctaatggcggcgtaaaagaacaggtcgccgggttgtatgctcagcgtcttgccgagcagggctacatcacgattaccgccgatgcggcgtatcagggcgctagcggtgggatgccgcgcagcgtggataaacctgctaatcgtatcgaggacattcacggcatggctgactacatcagccagtatcctggtgtcgataccgcccgcctcggtctgcttggcatttgcggtggtggtggttattcactggttgctgccgagacggacaaacggtttaaatcgattgcaaccatcagcatgtttaattcaggtcttgtgcgccgtaacggtatgcaggattcacagctggatactatccagcagcgtcttcagcaggcttctgacgctcgagctcaggaagcagccggaggagaagtgctttactccggcgatgccaacctgactgatgaacagattgctaaattaccttttgccttgtatcgccagggctacgagtactactggaaaacccacgcgcacctgaattccacgtttaaatacaccaccagcagtcttctggatttaatgagctttgacgtaacggaccatatcaatctcatcaataaaccactgctgatgattgccggttcaaaagcggatacgctctatatgactgaagatgcgttcgcgaaagccaccggtacgaaggacaaagaacttttcctgatcgatggcgctacccatatcgagacgtattgggtgccaaaatacgttgaccaggcaatgcaaaagttagacgtcttcttcgataaaaatatttag

SEQ ID NO: 181539 - DNA, 393 bp, Klebsiella oxytoca
atgtacgcaaaatccttcatggctcttgacggtaatggtcgtctgaccggtgcccgtactgcgcagaccgcgccttacgaccattatagctgccatctgtgtggtagtgccctgcagtaccatcctgaatacgacaccgaatgcccgtggtttgaacaccggcacgatacgctgacggagaacgggcgacagcactgcccgtatgtaaatccagtggaaaaggaagtaagacgaattcttaagttacgccgttacgtggcggatgctcaacccgtgatactcaggactgactggcactgtagcggctgcggcaacaattaccacggtgaacgttattgcgtggcatgtggtactggcgacttaagccatatgccggaagaggcctcacgatga

SEQ ID NO: 181540 - DNA, 999 bp, Klebsiella oxytoca
atgcatacccgaaatttatctcaaaaccttattgtcagttcagtcggctatggtgcgatgggactgagcgaattttatggccagacagatgacaaggcttcccggcagctgttacataaactcattgacctggatattacgttcattgataccgctaacctgtacggacggggtcacaatgaacggctgattggccactttcttgccggactcgataaggctacgcgtgagcagttcagaattgccacaaagtgcggaatcgatcgggcgcctgatgaggcttatgcccgcaccattaacaatcaaccggactacattacccactgctgtaatgaatctctcaaaaggctcggcgttgaacggatcgatctgttctatcttcacagggtcagcccggcgacacctgtcgaggagagcatggagtgtctgagccgtctcgtcaaagatggaaagatcaatcatatcggactttgtgaagtctctgcatcgacccttcgccgggcccatgctgtacacccaatcacagccctgcagacagaatattcactatggacacgtgacattgaagatgaaatcctgccgacagtgaaagagctggggattggcctggtaccctattctccgctgggaagggggttcctgacaggaaaataccgtaaaaacagcgatttttctgaaggtgacttccgtaaaaataatgagcgtttcattcagtccagccttgatcacaacgtacagcttctcgatgctgttctcccgcttactgaaaagtacggttgttcctcgggtcaggtggcgctggcctggctgctcgcgcagtacgataagctggtaccgatccccggtaccaagcacatcagttatctggccgaaaatgcgcaggcggctgacatcgctctggacaaatcagatgttgtgctactgaacgatattcaccagcgcgttgagattaaaggcggccggtattctgaagaaggtatgaaaggcgttaatgcctga

SEQ ID NO: 181541 - DNA, 1176 bp, Klebsiella oxytoca
atgaacgaagttgtgattgtttctgcaaaacgtactgcaacgggtgcattcatgggttccctgtcgggccattccgcagcagaactcgggagtcacgtcattcgtgcgcttcttgaagactcaggagtggaggccagtgagatttctcaggttattatgggacaggtactgacggcaggatgtggccagaatcccgcacgtcagtccgcgctgaatgccgggctacccgttgaaacgcaatgtctgacgattaacaaggtctgcggttcaggtctcaaatcagttcatctggccatgctggcgctgcagacgggtgaggcagaattcgtcattgccggcggtcaggaaagcatgtctaacgcccctcatattctgatggcttcacgctccaggacaaggctgggggattgtaatatgagggatagcgtggtgtccgatggactctgggatgctttcgataataaccatatgggcgtcaccgccgaaaatgttgcagctgagttcagcatcagtcgcgaaatgcaagatgaatacgcgctgctgtcccacataaaggcaatggatgctcaggaaaagggaatatttgctcgtgaaatagttcccgttgaatggcaggacaggaaaggcaaaaccctgagagttgacacggatgaaggcccccgcaaaaccagcattgaaaaactaatgcagctgaaacccgtattcagaaagggaggaactgtgacggcaggtaatgcatcctctcttaatgatggcgcggccgctgtccttctttgtaccagaaaaactgccgaggcacgtgggctgccggttttagcgtctcttgccgcgtttgcgaattcggggattaagccggcattaatgggtgccgctccggtacaggctatcgcagactgtctttcccgctctggctggaaaccagaagatgttgatcacctggagtccaatgaagcgtttgcagcccaggcgctggcagtgattgaccagacgggtatttcacccgatcgtattaatccctatggcggagcaatcgcactcgggcatgctatcggtgcctcgggatgccgcattctggtcaccctcgtgcatggcctcctgcgtaatgataacaaacgcggtgttgcagcgctgtgtgttggcggcggtgaaggggtggcgctgagcgtttaccgctga

SEQ ID NO: 181542 - DNA, 414 bp, Klebsiella oxytoca
atgagccaaactgatgagctgacacgctatggcagagacattatggatcgtcttgagtccggactcgccgataaagtcaccacccgactgagcgaacttgattccaccttaccgaccctgattaccgattacgcttttggcgctgtggttggccgtcccggactggatctcagaacgagagaaatgctgacggttgcttcgcttgtgacgctgggtaacgcaatgccacagcttgaattacacatgagagcggcactcaataccggcgtcaccccggaagagctgcttgaaatcgtgatacagatggctgtctatgccggcgttccggcatgcatgaacggcctgacggcctaccgcgccgctatggcggcgaccggccatactctgccaggcctgaaagaggaaatgtcatga

SEQ ID NO: 181543 - DNA, 1221 bp, Klebsiella oxytoca
atgcattcagaaaaatccccgcaggatatgaccttcaggtcttggcttgccttgtttattctggccctttcaacgtttactatcgttaccacagaactggctccggtaggcctgctgacgcccattgcagagggacttggcgcctctgagtcagcggttggtatgacggtttcactttacgcctgggtgggcgcactgagcgcactctttgcatcagtatttcttggtaacgtggccaagaagcggcttctgctcacactcacggtcatactttttctttctaacgttcttgccgccacggtaaacacatacgccatactgctagtcgcacgcgtactgggcgcgctggcacatggcgcattctgggcgatgatcggcgccaccgcagtggctatcgtgccagcccgattccttggcgcagcaacgtctatcgtttttggtggcgtctcggctgccagcgtatttggcgtgccgatatcaaattatattggtatacacttcggctggagacaggcgttctggctgatggctttactcagcgtggttgcctttgccggcattaccatactggtgccacagataaccagtaaaagtgcgatcggcctgggggcgctcaaaagcgtatttaaatcctccgcgctgtggaaaatttattccgccacgttactggccgtaaccgcacactttgccgcttttacatacattgaaccctggctgcacacgcagcattcccttgccacatccgtcatcccggcggttctgtttgtttacggtatcgctggtcttgccggcaattttctcaccggaatggtgattgataaacatctcaaagcaacggtatcggtatcggtcgtgcttatctgtgctgtgctggtatttctgggtttatccggtacatccctttcaggcactgcggtctttaccgcaatggtcatctggggcgtggctgtatccgggatttttgtgggcttccagacgtgggtcctgcgcctggcggaagataaagccttcccggcgtccgcggtttacgtttcattcttcaataccgctattggtgtcggggcgtctgcaggtgcctggatggtatccgctttttccgtcccactgctttatatcgcagccggcgcagctatcgggctttctgtccttctcgttgccgctattccgacgcgcctgaggtctgaacaaaccactccggagaaatattatgagccaaactga

SEQ ID NO: 181544 - DNA, 651 bp, Klebsiella oxytoca
ttgcaacaagcagccgctttttttgacgtcgatgagacgctgatcaatattaaaagtatgtttgatttttttaacttctggtgcaaggagaataatgaacacattaaactccataattatatggcgaatttccagtctgaagttaaaaaaggaactccccgtgagcatctcaacagggaatactaccggcaatttgcaggtatcagttataaggcacttgaagaggctggtgaaagatggttcagatttaagctgaattcagaattatttataggaagcgcggtttcggctcttaaaaaacatcaggctgaaaatatggatattgtttttatatccggctcaatgcttcccgttctttctcctgtcgcaagataccttggcgtgcaagatattctttgcgcaccactgaagttcactgctgcaggggaaatgacgggtgaaataggttatccacagacgattggtgacggaaagaaagatgcgctccttcagttttgcgaacagagaaatattaatccttctgactgttatgcctatggtgacgatctctctgacattccgatgcttgcatcaaccggccaccctgtctgtgtaggaaaacattcagcgctggccagacacgcgataacacatcgctggcaggtcatttaa

SEQ ID NO: 181545 - DNA, 225 bp, Klebsiella oxytoca
atgccatttgttcacatcaccacctggcctataaaagatgaaggtaaaattatccggctccaggaagatattacgtttgctgtgcataaacataccggagcgccgctggataaaatctcggttgtcatttctgaaatacatccttctcgctgggcagacgcaggggttcccggaaaccataaagattttcaggaaaaaagccgaaggaaaaattacgaggagtga

SEQ ID NO: 181546 - DNA, 834 bp, Klebsiella oxytoca
atgtccaaatcagctagccgaacataccgcctggctgtgaccacgcaggggccgctttacccccctgcggaggtcatggacggtaacggcaactttgtggtggttggcatggtgccgggtgataacgggctggaatggcgaagcgtgcttgtggcagcagacagccccgtgcccgaattcggcgcgacgaagccttacagaatattgcgagatattgaaggtatggcgcaggatgaagttaaggatatcatcctgcatacccttcctttacccatcccatcaaataattacgggatgctttttgcaccggagcagcgaccgcaggcgaacaccgaaagccgccccagtctgcctctgcatgaaggctatattgctgattaccgcagcagtgatggcaaacgtcaggttcagcctgtcacactggaagactggatgcatgcggaaggtacgctggatgtctgtctgtctgaagacagcaggcgcgcaaggtttacgttttctttccgtaatcttgttcccgacagtgtttataccgtgatgagccttcgggaaaaagatttagcgactgagaatccaagccgaccgggaccattgggcatacctaacgtttttattaccgatcataacggtaatgcagattactgggcggaattgcccgatcctttcccggcacatgaacggaatgaaaaccggattattaacgttgttgtcctgtatatgagttcccgccagagctacggcggcgcaatcggactttatggtctgggtggtgacattcatgctcatttaaaactaaaggtccgttcctttgatgaatttactaccgtagagtga

SEQ ID NO: 181547 - DNA, 786 bp, Klebsiella oxytoca
atgaactataaaaaactggttattgtaggcgataagtttaatgaattcgcaaatggtaaagatgttctgacaatttctcagcttgaattactttcgcaaattccagccaacattattgataaagaacatgagattattatcggccagggtgtacgtaaagatttcgcaggaaaagtcatttcgaatcaggcaagaaatgttgttcatggcaataaacttaaaatgtgctctctggaaaaattggtcagagataaaaaaaatgcacattgtcataaaaggttggagcagaatgttcttatcggctcagcagagcagaccgaacataacagtgaactttttgcaatgccgctgctgattgacgaacgctgtgagctcatggccgatcatcagaccggccagcatattcaggggatgcttctggtcgaggcaagtcgtcaggcttttatcgccgttaccgaagagtttatttataagcaggaagcaggacgctactacgtcattaacagcatggcgatgaccttttccagctttctgtttcctttaccggcgctggtccattttgaattccttgagaaggacattaatgagcgaagggggcgtttcagagcacaggttcgcgtgactcagcatcagacgctttgcgcgacgatggatgtatcgttcaccgtatatccttcagctctgattgctgaaaaggaaaaactgctggctgaagccgccatgcaggcgacaattgctgaacagaacatcgcgacacacggggtgacgcatgtccaaatcagctag

SEQ ID NO: 181548 - DNA, 612 bp, Klebsiella oxytoca
atgtcagctaactatgtactggtctcacgctttccgttaaaaaataatgtttccgctgctgatttctcgttcttaaaaaacagcggcagcacacgatactattattcagaagagcagggagtgaatgaacttctggagctgcgtgcatttaacgacatcaaggaaatttcgtgggtagaagaagagatggtatccatgttccacagactggctgatattctttctgccgatattcgcagagaattgcttaagtttgtagaatctccgattgacaacaagaaagatctccctgaaagccagtacattcaacttcgccatgttgaagttccggctcataattatcagcagtatcgtcagtggcgcgatgagaccatttttaatgttgtcagggacaataaagataagattgaaagctttgaagcattccactctcttattagcggtgttccgggtgtaatgtttatctcctccttcaatggcgataagcaatcctataaggaagccttcaccaatgcgcgttaccaggaaattatccagcaagctggagacaattacatcaccggaggcaatgaaggactttacacccgcatctaccatgcctgttgcagctga

SEQ ID NO: 181549 - DNA, 927 bp, Klebsiella oxytoca
atggcgatcgcaggacacctgataagtaaccacctccctagcgttaaacagctccagtgcttccttgctgttgctcatgagctgaattttcgcagagctgctgaacggctcagaatgactcagcctccgctaacccgacatataaagtgcctcgaaggcgtgctgaatcagcagctattcagccgcagtacgcatgacgtcagcctgacggaggctggccaggccctggtaataagagcagagaagatcctgctggaacttaatgaactgaaaaccggttcactggcatccggggggaaggtacggatcggccttacccggacgcttaattttgaatttatcgaacccgtcagcagacagcttatcgaactggatgccggagacgacgttgaaacacctaatctgacttctgcccagctccttcaatgcctgtcaaaaaacacgcttgacctcgtgcttacgggggaaaagggcactggccatgaagatatggttcagtatcgctgggtttgctgcgaaccgctgctgatagcaatgccggctatacatcccgccagcctgaaagaaaaagtatcgctcaaagacgtcagtgatttaccacttttctggttttcaagaagcgcaagcccttcattttatgacaaatgtgaaagtttttttgaacagctcaatgtcccgctcaaaagggttaaagagccggatgattcactcgttatgctcacccgcatcgcaagaggcaaagggtttgcactgatgccccagtcgaaatgcacgtttaatcaggaagggctgtgctaccgcgaactgacagacgatgaatctcagaaactgaatattgatatctactcggcaatcagggtcaatgagacgagggaggctgtactggatgctcagaacgtcttatgtgggaaaaatttttccggctga

SEQ ID NO: 181550 - DNA, 138 bp, Klebsiella oxytoca
atgacaattatctgcagacgcctcctgatgccgcttatgcagtttcagccagtattgaatattaataatgcctggctgaataagaaccctggtcaggtaagatggaaaatcaccaataatcatcgccagcggcaataa

SEQ ID NO: 181551 - DNA, 741 bp, Klebsiella oxytoca
atgaaaacaggaatgtttaaatactctctgctggcggccacaatggctttttccgggctgacaatggcggtgagtccatccgcaacactgctggtaaaaggccaggtttctaccggtacctgcaccgcgacattgtccacgccaaatattgacctgggaacgatcagtaccgataaactaccagcgactgggtcatattttgtaaaagataccactaccaaacttgttgtcgactgcaccagcccgttaaaataccaaatatcaatgaccgataatcgcagtgacagcgcggtttcagcatcggatcttgggaatatgtcgagtggagctgctacaacgattatgggattgggaaaaaccgcagatggcagtaaaaacattggcggttattttttgtcattcatcgaagacggtagtaacagcgcagtaaatggtagcaccagcttatcagttacccgcattggtagaacaactgcatcagactccgattggaaagtactaccagacgctgctggtactaatacttatcattacgcaatgagtccactaaacaacgccgcaggtggcattggtaatgtcggttatatcgctttttcaagtacaggtgatgctgtgcctggagcttccacatcggctacatttgctctgctgtccagattctatctttccagtgaattacaatcaatcaccgaccaggaacagattgacggcagcgtgaccttcaatcttgattacctgtaa

SEQ ID NO: 181552 - DNA, 672 bp, Klebsiella oxytoca
atgcaatttaaaaaactgtcacttgccgcaggagtttttggctcttttctggcaacggcatttaccgcacatgctggtaccagcgccaccatgaccatcagcggtatcgtcaccccatcagcctgctcgattgccctgaccggtggtggcacgctggattttggcccggttcatgttgatgccctgccatccagcggcacctatacaatgaccccaaagaccattgataccgtcgttgactgcaaggataccgagcaggccgtggcgataagctttgtcgataaccgcaaagattctgtcgccatccactctgatgaaggcaccgatgccaacaccgctttcggcctcggcacagcggatagcatcaatatcggctcttacggcattaaaatcagcaaggtgaccgcggagtccactgaaggtagcctgctttccagcaccggcaaagccatgaccgatacctggagcgcactctcttccgatacctttgtcaataacggtaccagcccacagtacatcacctacaccgacgcgggcggtaacgccccggttgcgaagaagaactacaccttcaccctgcaggttacaccgtctatcagcagcgatatgaaggccatcaccagcaccgccgagtttgacggtaacaccaccatcaatatcgattacatgtaa

SEQ ID NO: 181553 - DNA, 576 bp, Klebsiella oxytoca
atggggttaatgatgaataaactaccttccgcactgctggtattcggattaagcaccagtgcttgtgtactggcggactataccgactgtaacgtgcaaattgcgcctgccagccaaaattacggaagaattcataaagatgaattgaattttactgcaacagataaaggacaggctgctgcgttaaataaacgacaggcccagttatcagttatctgtccacagaaagaagcgttcgacatttcattccttggtagtatgaccagcaacggcgatctgacgttctcggataccggcaaagtcatgttaacgataagtaatatatcttctgacgaaggagcattatttataaaaaggatttcaggaaaagatattagcaccgaatccgtatcctcactgcgaatatacatgggagataaagtaaaacctgccgatgcaagcggaaataccgtatcgatgcaaaatttcacagcaacactcaatatcgaaccgtgggtagccaaaagcacttacagcgatttagcgaacgataaaacactggaagggaatttaactgttcgtattgaacaaccgtaa

SEQ ID NO: 181554 - DNA, 2361 bp, Klebsiella oxytoca
atggttcttgccagcttcgatattaccacgttgaaaaatcgtggtatttcccctgaagtcgctgagtatttcgcccacggagcacgtttttcgccggggatgcaaaaagtcagcctgacgctgaatggtgatgaaaagggcgatatctcgctgttcttcaataaatcaggtgagccttgctttgacaaagaatttaacgatttcgtcggattaaaagagccagataaagtgacagacaatgacgataaatcggatgcacgcgtctgctatgactatactgcaacctggccggattcggtcattaagctggaccccggtcaggaaagagtcgctctcatcgtgcccggtaatgcattggataatcgtaataaaccgaaaaactatcaaactggtggtaatgctgcactgctgaactacaacgtattcaccagccagagccggtacagtggtggtaactctaactataaccaggggacgtttgaggctgggttcaacgtcgccgactggctagcccgtagccaggtgattgtcactgattccaatggcgaacaagacagcagcgtactgtatggctacgttcagcgaacctttagcggtattgaaaagacgctccaggccggggcgattaacatccagagcacaccgtttagcttatccgggattaacggtgtgcagcttacgccagaaaccgcgttaaacggagaattgggtagtggtatcacagtatccggcattgcccgcagcgatcaggctcgtgtagaaattcgtcagaacggcgtattgattatgtccacgctggttccggccgggccctttacgcttaacgatgtccccattgccaacaacaatacagatttattggtcgaggttaaagagaccaacggttcatccagccagttcaccgtgcctgcggccaatttagtcggtgcccgtctgcgtgcgccgcagggatgggcattcgctggcggtacgctgcgtgatatcgacacaaagcatgacaaaccgtggatattaacggtatccaacggctggcagattgcacaggaaatcaatctcagcgcaggggttatgacagcggaaaaataccagtctctcgccgccagtactaactttgtgccatcaaaatcgctgtcattttatggcacgacgcttggcgcgtgggatcagcgcaacgatcattccggaaatcagtttcaattggggatgaactaccgactcccctgggacttttccgtcaacctgtcaggcacccacaatacggccggattccgcacgttgctcgacactcttcaggatgaagatgacgtcacaggcataaaaaatagctatagcgcatcattaagctggtcacatgcttatgtcggctcgttgtcattttccctgtcacaatctcagggatttgataacaacagtgattcccgccagttcatgctgaactggggaaaaactttcagatatgccactgtaaacaccagttggcagcatgcgttaagtacacccgatactgacaataacgatagctaccatgacaacgacaccttctacgtcagcatcaacatcccgtttggtcgccacaatgtacagagctatatgcgtgacgatggcgagaaaacccgttacggcctgcaggccaacggcccgttaagtcagaactcatactacaacgtcacagcagaaaaaggcgacgacgacaatgataaatacgttgcggcaggattcagttccaacatgcactacacctcgctgaacctgaacgcgtcgaaaactggcgatgattttaaaaattactcagccaatatatccggcggcattgtcgcgcatagtcagggcgtgacgttctcaccgtatgccgttgatgacacctttagtatcatttcattgaatgacaacgtctccggcgtagaggtttcaacaccacagggaccggtatggaccgatttctggggccaggcagtatctgcctccgccccggtttacagagtaaataccctacaaataaacaccgagaccctgccgaaaaatatcgacatcaataatgggataaagaaactaacgccgggacatggttcagttacccaggttaattttggggtgattaaagtacgacgcgccatgctaactctgcatatgccagacggtaaaccgatcccgaaaggcgaaacgctggttgacgctaaaaatcagtatgtcaccaccgcagtggaagacggagtggtctttatcaacgatgtagatgccacgccggaaatttacgccaatgtcgatcagcaaggccatcaatgccgtgtgcaattcactctggatgatcagaacagtgaacagagtttttatcaaaaagctgatgcaacgtgccaaccgtaa

SEQ ID NO: 181555 - DNA, 702 bp, Klebsiella oxytoca
atgaaatacacatttgcacttcctttacttatgactctgagcacagtcatctctccagcggcgcatgcaaccggaatgaccccagaattttctgtattactcattaataccgatgataatggtgccagtatgaacgttaaaaatacggatgataaggccgcgctcctttacaccacgataaccgatattgcagggcctcagaataaaaacacaaaactcattgcaacacagccaattgttcgtgttgaggctggagaaactcagcgtgtacgttttgtgctggatattcagactccctttaccgttgaacaatataaacgtgtttcgtttgagggcatccagcaggcaaaaccagcgggtgctaagttaattacagctacaattcgccagacgattccagtgatcattcgcccaaagaacgtacctgactacaccaccccatgggataaattagtctggaaaaagacaggaaatacactcactgtaaataacccgagcccttatgtcgttcgcctgtcgcaaaaaatctccaccgttccttccggtagtaaaggtatgttacgcaacacctggttactgccgggtgaaaccgaaactataaaaatggataaaggtgttactgacagccaaataaaaatatctccagcatcccgtttcggtattatggtacaggattacattgccactattaaaaataactaa

SEQ ID NO: 181556 - DNA, 924 bp, Klebsiella oxytoca
atgcccgccgtcaacctgcgtcatattgaaatctttcatgcggtgatgaccaccggcaatctgaccgaggccgcacgcatgctgcatacctcgcagcccaccgtcagccgcgagctggcgcgttttgaaaaggtgctggggttgacgctgttctcccgcacgcgcgggcgcctgcagcccacggtccaggggttacgtctgtttgaagaggtccagcgctcctggtacggtctggacagaatcgtcagcgccgcggaaagcctgcgcgagttccgccagggcgagctgtcgatagcctgtctgccggtcttttcgcaatcttttctgcccccgctgctgcaatcctttttaagtcgttatccgcaggtcaatattcagatagtgccgcaagaatcaccgctgctggaagagtggctgtcagcccaacgtcacgaccttggcatcaccgaaacactgcataccccagccggtacacagcgaaccgaacttctctgtcttgatgaagtttgtgttctgcctcctggccacccactggcccaaaaatcggcactcacgccgcaggattttgaaggcgaaaactacattagtctttcccgtaccgacagctatcgtcagctactggactcgctctttaatgaatatcaagtaaaacgtcgcatggtgattgaaacccacagcgccgcttctgtctgtgccatggttcgcgctggcgtggggatctcagtcgtgaatccactcaccgcaatggactacgccagtagcggagtcgttatccgccgatttagcgtttcggttccgttttcagtcaatctggtgcaccctttacatcgcccttcatctgcgctggttgatgcatttagcagccatctaatacaccaactacctgatatcattgaatcttataactgctggataaatttataa

SEQ ID NO: 181557 - DNA, 1620 bp, Klebsiella oxytoca
atggctcattgtgcccggtccccctcttttcttttgcatcaggtcacctgtcagttagcgacgggagatacgctttttggtccgctgaatttatcgctggaaggcaccctctgcgggcttgtcgggcgcaatggcgtcggtaaaacccgattattgcgtttgctggcgggcctggactcgccgtcgagcggccatatcgaacgtgtggcttcggtgagctacgttgctcagcagcatgtcatgtttcctgatacgacgctggcggaatggcttggtgtcgaattcgttttttctgctctggctcgtcttgaacggggcgaagggcgagccgacgatcttgaacgacttgatggcttttgggatctcccggagcgcctgaatgcaggattccaggccgctggcttaggagaattttcccccggacggctcgcctcttcgctgagcggcggggaaagagtgaaggcgcagctgtgcggagcgttcctgtccgacgcggatttcctcctgcttgacgaacccaccaaccatctcgaccgacaaggccgcgcgtggctatatcagcagcttgagcaatggcgcggaggggcgttgatcgccagccacgatcgggagctactgacccaaatgccgcgcatcctcgagctggcatctgcggctttgcgcagctacggcggaaattatgcggattatcagcagcagcgtgagctggagcagcaggcggctcgcgccgcgctggagcatgcggttactgaacggcgacgaacccgggcgcggatgcaaaaagagcacgatgcctgccggcgccgctcggcgcagacgttgcgcactatcgacacgctcaatatcgcttcatttgagcgtgttgcctggaaaggggcggcaaaagagcgtcccggcacccttaagcgccagcatcgtgaacaaagcagcatcctcaacgatgcgatagagcaggcgcgtgagcgggtagaggaagacaacccggtgatgtttactctgcccggtagccaggtcgctgcgggaaagcaggtgctggagctggacgcgctgcggctgacccattcaccgatggcagcgctggactggcgtatagatgggccgatgcgcgtggcgctgcgtggccccaacggctgcggtaaaacaacgttgcttaaaacgctgctgggcctgcagccgccgctctcaggaagctgccgcttatcggtcaacgcggcgtatctggatcagcatctgagccagctggacctgtcattgtccatcatggcgcacctgaatctcggtgatacgcccttagaagaaggtgtgctgcgcagccagctggcgcagctacagctgggggcggacaaagtccatctaccgctatcggttctgagcggaggcgaaagattaaaagcggcgctggcctgcgtgctctggcgacgggaggctacgcagctgctgctgttggatgagcccactaaccatcttgacctggcgtccactctggcgattgaaaaagcgctggcacagtttcccggcgcgatgctggtggtgtcgcatgatgaagcctttttacgggcgctgaagctgacccattgcctggcatggcgggaagagggctggagcgttgagaggctataa

SEQ ID NO: 181558 - DNA, 228 bp, Klebsiella oxytoca
atggcgtgtgccatacattcatgcaagatgtgtattttttgtaatgctttgatatatatgtgtattttgtttttgtggtcaacgagttgtggtgatgttcttcacatacctgaacgccggagtgaggccggttatttaattgtgaaatggctgaaatgcataattaaatgtgcgaatggcgagcttcacactttattttatttatatacggagagcattttcttgtag

SEQ ID NO: 181559 - DNA, 1266 bp, Klebsiella oxytoca
ttgtcatcttgggctgatataagaattgacgggtatgtgattgaagaatttactcattatggctgtcatttttggtacttcaaacactcggagcgagtaagggaagtggtcgagagaacttctgacgaggactcagatgatgtacgtgattttataggatatagagcaagcgctaaaacgatacaaaagcggctggaactgaacggtttcaactacctgactctgaaggaagactttaacgtcagtctcgaacgctatatcgatcagcttgagtatggactcagaacagtacaggaaagactttctaaaaacattgatgacgccttttatcttaatatgagggatatacaaagcaatattattcaagtaattaaaggaacgtcacttgacgaatggcttcaattgctaccggcggcgcgtaaggaaaaaataagacggaagcacgataaaccgtattcagatggtactccagaatggagcagctgtgatagctccccagcattacttaatgcaatgctgagtactccgttaatatattctgatagctatttggcggctgactttaattttccggtatcaaatcctgatttcttctctctggcgctgcttttaaccgtgccagatgatgcaatttgtgagcttgacctgaccgagcttattgtcgctgaatatcttgatgattttactgatcttgctgaaatagctttgtccgaaacctctccttgcaaagcctgccgcgaatcgcttgctgagctgtcggaacttgctggggtagaaccatctaactccacgcttcaaaggatgtgttatgccagcatgattacggcaatggaaacctatcttggtgacattattaaacgagaaatcatgacgcgccctgccttaatggagcgttttgtaactacctatgaagaatatagtgagatgaagtttccactcagcaatattcactctcagcttcgtaagctagataaacgagtccgtgacaccttagatggaattgcttttcacaatcttgctaaggctaaagaaatattccgtaatgtattgatagtggagtttgacaatagcagctttagcaagctttgtaaggccgtcggtacacgaaatgatattgttcatcgaaatgggaaggacaaaaaaggaaacattgtcagtcttagtattggcgatattcaggcgcttagaggagtgattttgcagtttatcagcaatattgatcagcaagtgcttgatggcctagcggcagcgtgcgcagaagattag

SEQ ID NO: 181560 - DNA, 813 bp, Klebsiella oxytoca
atgtaccagaacatccggctttgccttttaactactgccttaatgatctctgcttcgaacagtaacggtatggatataaatctagggcctattggacatttatgcgatacatgcggaggtggggttatcgggggattgccgatagtcggcccaagcctcaatgaacttgtctcacaagctggtgcccctgccttggaacaatggattattcagtctcgaaacacggctataaatgggacggctccaatccctcctatgattcgtcaaatgctcaccgggtatgcaagtgaagactctatgaataaggcgagatttaaggtcgaggataatggtttcctcaatctgtcgcgtgttattgagcaagccgggcaagctagtgctgtgaccctcatagacgtcatagtgtttcgtgatactgccagtgctaataatccagcgatttgggcacacgaacttactcatgttgatcagtattcgagatggggtgctcatgactttgccatttcatacatacgtgaccatggcacagtagaacaacccgcttatgacaaacaatatcgttatgcagcctgggcgcaatcaagaggattccctcagaatccgcagccggttgtttctatgccgcctccagttgtcaacatgccaccaccgcaatatgttccgatcaacaacccgccgttacagccagtagttgttggctcgttttgccaaacacctatgggacggttcggccccggccctgcgatgattgtcggctcaccctgctatgcccagattccgcagggcctggtgcaagggtttataactcgataa

SEQ ID NO: 181561 - DNA, 594 bp, Klebsiella oxytoca
atgggcgaacacgcagacactccaaacaatctcaatgaaatagccaggtttgcgctggctatgtacgatcacggctattttttctcagtccgccgtgatctcagcattaattttgtccgggacatgaacggtggcggaatgcagggcctattcatcaaaaaacggagtgatgagaaggactcaattcaagtcgtatttgactacacctacagcaatgatgatgatttcctctatgaagcggacctctggacggatcaacaaaaagactacgagcctactcttaacaggggcaagcaccgattcaaagcctatcggttcgagctagagataagctgggatagtgatgaaattcaccagtggcaatctgatattgaacgacttactagaacgcacgagactcttgacgactggttaaagagcgattcggagatgctggtacgttgcgcctccacatatttctgtcggaaacccgtgattctcacgttaaacgaccttaaacagtatgttgcaatgggggtaactctagaggacctaaaggctagacttaagtgctcgaagtgcggcaagcgtggagcaaggatcgcagtgttttga

SEQ ID NO: 181562 - DNA, 1272 bp, Klebsiella oxytoca
atggccctaacggatactaaagttcgttctgcgaaacctgaggagaaagagtattcacttgttgacggcgacggcatgtccttacttgtaaaacctaacggctcaaagtattggcgatttcgtttccgttttggcggtaaacagcatttgatggcattcggtgtctatcctgaaatttcactggcggatgccaggaagaaaagggaagaggccagaaggttggtagctgctggtatcgatcctcgtgagcataaacgtgctgtgaaagaagagcaggcgaaagagattattactttcgagaaggttgccagagagtggcttgcgactaaccaaaaatggtcggaagatcacgctaatcgcgtaaaaaagagcctggaggacaatatcttcccggcaattggtactcgcaatattgctgaattgggcactcgtgacttactggcacccattaaagcggtggaactgtctggacgtcttgaggtggcttctcgtctccagcagcgtaccacggccatcatgcgttatgcagtgcaaagcgggctgattgattacaacccagcgcaggagatggctggagccgtcgcctctggcaatcgacaacatcgcccggcgctggaattaaagcgtatccctgagttacttgagaaaatagacggctataccggcaggccgctaacccgctgggcaactgagctcactctgcttatctttattcgctccagtgagctgcgttttgctcgctggtcagagatcgattttgaaacgtcaatgtggaccatcccgcctgagcgagagcctattcccggcgtgaaacattcccagcgaggatcaaagatgcgtacacctcatctggtgccgctttcaaagcaggcgctggcgattctgaagcagataaaacagttctgcggtgaacatgaactcatttttattggagaccacgatccgcgtaagcccatgagtgagaacacggtaaacagtgcgctacgggtgatgggctatgacactaaagttgaggtttgcggccacggcttccgcacaatggcctgtagttcgttaattgagtcagggctatggtcgaaggatgcggtggagcgccagatgagccatatggaacgtaactcggtacgcgcagcatatatccataaagcggaacatctggatgaacgcaagttgatgctgcaatggtgggcggactttctggattcgaaccgggagaaaagtatcagcccgtttgattttgctaaaattaataaccccatgctgacaagatga

SEQ ID NO: 181563 - DNA, 417 bp, Klebsiella oxytoca
atgaaaaaattactcggcggtgccatgctgttagccgcaggtatgttctcaatatctgtttatgccaatcctgataattcctgcgacggtgaacaaaccatctttgatgcttataccgccaagggtggcaagcacgtgggtgtgtgttacgtgtacggtaatattcgttatgtgtatgggaaggatgataatcctgaaattttaattaatgttccacgtgaaaaggttgagttcactatatctggaaatggtgatcaaagtgtcactattcccaatggtgagtatcgatatgagataggtgaatatttacgtggtggtccatttatacaggtatggaaagggagtaagtttattaccgagatcaagttaaatggcgctaactttgaaaataatatcgagcaatatattaataattaa

SEQ ID NO: 181564 - DNA, 477 bp, Klebsiella oxytoca; identical to SEQ ID NO: 159206

SEQ ID NO: 181565 - DNA, 1437 bp, Klebsiella oxytoca
atgtggctattcgatattataaaggatggtacactggtcgataacaggtcttattttgtaaataacggaatatttactaataaatctctgggggaatcaattagtcttaaaactaaaacaaaaggccagtggactaacactaaaaatgatgagtctaccatttggtattttttaaattcagtttcgcatgatgtagaaaataaacttaataataatcttgcaaatgcactcatcctcttcaacgatcgagagtatgaacataataccgatgatggttttattactgtaaatggtactgattccagaaattttacgttaaacacaggtaatcttattggatttgtaaaacgtggcgaatattccctgaaagttggttctcgttttggcaatgccttccttcggtacatcatagcggacgctgacggttttctggagatggaaaatattggtggcgaaaatcacactgaaggatatgagtggctcctggcatatctttggaacatcaagttgaagaaggcttaccgactgggtatccctaaaacctatattacgaaaaaagaacgaaattcacggatacgtgggacaatcgatacaattgactacttcagaaataatacctcaggaaaatatttatgtacctaccgcgaacacagttacgacagtcctgcaacttcgttgttcatcaaagcctatgagacgattgaacatcaatcattctgtaagcatacgaggaatatctacaatgctttcatcactgctaatctgggggtgagaaggtctcgtcaggagatcttgagaactccatattttactaacccattttataacgactataacatactgatagatttatctaagaaaatcatcaatcaggaaggttctgattttggataccaacaagaatcaagtgctttcttttttgatatatcgatgcttttcgaatatttcatccgaaaactcctaaaacgaagtgggataaggatgctaagtaaattcgatcgaaattatgaaattccgaccggagctttcggaagctatgtacgcaaaattgaacccgacctagtttttgagaatgatggtggcatgtacgtttttgatgtgaagtataaaacctttgatccgcagtttggggttaaacgtgaagatatttttcaactacatacttacatagggcagtatgggaatggaggccttataaaaggatgcggctttatttatccaatatctgaaaacaggtggaatgcacttaatatggataaaacgcatggggtgatttctgatgagattcatcagcagggaaaagatattcctttttatttgcttttcttgaaaatccctaataactctgaccctgaatttaacaagagaatgagcgaagaatgtcatatgttcattgagaacataaacacgaaggtactaaaaaatgagaatagataa

SEQ ID NO: 181566 - DNA, 1641 bp, Klebsiella oxytoca
atgaaaagcagactaaaaattttatacaagcatttgattgaaaaccataagcatgaacttaaaggctggcatgatgcttatcgtgagttttatgagcaggtcggacaaattcgcgaacgtataaaatcaggaaaggaattatctccaagtgatgagattttcctaaagcaactcctctttgaaagaagtaatggaattgcttctcgcggtcagtcggttctaagcaacgaaaacttcgacggttttattaaaaacaaggacttcattgctatattacaacaattcatcctgaatcccaacagagaggaactgaaaaagtttgagtgcacatggtcagaacatgggaagtctaataatcctgttcttatcaatcgcgtagcggcagcctgcacgcttgaagtttccacaactgttgattccgctaagttcaatcaggtatttagctggcttacacacgaagggataattcctgcatacccagcagaaaataatcaggactggttttcaaaaaatgtattcctgatgaaaattataaaaaatgagttcaacgatgaacttcgcaataatgaaactgatgagttttatctcagccaatttgtctgggttctgtacgagaatctctctaatccattcagtctgaaaaagcagatcgttaagtacgggcctcctggaacgggaaagacataccaggctcgtcaacaaacatcgcttctttttgatatctggaaagaagagtttgcgccaaatagcagcctcacacattcaagtcagattgagttgattcaatttcacccttcttttagttatgaagacttcatggaaggtttgcgcccagttctggataacaatggtaaagcacagctgacgttgattaatggtgtttttaaggaattttgccggaatgcaggaaagtgggaaatagatattgaacgcctcgaccttaacagggattgggaatcaatcacgatcggtgaactccgtccatatcaaaataaattatcaggtgatcattgggaatatatcttcgaaatatctgacttttcgaagctgatagcagatgcagtgcctccgttcttttttataatagatgaagtgaaccgagccgagttatcacgtgtttttggtgagcttatgtattgcctggagtatcgaggaattaaaggaagcgtcaaaacccaatatgctaatctaaataaccaacaaacaggcatgcttcataccgcacaaggttaccaattttttattccaacaaatatctacctgataggtacgatgaatacgattgatcgtagtattgagagttttgactttgcactcagacgtagatttcgttgggaagaagttacgccagataccagacttttaagataccatcttagccagttctgtaaagcttggactcctctggcagataacctcgaacgactgaatacccagattacgaaggagcctttactaggggctgattaccaaattggacatgcctatttaatgaatctgaagtatgccaggagccttacagttacagaagtgagatctcgtatctgggatgactgtatccgacctttacttcaagaataccttcgtggcagcaatgaatcagaactcatcgattcttttgcaaaagcatttggaatttaa

SEQ ID NO: 181567 - DNA, 831 bp, Klebsiella oxytoca
atgaataacatttttgcgaaagtaaaaggacctcgtaagaaacctttttttaaattggtatcagactacactttgtttgacgctttagacttatctactcttagcctcattccatataaccctgaccataatcttgatgaagattcatggtttaaaattgaaaattttagtcagcaatcattctgcttatcatgcattaaggatgaatttgattctaaggacttcgacgatctaacaaaacaatatttcacgaagatttcatacatattctctcatcagaatgaagacttttattttcagaaaataaccccatccctatttatcaagagaaaaacaattgcttttggtgaatcagcagaaatagaagaaaatgaaggacgattgattgttaaccatatacctgatgctgtatacttaaaggaaagaaatatattgttattcagaaatctcgccacaatttcaagtatatttaaaggtatcgatattctgtacaaagaagccacggaagaagaagttaagtcgtttttaagtgaatccttcattgtactttcaactgactatgatgtagaaaaggtatcaaagccaaaccgaaagagaattgcattagctatggatactcttgcagcgatgccagtggaagacagaggtgagatgctgaattacattaatgattattgtgctgaaaaacttaaatatgacactactgagagtaaattcgaagtatcatcagaagaagagttaaaatatttgctgtacggtatcgaacaaagattttacactaccagatttggtaatgaaaagagattagccaactcaatacaaagattataa

SEQ ID NO: 181568 - DNA, 564 bp, Klebsiella oxytoca
atgataataaatttcctttttagagttcttttaacatttaacgcaacatcgttgttggctataattttctttgtacaaaaaaagtacaccctttattactttttccaaaggtttgaacacagtcattggttgagtttattaccacaaatgacatcatacgtattttacatgctaatccccatattactaacttggattagtttgcttttaagctccagactgggcaaggatgagtttaaagaaggtgaagtagtttctgtggagcatgcgaacaactcattccttccaagctatcttggttatttctttgtggctttaagtataactagttggtctgccttgttttttgtttatgccgttttatttatttttacctttatgtctcaagcattatactttaaccctttatttctactgtttagatatgagttttataacattaaaaacaagaacggcgcatccatttttttaattagtcgtcataaatacaaaacccccaaagaaatcaagatccccgttgcatttagaataaacaactatacctttatcgaaaggaaaaaatga

SEQ ID NO: 181569 - DNA, 2916 bp, Klebsiella oxytoca
atggcaacgcaaagcgaatacgagttagaaacgcagctggttaaccagctggtggggatgcattacgaactggtcaatgtcaccgacgaagccagtatgaaagccaacctgcgcaagcagattgaaattcataatcggctggaggccgccccacttaccaacagcgaatttaaccgtatttttctgcatatgaccaaaggcaatgaagtgatcgatcgcgctaggatcttgcgcgatcgctaccagttgctgcgtgatgacggtacggagaaatggctcagctttatcaataaagatgaatggtgccagaacgaatttcaggtcactcgtcaggttaagcagtacaacgccgaacaaaaaacacgcaaaacgcgctttgacgttacgctgttgattaatggcctgccactggtacagattgagcttaagcgccgtggactgggcctgaaagaagcctttaatcagattgaccgctaccaccgggatgcattctgggttggtagtggtctgttccagtatgttcagctgtttattatcagtaatggtgttgataccaagtattacgccaataaccgggctaaccatttcgagcagaccttcttctggacagacgagaaaaatgaacccattaagtcgctggagaagtttaccgaagccttcctgaaagtttgtcacattgcaaaaatgatcactcactacacggtgctgaacgaaacccgtaagtgcctgatggtcatgcgaccctatcaatactacgcttgtgaagcgatgatccgccacgttaaggacagtctccatctacagggcaagccccgtaatggctatatctggcataccacaggtagcggtaaaacgttgaccagctttaaggcaagccaggtgatcatgtcgatgcccgaagttgatcgggttattttcgtcgtcgatcgtcgcgatctggattatcagacagccaaagagttcaacagcttcgctaaagacagcgtagataccactaacaataccagtacgctaattaagcaacttaaggctaacaacagtaaactgatactgaccaccattcagaaactgaacaatgccattacccatgaaggatataaggcacagctggagcacctgcgaaaagagcggattgtctttatcttcgacgaatgccaccgcagccagttcggtgacactcacaaggctatcgtaagtttctttgaaaatgcgcaactgtttggtttcaccggtacacctatctttgccgacaacgtcaacatcaccaacggcatcaaacagaccactgaaatgctgtttgataaatgcctccacaagtatgtcattgtcgatgccatccgtgatgagaacgtattgcgctttgccgtggagtatgtaggaacctatcgccgtaaggaaaccagtaatgagatcgatatcgatgtggaagatatcgacaccagagaggtcatggaaagcgatatccggctgggcaagataaccgactacatcctggcccaccacagtgcaaagaccagaaaccgtgagtttaccgcaatgttctgcgtgggctcggtggacatgctgattaagtactacaaactctttaaagataaacaagcagagcttcagcaggccgatccgggttacaagccgttgcgtatcgcaacaatctttacttatgcagccaacgaagcagacaaaagcgataaggaaacggttaacggcttactggatgaagaagacatcagcctgcctcaaggcgggaaaatagatatctccagccgggatcatctggacagcttcatcaaggattataatacgctgtatggcaccagctattcagctaatgattcgcaaagcttttacaattattacaagaacattgcacaacgaaccaaagaaaaagggattgatatcctgctggtggtcaatatgttcctcacgggatttgacagcccgactctcaatacgctttacgttgataaaaacctgcgttaccacggactgatacaggcattctcccgtaccaatcgtattcttaatgagaagaaaagccacggtaacatcgtctgcttccgcaacctcaagaaagccactgatgatgccatagcgttattctcgaacaaagacgcatcttcagtcgtgctggttaagccttttgaggagtacctgagcgactatcaggctgctgtagataccctgttgaccctgacacctacagtggaaagcgtggacagcctccctgatgaaaaagctcagcttgcttttgtgacggctttccgtgacatgatgcgactgaagaatatcctggagagctttgctgattttgatgaagtgagtaagcctttatcggatcagactcttgccgattacaccagtaaatatctcgatatttatgacaaggtgaaaaaacgcactggcaaagataaagtctcgattctggatgaggtcgattttgaagtgtcactgattcatcgggatgaaattaatgtcggctatatcctgaggctactggctggcatccaggctatgccaccagaagcgcagcaggagcagaagaagaaggtcatggatatcgttgacagtgacgtcacgctgcgcagcaaacgcgaactgattgataacttcatcgaagaaaacctactgcatgtttcgcatgatgaagatatcacccagacctttgaaacctacgttgaacgtgagaaacgtaaagctgttgcaacgctatgtgctgaggaaaagctggatgaaagcaaagttgcagctttattggataactatctgtttaccgatataaccccacgcgaggacgaggtagccaaggctctaacatggacaccaaggatccttgaaaggaagaccgtccttaaacgtgtctatgacaaggtttgtggtgtgattgatacttttatcaacggaatgcgtgggttctga

SEQ ID NO: 181570 - DNA, 1191 bp, Klebsiella oxytoca
atggttccgaaactaaggttcagccaattccattctccttggtgtactaagacacttggggaagtgggcgagattatcagtggattaacctattcccctgaaaatattagaaactctggtttgttagtcttgagatcatcaaatattcagagtggtagactttgttttgaagattgcgtttacgtagacctaattgtagatgatgaaaaaaaaaccagaaaaaatgatattctgatctgcgtaagaaatggttcaagatcattaattggaaaaaacacattaattaaagaaattgatcaagaaactactcacggtgctttcatgactgtgtttcgtgggccattaaatggttacgttgcacaattattacaaacaaaaaaattctatagccaagtctactctgacttaggcgcaactataaactctattaatggcgggaatttaaaaaggtactcattctcatttccttctgattttaatgaaacagctaaagttgctgatttcttgtcttatattgacgataaaattatgttgctagataagcaacataaacagctttgccagtacaaaaaaagtatagtccagaatatttttagtaagaaattacggtttaaggatgaaaatggaaaagagtttcctgagtggcatttagttaggcttggtgattacttaattaagcataatgaaaaaagcactgaaaacaaccaatatcctgtattgacttcctcacgagaaggtatttattttcagaaggactatttcaatggtgaagatatcgcgagtaaaaacaatataggatataacgttgtccctaaaggttattttacttatagacatatgagtgatgatcttgtttttaaatttaacattaacacgttatgcgataagggtattgtaagtaccttatatccagtatttactacaaaattaaatgcatactttttacagttaaaacttaatgaaggaaaagagtttagggattatgctatccaacagaaacaaggtggttctcgaacatatatgtattactctaagctagaaacattgaagcttatgattccaaatatagctgagcaaactaagattgctaatctcatatccgcttttgacgacaaaattgccgcaaaaaaaacagaattggataagttaaaaacttggaagcagggtctgctccagcaaatgcttgtatag

SEQ ID NO: 181571 - DNA, 468 bp, Klebsiella oxytoca
atgagtgactgctggcaaccgggtaataccatgaacggtgataaagaacaggttgtacgccccactcaggctgttctgtcagtccggacgggagatgtggtcattagcctgatccatggtaaggccgctatcgtcagccccgagcatgccgggcgtctgctcagtaataactatgtcagggtcgaagttgacagccggaaggttgttcctgcgtggtttgtctggcacttcaatgaaagcagggaaagccgccgccagcaggcactggcaacgcaggggtcaacatttgtcttgcgtttgtctcttactgaggtacgtcagtttactgcaatgctgccccctcttaataagcagaaggcaatcggtgggctctatctggcaaccattgaaaaacgccattaccaggaacgcctggccgcccttaacgaacaacagatcctgagccagctcagtgatatgattcagtaa

SEQ ID NO: 181572 - DNA, 432 bp, Klebsiella oxytoca
atggagagctatcagaataagatgaactggggagagcctcctctaccaaaaggacctgagcactttggtgagcgcctgaaaactgttatcgggaaacagtctgtcgcctcttttgccagggattgcggggtttccgaagcctccatgaggaaataccttaaaaccgataccgtgccgggtatcgacagtgtggctatgattgctgcctgcacggggcgttctctgacctggctcattactggtgaaggcgacccctttacggacaacgctaagcagaaacgcttttcagaagaagaaattaaaaagtggtggactctgatttttgacgctctggatatggaagataaatccagtgttatcatggcttttcagcaaggcggcctgaatgcggtgttcagccctgagattatgactggcaaaaggaagggataa

SEQ ID NO: 181573 - DNA, 294 bp, Klebsiella oxytoca
atgagtcacaagaaagaacacaccgtcatggtctacaaggtgctccaggagcttgccaggcagcagggccagactgtcgaggctgttctggaacaattattctgccgggccagcatcgtcaatacggggctgctgaatgagtcttttcgtgaagcctttcagcagcattatcccggcaagccattcaaccacgttacctggtgtcctttctgccagtgtttcgaccttatgcagcgctccgacccaatggtacagggtgaggcttgctggacattcagttctacacagttttga

SEQ ID NO: 181574 - DNA, 174 bp, Klebsiella oxytoca
atggtcagggatgtcagcaaccgcttaggctgtctccagtcgatacccttcatcggactggtctggcggagagccgtgccaaccccgtacatacgcgatccgcacaaggatgagaaaatggccgtgatccgcaaagcgctgaatgaatgtagcgctgaatcccccgtgttttaa

SEQ ID NO: 181575 - DNA, 1086 bp, Klebsiella oxytoca
atgaaaaagggtattgaggtcgattttttacctgttggaaaaggtgaacacagtggagatgcaattattgttcgctggacggaaaatgaacagtctaaggtcatggtttatgatggcggcacgaaagactacggcgaagctatcgtgaaccacgtccgtaagtattatggagtggatttcatagattatgttgtcaactcacacccggataatgaccatgcgggcgggttgacgtatgtcattaaaaatatagacgtcggtgagttatggatgcaccgtccgtgggagtatagtgacgttatacgcgatttttttcatgatggccgtatgaccgacaacagtttagccgaacgattaaagcaaaaaatggcagctgcatatgcgcttgagcaggcagcgattgaaaaaggcattccaatttatgagcctttcgctgattccacgattggcatattcaccgttatttctcctttaagggctcggtatatatatgatttaatacctaacttttcaaaatcacccgaatctaaaaaaccagccttatctcaggaaggtatagcggagtcactaggtcatgttattcaggaagctgtttcagctttagctgatacttggaacaccgaatatttacctgagacggttgaaacatcagcagagaatgaaagcagtgccattttgttttccaggttcaatgataatggctatctgttcactggagatgcgggtatagaatcgcttcgagaagcggcagtttatgctgcagcgttaggaatcgatctccccaaagaagtgaattttgtccaaatcccacaccacggagggcgtcataacgtctcaacagagacacttaatctcattgttggtggcccgctggctaacggaactaaaccttttcgtactgcatttgtttcagccagtcgtacggcaccaatgcatcccaaaaaggtggttactaacgcattcattcgccgtggttttaaagtggtccagacaaaaggaaagcagattcatcatcgctataatctggcgcgtcgtgagggatgggtttctgccacgctggttcccttctacgaggagactgactaa

SEQ ID NO: 181576 - DNA, 177 bp, Klebsiella oxytoca
atggttaatctaggatcgttccccttcatgaaactcataggtcaggtcactgacccctatgaacgccaggcacgtctttataggcaacatcagttatggcttcaggcgaaattgatatggtctaaagacgattggggtaactttatgctttattcgcatcatctgggtttttattag

SEQ ID NO: 181577 - DNA, 2226 bp, Klebsiella oxytoca
atgatcgaatattatgaactaggagtgcgcctcgaacgttcggggcgtgacgacctttaccccaacacaacttcaataatggatgcgtgtcaggcgcatccttacatgcacttcattgagctacgcgtgcttgaactgcataacaaacgggctgaatttattattgtcgatgccggagatgggaccgttgcagcgaataatccggccggaatccgacgaaaagaacgtctggccattgaaatcaacccgcaccttcccgttcccgttcttgtccatacactccgcaaagactttccggtactgtcgcatcagcatgctactttggaaggcgagcccagaacgctttgtctttacgatacaggctggagtacggtcgagcggagttggacatctcagcgcttcatcgagagaattttctggtggttgagagaatctgcggaacttaatcttcacagagatgatcagcccctggaacagctgttttatatgagcccgtatcagcttattttaccgtccaattacgcggaatacttcaattctgacaagtgcaaactcacccttgagtccatgaatgagggtgttcctgtcatgctcaaggccgtgcatgaggttaaggggagtggcgtcaaacctgttcgtttgctcccgataagcgtcccacctgtagaagcacacaatgtgtcatccttcccccaaacgctgggaaaactgcatgagcagttgaaggcctggggtagtgacttattgcaaccacttgaagataccgtgtttgaatcactggtgggcccgattaaaaaagaaagcgatcagggggaatgcatactgattttacttttggtcccccgtattaaagatggatgcgcgcagagaacagatgtgctcggatattacgttaacgcctcacgttacgatctggcatgtgcgctggacttgctggggccgaaaaatgcgcaaggttcccagcatcgcatgacacttctggcagggagtcggggcacggaatgggaatctatcccgctgactcaaactgaaattcgttttgggctgaatgcgtccaacgccagagatatgtctgccatcgatcctgctactgcctcattgaaaggggttctcgcgggggtcggtgctttagggagttgtcttgcagatatatggatacgcgaaggatggggaacgtggacattggtcgacccggataagctactaccccataatctgtgtcgccatacaggtttcgatgcttttttggggcgccctaaaactgatgttgtcagagcactcgcagaatcaatttatccgaacgagcccgcccccgtagcaattaacaaaagtattcttgatgatgatggcgacatctcgtcagcgctgaaacacgccagcattgttgttgatgtgagcactacctttgaagtaccaagaactctcgcgttcaaagatgatattccccggaccgtcagtctgtttctcacgccatcggggtcgtccagcgtgatgataatggaggatgaggcgcgtttacagagaatcgatgcgctggaaggtcaatattatcgtgccattttgaatggcaaatggggtacccttcatttgcaacatcattatggcgatcgttgggtcggcggtggctgtagggatatctctgtgcgtatgtcgaatgagtccatacacgttcatgccggcattttatcacgacaactacgtcaaactgtgctcaggaaagaagccagattatgcatatggtcatctgacgaagattctggtgctgtcagagcacatgatattcctctctttcctgtgataaaggttagccaagggcagtggaccgttaaggttgatcagggtttggtgaataagctccgtgaaatcagaaagcaggcgctccccaacgaaacaggtggtgccattctgggaattactgacctcaaaaacagaagcattattctcgttgatgtgatcccggccccatccgacagcgttgcttcgcctactcattttgttcgtggacaggtggagcaggagcaagcgctggaaaaggcacgacacctcacggcacatgttgtagattatgttggcgagtggcattctcaccctcagggatattctgctcgtgcaagccgcgatgatgaaaagctgattgaaacacttcattcaaaaatgagcgctgaaggattgcccgtaacgatggttatcgtgtccgagagtggcctaaatatcattgtaaaatag

SEQ ID NO: 181578 - DNA, 1182 bp, Klebsiella oxytoca
atgaccgctaagataacgttttttcaggtagataatggcgacatgacgttagtgcgcctcgctgatgttcgtggcactgccatcctgattgatactcacatcagggcctcggctgatgatactcaggacgatacacctgatgttggtaaggcactgcgaaacaaactgaactttgataataagcatcggccctttgtagacgtctttatgctcagtcatcccgatcaggatcattgcggcggactgagtaaacacttctggttgggccatccagatgactatcctgatgatgatctccaccattctaaaaagcgtataatcatcagggaactatggtcttcacctctgatttttcgccgacgttccaagaaccacgttttgtgcgaagatgcgcaagcctttgatgctgaagctcgtcgccgtgtccgacattggcaagcaaatcagtgcgcctttgacggtaaccgtatcctgatcatgggtgaggactccgatggcaagaccgataatttgcaggctattctggttaaagcaggagagacgttttcgcgtattaatggcgagtattcttcatttttctcaagcatgctccttgctccggccccgcatgaagatgacgacaaccttgaggaagctttgtctaaaaacgaatccagcattgtgatgaacatgaagctgatgccgtatgcaggatcacagaatcccgttcacttacttatggggggtgacgcagaagtacttatttgggagcgcctttgggaacgttataaagatcaaccggaagtactacagtatgatctcctcctgactccgcaccattgctcctggcattccttatcctaccatagctggtcccggtatggagaaaatgctcaggttaacgaggctgcccgtaacgccttggggcaggcccgagccggtgtaaccattatctccagcagtaaacaaatcgtcgatgatgaaaacgatcccccctgtattcgtgcgaaacgcgagtacgatgagattgtggatgacgttgatggctggtttggttgcacgggtgaccttaaggataaggaatttattgagtttgaggtcactcaaagtggaacaatcgcccgtgttgtcgctggtgttgtttcagcagcagcaagcacagcggcagctgctgcaccacgcgccggtctgggagaagaatga

SEQ ID NO: 181579 - DNA, 873 bp, Klebsiella oxytoca
atgtgtatgcataccaccagaacaggcaattggggccaggacagaaggcttgagttcattgattttcgtttgttgtgggaagggcgactgaatcgtgctgatattacgacctttttccggatatctgtgcctcaggcttcactggacctggcaaaatatcaggagatcgcacctgaaaatgcttactatgaccgcaaccaaaagtcctacattgctaacgccagtttcaaacctgtttttgcaacgtttgaaagcaaccattacctgaacgagttgatgggtttggagacgggaattctgtcaccatctgagagttttatcggatgggtaccacctgttgcaagccttcctatgccaacacgtaaagtacagccagagaccctgattgatttaattatggctattagaaaccaacgtgctttagttgtggactaccgggcgatgcgagatgagccgtcaatccgtactatattcccgacggcttttgcacatgatggtcaccgctggcatatacgcgcatattgttttaattcagatatgtataaagattttgttctaggccgtttttttgaaattgttgaatcaataccgccttcaattgaggtgcccgttgatacagaatgggagacatttattgaagttgttatagggccaaaccctaacttctctttaaataaaaaaatgataattgagaatgattatcaaatggataatggcgaggcgaaaatacgcatccgtaaatcccaatacttttaccttaagcgtcgcttgaaccttaatgaagatggagtgccagtcaacgaaaaccagcaaattgtattactacgcattgaggaaccattaaccacttcaggtgacatcgagaatgaatga

SEQ ID NO: 181580 - DNA, 477 bp, Klebsiella oxytoca
atgatgattagcgtgattattctttatcttttcgctctcttgtgcttttcaacctacgctattggggctatgtcactaggatggttgccggaaccttacgctgcactacgggtccccttgatgtgtggcgctatagcgtatactggaggttgcctgtactgttttcgtgcaatttaccttaataaatgtgtaagaaaacactgggaccctgattggcatgtatggtattttatccgccccgtaactagtaccattgcaggtgccatcagctatttgttccttaaggcagggttgctcgttctggagtcgagcaccaatgtaggctccagtgaaatgggattttttgcgttagcctttattgcagggtttaacgttgataaatttgtggcaaaaattgaagaggtcgcaaaagcagtctggggaatagataaaacccgaagttctaatataaacaatgaaaataataaaggtagatga

SEQ ID NO: 181581 - DNA, 141 bp, Klebsiella oxytoca
atgtatcgggtaaaacagctgttcggaggttcactgacactgcgtgactacgatggtcaggttgcagaggctctggccatggtacgtgcgctgaacaaaatgacgaaggcaggtatgccagaaagcgtgcgtattgcctga

SEQ ID NO: 181582 - DNA, 495 bp, Klebsiella oxytoca
gtggcaaagcagaagttcagaatcaccaactggcacacctataacaacgctctaatcaaccgtggctccatgactttctggctggatgacgaagcgattaagtcgtggtatgacacatccccgccttcagcacgcggaagacctcagcgctattctgaccttgccatcactaccgttctggtgattaaacgcgtattccggctgaccctgcgggccgcacagggcttcattgattccattttcaccctgatgggcgttccgctacgcggtccggattacacctgtgtcagcaggcgggcaaagtcggtcaatgtcagctttaaaacggtcacccggggtgaaatcatgcatctggtgattgattccaccgggctgaaggtcttcagtgaaggcgaatggaaagtcaaaaacatggcaaagaacgccgccgtatctggcggaagttgcatctggccgttgacagcaaaacacatgaaatcatctgcgctgacctga

SEQ ID NO: 181583 - DNA, 1698 bp, Klebsiella oxytoca
atgaactctgtgtactcaatcattaaagaattaagtgatgcgaataagaagagcaatatcaaaagtgattttccatcatacgagtttccaccattaatgagagatcttattgaagcactgcatgatgactcgcaaattcccatagagattatcggcaatacagtattggctgcagtatcaatggcctgtcagccactggttaacgttgcgcttcctcacagcatacagcctgaaacatgctgtctttatttactgacaatagctgagtctggcgaaggtaaaacaacgattaacaaacaaatcatggagccattccatacatttatgagtgagctcaacaaggactatgtggatcgtgtagctgaatataaggttgatcttgaactatggcgtctcaggaagaaagcactcgaacgtaatgtaaagtcttcttatgtaaatcctgatgatgaagaaagggaaagtgttgaggatatggaaaatgctttcatactacatttaagaaatgagccacaaaaacctgaacgtttaactattctctacgaagacacgacactgaaagcctttactgatggcgttgctgtatgttcccatgccgggattatttctgatgaggctattatctttttcagagggtatgccagtaaccagttcggtatattcaacaaaggttgggaagaaggagaacatgtacagaaaagagctgacggaacatttacatttattaagccctgtatcacattttcattgatggcacagccgaaggttgtaaatcattactttgaaaaagaagggggacttgctaaagatgtcggctttcttcctcgcttcctgtttgcctcagccaaaagtactatcgggagccgaacggataacataaattttagtcgttcacgacagtgtcttgaaaattttcatggcaggattcgtgttttactttctcagcaaaaagaatctatcctccgtaatacatatgaaaagaaaacgttgatactatcagatagagcactggaaatccgtaatcagttgaaaaatgaaatcgaaggtaaaatggttgaaggaaaagagctttatcatatccgagacatcgcctcaaaatcatcagcgaacgctgcgagaatggcagctatattccattatttcagtaatgacagttccagtgagttgggggctgattatatggccagcgcctgtaacattatgagatggtaccttgagcaggcccgcaaaatattttatacgttgtcagaagattaccagtttgaaaaagatgtcaaagaaatctatgtttgggtaaggaatttgtttgctgataataaatttgttccgttaaagtttgaatatttcagaaggaaagcgccaaacaggctcaggaacacaagtaagctgaaggaattatttgatcaaatggtttctcagaactacattgtttatggttataatcgccctgccggggcgatgtatgtattaccacgtataaataaaaatattgtctcgcaaagcgtgaataacttttatgccaatgaatcaaatgtggttcgtgctcagcaggtatttttactagatacaggtatttttgttccagcaaagccagagccaggtgaaggtgattctcttttaaatgctccttttactatttttcatacatctaaacatatacagggtaaggaatcctacattgatttttcaggattatag

SEQ ID NO: 181584 - DNA, 219 bp, Klebsiella oxytoca
atgaccattcagaacaacaataccagcctgcttaccgacaagatggttgatatgaaattcattacagaatttacaggattaacagataaatggttttataaactaattagcgagggacaattcccaaagcctattaagttaggacgtagctcaagatggatgcaaagtgaagtggaaaaatgggttaatgaaagaattaatcaatcaagaaatcattaa

SEQ ID NO: 181585 - DNA, 624 bp, Klebsiella oxytoca
atggttaatgtaaacagcaatggtccattaaacacaaactacatgaaaagaatccagactacattaaataaatcactctatgaacatcataggacaatggcactcagaatcgacctgaggctaccggatgatagcccatatgaaaaagacccaatgttgattactcgctttatagaatcccttaaatctcagaagaatgctgaccaactcaagaaaatatccttaggtaaaaggagtcaccattgtcgcatcaggtatgtatgggtgagagagttcaataagaacggtaagaaacattaccacctggcattattcttaaacaaagacacttacgcttatcctggttcatataaacctgatcatgaaggtaactatcaccataaccttgcatatatgattatggaggcatgggtacgggcattaaagcttcaaagagaagataattaccagaaacattacagactcattcatttccctgaaaattgctatgcacacctgaacagatactcctcaacttatcttgaagattatatgaacgttataaatagactgagttatctggccaaggaatacagcaaagactcttcggacaaccagaggaacattggctgctctcagtactga

SEQ ID NO: 181586 - DNA, 648 bp, Klebsiella oxytoca
atggaaaatgctgccaactggcgaactgaatcgcgtaccgtctatggttatcgtcgggtgtgggcactgctgcgcagacaatcagaaactgacgacatgaccgttatcaacgccaaacgcgtataccgcatcatgcgtcagaatgcgctgctgcttgaacgtaaacctgcaatacagctcttgaaacgggcgcatacaggtaaggtggccgtcggggaaagtaaccagcggtggtgctctgacggcttcgagttcaactgtgataatggcgaaaaactgcgggtcacgttcgcgctggactgctgcgatcgtgaagcgctgcactgggcggccagtaccggtggatatgacagcgaaacggttcaggacgtgatgttgggtgcggtggaacgccgcttcggtagcagtctgccggcatcacctgttgaatgtctgacagacagcggttcaacctaccgctctcatcagacacgtcagttcgcccgaatgataggactggaacccaaacatacgacggtacgtagcccggaaagcaacgggatgacggagagcttcatgaaaacgatgaagcgcgattacatctgcatcatgccgaagcccgaggggtttacagcggtaaagaactttgcggaggccttcgaacattag

SEQ ID NO: 181587 - DNA, 1569 bp, Klebsiella oxytoca
atggcctttaccccttctacattatcacgcttgctagcgctggcgctgctggtgaagatatcgcccgtgctggctgaaccgtgggcagagaaaatctataatcccaagccggatagcgaagatattgttttgccaatgccctgtgaaggctctatggttttccgtaagatagaaattccggtctcaggtcctttggatgacatgccgatcaccttaggagaagatggcggagaatggggtttcgttgaacacagttatccaaccttcatcgccggtagctttaccgaaagcaaaaaaagtagaggtcgttactatttgatggccaaatatgaactgacagcattgcaataccaggcattaaccaatgatatctgccctacgccatcacgtaagttaagcatcgcagaaaccaatatcagttggttcgatgcggtaaattttgccgataaatataaccagtggttacgcacgaatgctctcgacaaattaccgaaagaggatggcagccctggatttttacgtctgcctactgaagtagaatgggaatttgctgcacgtggcggtctcaaggtaaacagtgcggaattccgtgattcccactatccaatggatgacatgaagaattacgaatggtattccggcccacagtcctctaacggcaaagtacagcttattgggctattgaaccctaatcccctcggcctgcacgatatgctgggtaacgtctctgagatgatgtttaccccattttatctcaacaaaatcaacagacttcacggccaggctggtggttttgtggttcgcggaggcagcgtcatctcgaatgaatcagagatccgtagcgcggcccgtaaagaaattaactactacgatgaagcccatcctttcaccagcaaaacaaccggtctgcgtctggtactagtctcaccggccattacatcaacagaccgcgtgaaacagctggagaaaaactgggctacgctcggtgccgataaaccggtcatagataaaagcaaagaagaccccacagacaccgctaaagcgctgggaagcctggcatcaggcgttgaagacaccgaactgaaaaagaaactgaaggatctggaaaatcagctgcgcgccagcaatcagcaacaaaaggaagaacgggcacaatccacccgcgccagccttaacctcggctcattcctttgcacaaaattgcaggatgatggtcgctttcttgacttcctcaatcacaactatgaattgctgtgtaaggataaagatgccagtgataaaaattgctctatccgaaaaacaaaacttggtgagcaaacagatcacctgcaacagctgacgagttactacgccagtagtctggttgattcagccacgctttatagtgaggaagatctgaaacatgaagtgacggttttcgatcaaatgctcacactgaacaaacgtcttacaggtcttaagccattcctcgccgcgcactggcagaatcagcaaaaatatctggaaaacgggaaaattgatacagttaattggctggaaaactgtaagaaaattaaaagtagtaactaa

SEQ ID NO: 181588 - DNA, 1215 bp, Klebsiella oxytoca
ttgtcctttaaccgagccagactgctgggccgcctggctatgcaagacctgtggcacgatcgcatcatttctttttgcatcgtctcttctctcgttgctgtcatcgcacctttattacttcttttcggtttgcgttttgggattgtgaaccagctgcaagaagatctagccagtgaccctcgcaacctggaaatccgtatgctgagtagcggcggctacaaccaaaattggatcgaacaattacggaagcgacccgatgtaggtttcgccatcggacaaacgcgttcgctaaatacgcttgctgatctgcaaacagacagcacacatttcattgagaacgctgaagttattccaacagactcaggggaccctttactcaagtctcttgaactccatcaggaaaacgaggttgtcattacccaggaagcagcacgtaaattagcggtgagtgtcggtgattcgctctttttgcgagtaggcagaatgcttgatgaacgtcgggaatggggacgaaaaagcgttaccgtcgtggggattttacctgcgacctattttaatcgtgccgcgatctttacccagccttcgttattgctggcgcttgaacatttccgcgatggctatgcggtaaccgggttggggatgaccagcggtgcgcagcttgacggtaaactaccgctctacgcacgcgccagattatacgcccgtgatattgatcaggttgccagccttgagcgcgatctccgggaacagcgtatcgaaaccaccagccgtctggctgatatagaaaatgtgaaaagcatcaatcgtgttttgggcattatttttaataccattgccgccaccgcactcattggctgtactgcctcacttacaggctcattgatcgcgaatgttgatcgcaaacgtaaacatatagctgtcctccgcctgctcggttttacccgtccggcagtggggggctatgtgatttttcaaggctgtctgcttagtctggtagcttatatcggtggctttgcgatttaccttttagccagtcaggtctttaaccaggctttagcaggcagccaggcaacgggtcagatgatttgtaagatcaccccgttgcacggcctcatcgctctgatactcaccaatgtcgtagcgacactggtcgcaggcattggtgcctggcgcgccattaatattgaacctgcgcagagcctgcgcgaggcatag

SEQ ID NO: 181589 - DNA, 726 bp, Klebsiella oxytoca
atgctgcgcatagaagagttgtgcgttgttcgcggtcatggcattcatgctcaccgggtttacctgccgcagctcacgctgcggtcaggccaggtggtcgcggtcacaggtgaaagtggatgtggaaaaagcacgctactggaagccatcggcttattactgcagcccagtaagatcgggtgcttcgagctggacgaaggtgcacagcaatttgatatcgccacgctaataaaggatgaacagcataatgaactggcggatattcgagcccgtcagcttggctttgtgttgcaaaatggggggttgcttccctatctgagcgtcaaagataacatccttctgccgtgtcagttactgggattacgccccgacaacgcgctgctggacaaagtaatcaatgctctcaaacttgcgccattattggccaaatatccaacgcagttgtcgtttggtgaacgacagagaaccgcttttgcacgtgcgatattacaccgtccaaagctgatactggcggatgaaccaacagccgcacttgacccctgcaacgcaaagaaattatttaacctgtttattgagctggttcgccaggaaggcatgatggcgctgattgtttgccacgactggccgctggtacaacatttcaatttaccctgtttaactgcccagcctgaaccgttagtggcatcgtcgaagcacgaacagggaggaacctattttgtcctttaa

SEQ ID NO: 181590 - DNA, 1962 bp, Klebsiella oxytoca
atgaccaggaatccgatgagtcttctggctctgccattatttggtctgctgctcagcgggcatgtatttgccactgatggcgacaaacctctgctccaggaaggtaagaaaacgttatatcaacgtgttctcactaccccgggctgcaaacttggtactgccgcaggtgatgataaaggtcaattacagccggccttcagcagcctgtatgtttatcaaaaagaagatgcaaacggccagagctggcttaaggtcgggccggatagctttggtaaaactattggctggttaccaaagtcatgtaccgtcgactggaaaatgcagctcacattggcatttaccaacccggcaaaccgtgaccgtttgctgttctttaaagagagaaaaagccttgatgatattctctctgcccccgatcccgtatcgctggttgccccgcttcgcgccaggttaaaacgggatggccacgccgagggtattcaggctgaggagcccgaatattttgtcgatctgcaaaagcagttttatctgttgccaatcctgagcggcgaagaagtcatgactgaagatggcttctatactcgtctgcttaacgtagcctccgtcagtaaagctgaaacggctaaaaaacaagaagataacgtaaatcaattgaaagggtttaacgcctcggtggtcttcgttattgactcaacaatttcaatggggccttacattgagcgcaccaaagacgcggttaataagatctatggcaagatcaaacaagagcatctggatgagcaggttaagtttgggctgatctcatttcgttcaaataccaaagccgttccgggcctggaataccgcacaaagatttacgcggatcctaaccatgtgaaagatggtgcggatttcctgaataaggtcgctgatttaaaagaagcgaaagtctccagttctctgtatgacgaggatgcgtattccggcgtgctgtcagctatagatgacattgactggagtccgtttggtgcacgttacgtggtcctgattaccgatgcaggtgctattgacggcagcaacaagctgtcaggtaccggtctggatgccagccagcttcgtcttgaggcgggtaaccgtggtattgctatctatacactgcacctgaaaacatcaggtggtaaagataaccataccaaagctgaaagccagtaccgcgatctctccaattttgacagtacccagtccaacctttaccaggccgtaaatgccggtgatatcaagatgtttggtcagcaggtagatgcgctagcttccgccattactgagcaggttaaatctgcttacatgggtgatgctgcgattggtagtgcgctttacgctaaagacgatggacaaaaactgacgccggagcaaaagctacttcaggatacggcgttaattggacatgccatgcagttggcttatctgggtaagcgcaacagcacgcaagccccgttagtctttcaggcatggattagcgatcgcgacctgattaagcaaaacattcctaccaccgacgttcgtgttctcttgaccaaaggtcagctaagcgacttaagcgatgctgtcagccagatccttaaagcagcaaatgaggggatgatctctccgaccaaaatgtttgagcaactgcgtactgttgcggcaaccatgggcgctgatcctaaccagctgaaacaacaggataatgcacgcattggcgatctgggtgtactgggagaatatctggccgatcttccctataagagcgatgtcctgaacctggacgaagagacctggaaaagctgggatggattgtcacaggagaaatttatccgcacgctctcatccaaactgcgtcattaccaaaaatataactccgatgttgatcgctgggttgagctggcaaaaggaagcgatccgcgcgatcgcgtttatcccataccactggaaatgatgccctga

SEQ ID NO: 181591 - DNA, 1014 bp, Klebsiella oxytoca
atgctagctaaaatcatcgcctgccagccggcagagccaggtactgcacaactgatggtccgcctgcgtggtgaaaccacaatattgactaatctgacctttactctgtgtaataacgagcagaactacctgcaacccaatggcagttggagcccggcgcaacactggtttaccgtgaacggcggttatgcgttgaataatggtagcggttttcgtattggcccaacattgcttgatccattgctggcaacggcaagccaggtacaaattcagatcaagctcgattctggggaaacacgcaataccacattacaactggagcgcaacgaactgctctcttctgaagcaagaggtgaaacaagcaactatagcggcagcagcatgctggctactccagaagatccttctgagcccgtcattgcgacagaaaccggtgttgcccctgcgcctgtagagccgattattcattctgaagtgagaaccccggcaaaatcggggccttcccgccttcctgtcattagcgctgtaatactggcattagtcgtgattgccggtgctctgtggtggtttttagtccgggataaatcaccggaagtcgcctacgttgaacaagctcagcaagaaacaccagcgactgcacccaccgccgcaccagagcctgtcgctcacagcacctgttctgcacagggattaaacagccagaacgagcttgatttcgtccagagctgcgttctggaaaaactcgacagtgacaaactgctgaccattatccaggccgcaaaagaggctaaaaaatgtggtgttgcacagcgtctgtatgctaaccgtgctcagagtggcgataccaaaatcgcgatcgtgtacgcaagtgaatacgatcctaaataccaccagccaagtgaatgtttcaaagcgccggataaagatactgcagcatattggtacgaaacggttctgcaaacagagcctgacaaccaaacggccaaacagcgccttgaggagctaggaaaatga

SEQ ID NO: 181592 - DNA, 2715 bp, Klebsiella oxytoca
atgaataacgatcaaaaatctctcactcagggttgggctgctatcgctcagggatgcctggacgcactcggatgggtcaacatcgtacgctccggttcacgtcgtttagacaacgaagcagacaaactcaacctgaatttgctgcgtacgcgaaatctggccaacagcctgactcaggttgccaagacaccgatgaccgtcggttttttcggtatttctcaggctgggaaatcgtacctcatttcagcgctcgctgctggtagcaacgggtcactggaagcgctctacggtgaaaggcgtgttgactttatcaaagaggttaaccctgttggtggaggtaaagaagctacggggttggtcactcgctttacccgtcaggctcccgccgcgccagctggatacccggtgccgttgcgcctgttcagtgaaatcgatttggctaagattcttgcgaacgcctggtttaacgactttaatcatgagcaattgagctatcaacttgaccaaagtcgggttgaagagcgtctgcgcccattcctgcagcgggctgtgcaggtacaggaatataacggcgtcagtcaggaagatgtcgtcgccttgtgggattatcttaacgcctcctttaaaaagtcagttgagaagcttgaacacgcctggtggccgcaggtactgaaaattgccccgacgttgagcccaaatgatcgtgcagaactcttttccttgctgtggggagaacagccagccctcaccgaaacctaccgttcattagccaatgtactggtgaaactgaaccatgcccggatggtattcgcaccccttgaaacgctgactgaccacagcagcggcagcatcatgaacgtagatagcctgaacagactaggctccagtcaagatcgcaacgttgagatacgttactggaaagaagagcaacaaattggtagcgccagcttaacgcaggcggaactggctgccttaaccaccgaactgattttccctctggcagaagttgaaaccaacagtgttgtggaacaggttgatctgctcgacttccctggctatcgcggtcgtctcaagatcaccgctcttgaacaggctggccgggatggacttaacgcgatttcgcaactcctgcttcgcggaaaagttgcctacctgttcgaacgctataccgataaccaagaaatgaacgcgcttgtcgtatgcgcaagctctgccaaacagagcgacgttgctgatgtaggcccggtattaaaccgctgggtagagaaaactcaggggaagagtgccgaagagcgcggaggccgcaacccgggtctgttctgggcaataaccatgtgtgatatgcgtatcgtcaacagcctgcaacataccgaaggccagttaaaagaaggctgggaaggtatgatgcacatgactctactggaacggttctcacactatgactggctttcgcaatgggcacctaaccagcctttcaacaactgtttcctggtacgtaaacccgggctcgataacccattcctgagacttgaaagtaatgccgggcaggagcgactcctggaagtgtgtatcagcgatcgttaccgcgatgtactcgataacatgggcaacaccttcgtctgtggaaaaaatgtgaatgctcacgttgcagaaccgaaagcagcctggcaggcaatgctcgaactcaacgacggcggaatgtcgcgcctgactaaagcacttcgcagcgtcgcccatctcgacttcaaactaaaacgtttacagcaacaactgctgcaatgtcgcatggaaaccggtgatcaacgtcttggtcggtggtacgaaaaagacggtgatgggcagattgtgaaaaaacaagcgattgccaaagagttatggcagggtttgtctgcatgttcccacagcatgggggagcttatcgaacgtctggttctgccgcctcaggaactcaacaacatttatttgagtattcgcgacctcggccaggcgccgcagaccgaaggcgaaaacttgaccatcaatgctttcgcagccagcccgtttggtggtaatccatttgctgataacccctttgccagcgacccctttgtgactacgcctgttgaagcccccgttattgatacaccaacaactgtcgcagcagaacgcgtaggccaggatgatgatttcgcgcatcaggcctttaaagcctgggtagcccacttgcgggagttgccacagcagccgttgcaatggcgtcaactgggcatgagcagtgagctgattaatcaactcagcgaagagttaatcaccgccgccacacgtttggatctggaagggacattgaagcatgccctggcgggtcaagagcaggctgaaacaactcgcgtacatatgcgagcacgtcaggttttgcgcgctcaactgaccatgcgtgattttattgcctggtttggttatctcaccctgccagcagaaaaggtacccaacagctatgtaggggagagaaacaaagtgtttctgcgtcagaagcagctcgctaacgatgagttgccacaactcccagcagtcgcgccacagcccggcgtgtcctatctgggtgactggctctctgctttgatgagcgtcgtcctggacaatgcgggtcatagcgccacacgagatatttccttcgaacataatcggcaacttggtcagattatcagccaattgaagcaagagaacatgccatgctag

SEQ ID NO: 181593 - DNA, 3069 bp, Klebsiella oxytoca
atgttgcctgagattgtatctttcgatcgtcaaattaccctcgtgggtgactctgggatccagtttatggatttcggattgtcccctggccgcctgcctgccggcgagtttgtcaaattagcaaacggtgtactcacccgtttaatttacaacgagcagcgcgattactatttctatcagccgacccccgataacatcgagaaggcaaaaagccagtacgatatccctgttgaacagagcctgaagttgttcgacggcatctggttaccgcttcctttgtttcgctttagcccaccgaatgtgtaccaggagggaccgctaaactgggctcgttttcgtttagtcaaactacccgaaactgatttagatggtcatagccatcgcatgacgctggcgatcgacacccgtattatggctaaacagcaggccgccgctgacctcagtccgaaccaggaagatatgaatgctggggcaaccttcgccgtcgcgacagcaacctatgccctaaattggtacctgacgcaggactggataaccgactggctcaaagaagtattcaaagaagcgagcaaaggccgggatatcgacgagcgtgagcaggaacttgcacagcaatacccgctggcacattacctgaaccttctgtcattgatggcgattccagtcgaaggtctgcaaacccagactgaccccgtcattgaactgccgcagttcagagtgatcgccaatcgggaaaccaatgcgattaaacccatcgccgtcgacctgatactcgacgtgggtaactcgcgcacctgtggcattcttattgaagatcatgggcaatcaggttcaggcatgaggcacaactatgtgctgaaactacgtgatctcagcgcccccgaacatatctataccgatccttttgaaagccgggtcgagttttcgcaagccttcttcggcaaagatcactgctctgtacgcagcggtcgccacgacgcgttccagtggccgactatcgcacgtattggtggtgaagccagccgtctggcggctcgtcgtaaaggcagcgaaggttcaacgggcctgtccagccctaaacgctatttgtgggatgagaagttttatggtcagggttggcgttttaatggcagctatgtgcaggacagcaatccattggcaacggcggcaccatttgccaacctgatcgatgaaagaggcgaagccctgcacaccattgaggatgagatggatcgcatccccgtttttacgccacgctactcacgcagttcgctgatgacctttatgctggcagaagttctgacccaggccattagccagattaacagcccggagcagcgtattcgccagggacacgccgggatcccgcgtcagctacgccatattattctgacggttccgccaggtatgcccatggctgaacgctgtatgctggatgaacgcatgcgtcaggctgtcggcttggtgtggaaatcgttacgctggcacaacggcgagaacgatccgtacgaggacgtacaagaagagcatacggaagctaacatcaagatcccattacctgaaatcagggtggagtgggacgaagcctcctgtgcacagttggtttacctgtacaccgagattaatcagaactttgccggtcatccggaagagtttttcgacgcaattggccgaccagaccgtaccgatcgtgaaagtatcactatcgcgtcaattgacattggcggcgggaccaccgatctggtgatcaccgattaccgcctcgatcataatgggcacactggcggtggtactaacgtacatatcatcccccaccagcgcttccgcgacagttttaagatcgcaggtgatgacattttgctggaagttattcagtcatacgttctccccgcttttgagcaaaccctgcgtgaagccggtgtaatgtccactgaaacactgatgtcccagttgtgcggatcgcagaatattagcgcagccgaagccgtgcttcgccaacagctgagcctgcagctgtttgtcccgctcgcattgaatatcctgggaacatatgaacattacgatccgcttgatgaacaaacgcataccctgattaaccaacgtgtcggcgatttgctaccggtgggttgtattcgtgatgaagtcgaaggattcgtgcgccgcgaagttcagaaagcgggaggcccgacggactttaaaatcgcggatatcatgcttaatctgccactcaccaaactccatagcgatctatgtgcaggtaagttcagcatcgataaagtcctgacagcactctgtgaagtgctgtcttattatcattgcgatctgctgctactcaccggccggccgtctcagttaccaggggttcaggcgatcattcgtcgcaaccttccgttaccgccagggcgtattctaccattacatggttatcagacaggtacctggtacccgttccataaaaacggtcatatcgacgatccgaaaagtacagcttcagtgggtgccatgctcacgcaactgtgtgctaaccatagcattcctaacttccatttccgcacatcagagctgaaaccctattcaacgattcgccatatcggcaccattgatatggataacctaattcgcgatgccgacatcgtttatcaacatattgagtctgaaaacgggcagattaagctacccaacatcatcgatgaaaatggcgagaaaaccacacaaagcatcgttatgcgtggtgacctgcgcttaggctatcgccagttggatgctgaacgctggactgcagcaccgctgtatactctacgttttagcgaagaaggacgtaaaaaattctctttggctaagtccacagataacggctctccgtatctcaaagtcagattgacgatcgataagggtaaacgagcccatcaacttggactgattagcgatcgtctggcgatagccgatgtcagcagcaacaccgataagtcatttagcaaacgtgatttggatctggatctcaatacgatgcccgatagagggctcattgatagccgtcactggctcgatagcgggagtgttaaaaaataa

SEQ ID NO: 181594 - DNA, 1470 bp, Klebsiella oxytoca
atgcgaaattcgattcagggaccactgctgcgtaccgggcataattcctcatttaaggctctgggtgaaacgggctatcccgtttttaagatggcgttccagttacgtgaagcaatctaccgtcttgatgcagggcgcgatctggctcgtcatttagctatcccgcaaaacgatcagggtggtgacagaaccgattggtacagcagcttccctggcgatgtcatcccctggagcggtgcgagtgaagcggagagggaatcagcgcgccagcaatttaatgcgtttcaaatggcagtgcaggcgttaagtgagcagttactcaatgctgagcaaaacgggaccgggggcgatcgccgcgtcttcgcacagttgctgaagtcagtcacacatttcccggattacgaatttgtgtatcttgtaaacggaattctggtgattaccttttggggatttgtccatccggaaggcgaacaacgtaaccctatgcattggctgagtccggcatcactaccagcaacccctctcgcggcctccccccctctggctcctgtagacaccgctgtaaatccgtctgttacacctgttgtagataccgtagtgcgcagacgctggagctggcgttggttactctggttgctacttgtgtcgctgctgctggcattattgttaggtcttctacgcggatgcataccatcactctccattccgggactccctgccatcgccacggataaaacggcgatcgatacggctcctgccatcgaacgtcccgccgtaggcgtttccgatggaacaatgcaggtttcccgcacaggttcagaaaccgtcgtgggttcagctgtcgtccctggcatatctgagggtactgaagtcgatgcgcagcaagcactggagccaacatcgccagccgttccggcagcgacagcaaccacacaggtcagtgacggcacaattcccccagtcgttcgtgccagtgatgccaacgctgatgcgtcgactatttcagcacctcctgctgcacttggcttcgcagacgctcaaacggcccccgtagttcaaccagtcaccacgccgccagtcatcccggcacagggcacaccgctgacgcttcctccggcccttcccgatggcccggcgcagtttcttaacggcgaatggcgcgtgaatggtggtattcaggacaagctcaccgggcgaccgttgcaactgcaatataactttgcccagggtaatggcaccgtcagcatacgccagtccagcggtgttacctgccgtggccctgccagcggcaatgtgcagcaaggggcgctgagtatcaccaatcctgagcaaatgaaatgtagcgacggctcaaactttattgtaccgacaatcgagtgtaaatcacccgctgctggccacgccgattgtattggcagcaatgatggggaaaaaacattccctattcgcatgcttcaacctaattcctga

SEQ ID NO: 181595 - DNA, 1155 bp, Klebsiella oxytoca
atgatttcggttatgcaacgattaacaactgctgcgcctattgatgaagcgactctgacaatctacgaggagacggttgaaatcatacaccgtcatcttccaccgtctctggcgctactctacgccactgctcgtcgtggttcacagggccatctggaatggtggactgaacgccaggggctggcaaagcccttttctgcgctaagcgatgtagaacaagccgccgtccagagtaaacgccagcagtaccaggatattctggccggtttgattgagcagttactcgcacacggcgaagaacattcggcacatgccttacaaaggctgttaacgcattcgcgcgatcttaacggctatagtgtaggtggcgaacctgtgctgatcaactgggccattatcagtgaagcgcccctacttcccgtggtcgttatcccatggtggcgacgcttcctgccatggctattattgctgctattgttgctgctgaccgcctgtgtctggtggtggcataaaaattcattgactccgcccactcctccgatgcatcacgatgtgcttgctgctgcgcctgctgtcgcccccgcaagcacgaacttaacccaagcaaaccccagcataaatctggagaaacgcaaagattttgggcggatcaaaatcaacctgacctggcaacagggaaaccataaagagcctatcgacctcgatatcgccgcctttattcgttttaaaaacggcaagatcagtggtgccgaagcgttgagtaagttcctgggaaactatgacaaaccgccatatctgttgctgcaacaagatcttcgtgaaggtaacgatcaagatggtgaatggctcttcatcaatggtagccactggcaggatgttgatgaagttctgatttatagcttcatttacggcggcgccgacaactggcaagggaccaatgccactatcacgatttatgtgcccaatcaaccccgcattagatccacactgactgacagcaatcagcgcaataacgttgcggcgatagccagactcaaaaacctcgacggtaatatcaatgttgaacgtctggaccgtttcttccctgaccggaagtcgctggataagcactatggctggggttttgaatggacgcctggtgcgagtaaaaaatag

SEQ ID NO: 181596 - DNA, 483 bp, Klebsiella oxytoca
atgagaaaatatgtgctcctcgcttctatcttgcttaccggttgttccacatcgccacaggactgtgatttacacgcacaagatccgagttttattaccaaactgagctgcgccacatccggcggttatcgtcagcaagttgatcaaaaagaacagcaggttcgactcagccagtatgaaaatgagtcggcgaagcaacagcaagcttatacccaaaaccgacagcagaatgtcaatcagaagctggccgatgaacaagcaaggttaaatgccgtgcgttcagacctgtcgcagacccttgcacagctgaagtccagcaaaataaaaagcagtgaacgccagaaggaaattcaacaattacaggacttgcaacggcagtctaagcatgccagtggcgcaagtgaaattgctgaaattgaaaagaaagtcgcagaagccaagcagaaaatcaaagttctggaggaagcaaatacccttcgctaa

SEQ ID NO: 181597 - DNA, 738 bp, Klebsiella oxytoca
gtgaataatcttaacaaaaagattgcctgcctcttgatttcaacatctttgctgcttagcggctgtgctaatacaggaagtactttactgtcaggaacaaaaccggactctcgcctgacaacgactgagcaatcccagttttttagcgcttccggcgcacaaggttgtggtgtcggggctgtatctggtgcagctttgggggctctaattggtgctctcgctggtgataccaagaaagcgctggctggagccgcaattggtggtgctacgggatgtgcggccggtatggcagctaactactatcttgatggcctgaaaaaggattatgcttcgacatccgatcgccttcaggcaatggataaggacatcagcaaagatactgcagcagtagaaaaatcgactctggcgatgaagcaagtcatcagcgaaaatcaagctattctgacccaaatgagcattcaaaaagataaggcagactttgataaagcaagcgccaaaaagcaattggcacaaatcgacgccaatatcagcaggatgaaagatacagttaagggcatgaaagataaagagtctgcctataaagtagcgttacaaggacaaacaactacaacatccgcagaaaaaatcaaattgtctaacttgaacaaagagtataccagtctaagtagtaagatcagcgacttagagaaggaaacgaacgagttatacgaacaacgtcaggctatttctctaggctga

SEQ ID NO: 181598 - DNA, 258 bp, Klebsiella oxytoca
atgatatccctcccgtcaggcccccgtatctggctggttgctggcgtcatgaatatgtgtaaatcgttcaatggtctcggcgagcttgtacagaacgtacttgataaaaaccagttctccagccacctgtttatcttccgtgaccgcaagggcgataccgtaaagatcttcttggctgatgctgatgccctgtccctgtttaccaaacggtcggaaggaggcgtgtttatctggcctgctaccgaggggggcatatag

SEQ ID NO: 181599 - DNA, 822 bp, Klebsiella oxytoca
atgaaattagccagccgatttggtcgggtgaaccagatccgccgtgaccgtcctttaacccgcgaagagctgatgagccacgttcccagtgtgttcagcgaagaaaagcatgaatcccgcagtgagcgttacacatacatccctaccattactctgctcgatagtttacagcgtgaaggctttgagcctttctttgcctgccagacccgcgtcagggaccagagcagacgggagcacaccaaacacatgttgcgcctgcgtcgtactggacagctcaccggccaccaggtccccgaaattatcctcctcaacagccatgacggctcatccagctatcagatgctgcctggcctgtttcgtggtgtctgtaccaacggcctggtctgcgggcagtcattcggggaagtacgggtgccgcataaaggggatgtggtggaaaaagtcattgaaggggcttacgaggtgctggggatatttgaccgggtggaggagaagcgcgatgcgatgcagtccctgatgttaccgccacccgcacagcaggcactggcgaaagcggcgctggcgtatcgctttggtgaagaccaccagccggtgactgtcgcccaggtgctcacaccccgccgctatgaagaccgcagcgatgatctctggactgtctaccagcgcgtgcaggagaacctgatgaagggagggctaccaggacgtactgcacagggtaaacgcagccgtacgcgcgccgtgaacggcattgacggggacgtaaagctcaaccgggccctgtgggtgatgaccgaaaacatgctggccctgtctggccgctga

SEQ ID NO: 181600 - DNA, 351 bp, Klebsiella oxytoca
atgaaaactcttcctgcaaatcagtgggtggcgaagccatgcccgccgcctgtgcttgtctggcaaacgctacttacgcgtctgcttgagcaacactatggcctgacgctgaacgacacgccgttcagtgatgaaaccgttattcaggagcatatcaacgccggtaccacgctggctgatgccgttaactttctggtggaaaagtacgaactggttcgtatcgatcgcagagggtttaactgtcaggagcagtcaccttatcttcgggctgtagatattttacgggcaaggcaggcaaccggtttgctaactcagtgcaaaaaacgcaaatgtaatcagccagatggttga

SEQ ID NO: 181601 - DNA, 1395 bp, Klebsiella oxytoca
atgagaatcgacaaactttcactgcttaactttcgttgcttcagacagctcgatattacctttgatgaacacattacgattctagttgcaccgaacggtgcgggcaagacgacagtgctggatgcggtacgcctgtcgttgatcccttttattcgcagttttgacaccagtctgtataacagccgatcgcttggtatacgcacagaggatttgcgtctggtttttcgccaggaagcgctgaatatggagaggtcgccattaacaactattaccgctgaaggcgaatgggaaagtggaaagaaggcaaaatggatgagcggtctacagggagaacgagcatcaagtgaggacaggggggctacggatctcacccaatggggggaacaactcaaggcacagatacgggatgaaaataatgcacgacccatcgttcttccactggcgctttatctgggaacggcgcgtttgtggtatcaggatcgctacaaaccgcaatctgatgagcagcgtctggataacagtgcattttcacgtttgtcgggatacgacgactgtctttctgctacctcaaattataaaaaatttgagcagtggtatagctggctgtggcgcagcctgcgggaattccagattaaatcactggaaacccctgtaacaaatatagtggaagtttttcgcggtgacataatacgcgatgctgtacagacaattaagcaagctattaattacctgacgcagagcgcaactggctggtacgatctggaatatagctctacttataaccagcaattgataatgcgccatccgcaacatggcattctcccacttaaccaactcagcgacgggctacgtaatgctgtggcaatggtggcagatatagcgtttcgttgtgtcaaactcaacccacacttacgcgataaagccgccctacagacgcagggaattgtcctgatcgatgaagtcgatatgttcctgcacccagcctggcagcagcaaattatccagtctttacgcagcgcatttccgaagatccagtttattgtcactacccatagcccacaggttatcagcacggtcaaacgggagtctgttcgcctgcttgaacaggatgataaaggtaacggactggcatcaataccacagggatcaacttacggcgaaccgagtaatgacgttctgcacagcgttatgggtgtcgatccacaacctcctgttaaggaaaaggctgatctacaaaaactgacggtgttgatcgaccaggggaaatacgatgatctggaaacacagcaactcatggctaccttgcaagccgctttgggtgaacatcacccacagctccagcgtttacagcgcagtattgctcggcaaaaactgctgaaaggaaaagcacaatga

SEQ ID NO: 181602 - DNA, 735 bp, Klebsiella oxytoca
atgaggcatgtgaccaaaaaccgacggggaacagatgctttacttactgcaaatgaaaatccgccacataattctgatcaatcaaccagtcgctggcggcgttttggtcgggataataaagcggacttaatggcccgtcttctcgatgagcagtatcacctttgctgctacagtgaaatacgtgctgacgagcgtaggttaggctatcacattgagcatgttgagaataaaagccaacgaccagaacgaacttttgattatctaaatctggctgcaagtgcattaaattcagggccaaatggtggtttatttcaactgaaaagtaaaaatgcctttggcggtcacgctatggggaaacaagatgctgtagatacggcaaaatttatccattgccatatccacgattgttaccgttattttgcttacctttctgatggtcggatagttcctgctgatgggctaaatgcacaagaaacggagaacgcgcaatacaccattgatctactaaacctgaacagcggattccttcaaacggaacgtcgtaatcattgggaagagctggaacagctttttgatgaacacattgaaaaagactgggatctgcaccaattacttcagcttgatctggttccctcagcagatcataaactgcatgaattcttcagtattacacgccagtttttccagcaagacgctgaacaagtattacagagccacgcccctgccttaatttag

SEQ ID NO: 181603 - DNA, 243 bp, Klebsiella oxytoca
gtgttcactaccccggcttttctcacctacatgctggcgttcaacggagatctctcaacagttgaagccgcccacagaatgctcgacgatttcgatcagtacgcgaacggatggaatgggctggagtatcgactgtgggacctggaatatcaggttgttcgctcaaccagtttttctgagacggggtttatggtcaacatcctgacggatacctggatggaatggtggtttctgaataactga

SEQ ID NO: 181604 - DNA, 363 bp, Klebsiella oxytoca
atggctaaagaaaccaaatctgagctgatggatgatctgaatgcggaaggcaccggcgatggtctgaacgctgaggatctgaatgcaggcaaaggcacccaggacaaccagcagcacagcgatacaagcggtgatgattcatccggtgatgatgcagatgaagaaaccgccgctcctgaatacgtggttctgaaagggaacagtattcgtcatgatggtgacgtttatcgtgaaaacacggtcattccggtatctggtcaggatgcgcagcgtctgctggccgctggcgtgattgctgatgttcaggttctgcgtcagcgcgtgctgtctgcggcgcctgccgtgagcgttactacggagtaa

SEQ ID NO: 181605 - DNA, 261 bp, Klebsiella oxytoca
atgttcaaccgaaataccagtctgctggctggaatgagtgatgatcaggcgcgagcagcattagctaaagcccaggctgcttacgtcgacttagctaccgggacccacggtgtttcattttcctatacgcagggtgacgggacacgctccgtatcctatcagcaaactactctgtccgatctgttgggactaattcagtcactgcaggcgtacctggggatcgtcgtgagaccacggaagccagtgaggtttcgattctga

SEQ ID NO: 181606 - DNA, 585 bp, Klebsiella oxytoca
atgaaccagtcagattttgccaggctccacggcgtcagtcgtaaaacagttacgatgtggaaaagcaggggatggctgatcatgtccggtgatgacattgacgttatcgcgtcaaatgcgcagctggagaaatatagaaagaccattaaccgtccgactaaagaaaaagtcgcggcaccagttaaaaagagtgctttgccttcaccatccgtcacgaaggaaccgatggaaggagttgatccttcactggagagtatcgccagagatttcattctggagaacggtgctgagttatcactggatgaagcgcgtcgtgtaaaagaaaactacttagcattactgacaaaattagagtttcagcaaaaagatggtcagctcattgaaatgaccgtagccgaggaggttcttttcaacgcctttcgccaacagcgtgatgcctggctcaactggccttcaagagtggcaccattaatggctgctgatcttggtgtaccggcagacaggatgacagaggtgctgattgaacatgtccacaaacatatctcagtcctcggagaaccagagtttaacccagcggaagattga

SEQ ID NO: 181607 - DNA, 639 bp, Klebsiella oxytoca
atggcaacgattagggatttatcccggcagctgaggcaactgcagaagcaaatccccttcgccacagcgctggccatgacatctgtagtgagggaaattgccgccgcgcaaaaagttgcactgggccgaaagctggaatccccgactcctttcacggttaatgctgtgggctcatcgggggccagaaagaataaccttcgcgcgaaagtttatgtgcgtgatatcgccgctgattatctggagccattcgagtttggcggcgagcataagctgaacagccaggcactgctcaacccgaagaacatcaaactgaacaagtacggcaacatgccgcgcaataagctgtcgcagttgaaagcgaagcccaatgtgttcgtcggtgaggtcaatggcgtagatgctgtctggcaaagacgtaaaccaatgaaggcgaaaaagaaacgcgctaagcgctcagctaatggtacgcgtcgaccaaagcggaaacagcgcactcctaagctgctggtgaggtttggcgatgcgttgcccgtaacgccagtgctcgggtacatggaccgttcacgggctatggcggaagcattgatgcccggtgcgctgagccgtgccatcgctgatgcgatcaggacggcacggtga

SEQ ID NO: 181608 - DNA, 243 bp, Klebsiella oxytoca
atgaacatcaataatgttaacgccgcttcaatcttatgcgaacagcttagggaactcgaagcacaacgtgcaatcgtcgcgcgtggggaagggctaggtgtcacgattcagagtcgttatcaggatgatgcctttgttaatgcagtacgcagtagtgtcactggtgagcttagccgacgcattggtgcggtaaagcaccagcttgctgaactcggtgtaacgtcatttaccaaagagcattag

SEQ ID NO: 181609 - DNA, 192 bp, Klebsiella oxytoca
atgacgatgttgatcgcgagctgcgcgaaagatttacccgccccggtggtggttgataccgcctgcagctgggtgcggatcatctatctgaccgagcacgatatcaatgtgatggatcggcaaacgaagcgcgacattctggcgcacaacaaagcagtgctggcgaactgcccgcaaggtacaagcaaatga

SEQ ID NO: 181610 - DNA, 276 bp, Klebsiella oxytoca
atggggatagaatctatcgcggggctggtggttgtcattctgggcgctatcgctggcgcgttcggcattggtcatgctcgcggcaccagtaaagcagaagcgaaagccagtcagcagcgtaccgaagagaacgcggccgccagcgtcgccgcggcagaacgtaaagcagaagccatgaaaggggccagcgatgttgaagagagcgttaagcgtatgggcgatgacgatgttgatcgcgagctgcgcgaaagatttacccgccccggtggtggttga

SEQ ID NO: 181611 - DNA, 1062 bp, Klebsiella oxytoca
atgcgggcgctgcttaatgtggatatggcccgacatctggggatcgtgctgctaaagcctggcagcgaactcatgaagctattcggcaaaggacgtgtgctggtggaaatgccgccaacgcatatggattctgtacccagtggccgtttacccgatgctcgccagccactgcgtgaggattccgaacttcttccgtttttcctgaacgagcgggttattaaggcagctggcggaataaatgcccttgagctttggcttgaacgtactgttaagtattgccagtggccacactcaatttatcatcatcatgaactggtgaccttcaggcatgagcctggtgccatacgggcatgctggcattgcgataatgaacttcgcaatcagaccgcacaaaccctcgacaagctggtggcgttaaacgttgccgactggattatcaacacagtactgatttatctgggctacaacagcgaacggatactttcactggctgaattgtgctggtgggcggtctgtaagggcataggaaatgaaatttcagaggagatggcccggcgttctctgcggatgaaaagggaggagttcaaatctgtctatcgggaaagcgagctggttcctacagttcaggccaccagcattctgactgagcgactaaacagtgtagacgtaccagcaccggattttcctgcagctacaccagcagcggtgcaatcggcgccagtaaaacccgttgtaggcgtcatcgtagactctgaagctccagcaacatttttcgcccgtcctaaacgcatccgctgggtatcctctgattttcttacctgggttaagacccaaccctgcatgtgctgcgggcagtccgccgatgatgcacaccatctgattggctggggccagggcggcgtcggtacaaaggctcacgatatttttacgatcccactttgcagaaaacatcaccggcagctgcatgaagatccgctggcattcgaacgtgaacacggcacccagcctgtactgattattaaattgctggaccgggcttatgcgctcggtgtactggcgtaa

SEQ ID NO: 181612 - DNA, 204 bp, Klebsiella oxytoca
atgaagaaaagctggtttgtacattccggcctgactgagtatcaggcgcgggagctggtagagcgttacaggaaaagtaactatctggtcgagaaaaatctttctgctgactttctgacatgggaggtcaacgtaaaactgcctgaggcacccagcgcgccgagggttgataaaacattccaacaaaaaatgtggagggactga

SEQ ID NO: 181613 - DNA, 393 bp, Klebsiella oxytoca
atggcgcaaaatatagagacaccgcaatctgcatcggctggcgctaatgaaaataacgctggcctttcttcgcttcaaattcttcccccgcggcaacaggaagttttcgacctgctgctggcatttaccaaaaagaatggttatccgccgacaaacagagaactggccaaccttattggtgtccgttctgcaaatgctattgctgagcatatccgcgcacttgagcgtaagggatttgtatctgtcgctcgtggtgttgcccgcggtattaccgtggttggtcaaaatgaaccggcactggctatccagttgctcagtgcgcttctcaatgatgagcccggcgcaagggatcgtgcggtcgagttcctcagactgtatgaggtccagccatga

SEQ ID NO: 181614 - DNA, 234 bp, Klebsiella oxytoca
atggatgacttaccagataccggatttgcattggttcgttgtgcagacagggcggtgattgcctattttgagagctttcctgagtgcagtcgggcgctgatgtatcgtaagggggatatggtttcattcatgcctctccagccggatgagattgttggcacactttcactatttacgcagatgcttaaaaaggcgggttaccgcgtttgcgagtcatctggtatattacgttag

SEQ ID NO: 181615 - DNA, 1086 bp, Klebsiella oxytoca
atggcgaacgacaagaaaagtgttttgaatgagagacccaaaacccaagaagataaagcgaaggcattacagtccgccatggggcagattgaaaagcagtttggtaaaggctctattatgcgccttggtgaaaataccaatctggtcgttgaaacaatgcccagcggatcccttggccttgatattgcgttaggcggtggtctccctgttgggcggatcattgagatatacggccctgaatcatcaggcaaaacaacggtagctctggctgcgattgcttcggcccaaaaagaagggcgccagtgtgcttttattgatgctgaacatgcgctggatcctcgctatgcccaactcttgggcgtggatattgataatctcttactggctcagccagatactggcgaacaggctcttgatataacagatgccttagttcgctctggagccgtaggggtcatcgtggtggactccgttgccgcactggttccaaaagcagagctggaaggtggtgttggtgatgcccacatgggtttgcaggcccggatgatgggtcaggctatgcgtaaacttgccggagaaatcagtaaaaccaaaacagtagtgatctttatcaaccagttaagaatgaaaatcgggaccatgtttggtaatcccgaaaccacgactggcggcaacgcattaaaattctatgcgtcggttagactcgatgtcaggtctaaaaatatcactgaaggtgatcaggtcatcggaaaagacaccacagttaaaattgttaagaataaagtcgcgcctccattcaaaagagcaaactaccggttattatttggtcagggtatatcccgcgctgatgaaatactggatcttggtgttcaactgaagattatccataaagttggatcgtggtatgactacggcggagagaaaataggtaatgggcgtgctaatgccgccaaatggattgatagcaacgctgagattgcattggacattgaaaagcgcatcaaagaactggctctggtggatggtgctctcccttcagatgttacccctcctgaagaagtgcccgaagtagtcgaaaacgattaa

SEQ ID NO: 181616 - DNA, 2082 bp, Klebsiella oxytoca
gtgagagatagcgaaatcatcgttgataacttcgctggtggcggcggcgcttcaacgggcattgagttggcgataggccgcagcgtggatattgctataaaccacgatcccaatgctgtcgcgatgcacaccactaatcaccccgacacgctgcattactgcgagtcggtttattcggttcgtccgaaagttgctaccgccggccgccgggtcgggctggcatggtttagtccagattgccgccacttctcaaaggcgaaaggggcaaagccggtagaaaaggcgattcgagggctggcctggattgttctgcgctgggggctggatgttgaaccgcgggtgataatgctggagaacgttgaagagtttaaaacgtgggggccgctgctggcggcagaaatgcgcccggatccagaccgcgtcggcgaaacattcctggcatttgtcggcatgctgacaaccggtatcccggcgaaccatccagcgctggcagaatgctgcgagtttctgaatatttcgcttgatagtgaggaggccacacggctggttaacgggttgggttacaccgtagagtatcgcgagctgcgcgcatgtgattatggcgcgccgaccatccgtaagaggtttttcatggtgatgcgccgggacgggcaaccgatagtctggccggaagccacccacggggatccgaagtctgcctccgtgctggcgggcaagctggcaccttggcgtacagctgcggaatgtatagactggtctatccccgcgccgagcatatttgatcgcaaaaagccgctggcggtaaataccctcaaacgtattgcccgcggcatccagcgctttgttatcgacagcgcgtcgccgttcatcgtgaagtgcaatcacacaacgacacgcgggaaatatgactgtttccgggggcagacactggacgatccgctgcagacgattacgaaaacccacggctacgcgattgcggtacctcatctgacaaaattccgaacaggggccaccgggcagccagttaccgaaccggcaccaacggtgaccgccggcacgtccaggcgcccgggcgggaatggtcatgctctgggtattgttgaggcagagctggcgccgttcctggctggcaatggcggcagcgagtaccaggctaaaccacgcccgctcgataaacccgctcacaccatcctgaaagaatcgcgcgcctgtgtcgtcgctccggttatcgcccggcagttcggcgccagcatcggacaccgggcggatgagcctagcgcaacaatcaccgcgggtggcggcggtaaatcgcagctggttgtgccgacgctcattcaaacgggatacggagaacggcccgggcaggctccgcgagtaccaggacttaataaaccgctgggtaccgtcgtggctggtggcggaaagcatgctgttgtcggggcgtttctggcgaaacactacggcggcaattacaccggatcgggtgtggggctggatgaacctacacattcagtgacgacagttgaccatcatgcgatagttgcggcgcatctcatggtgaacaataccgggcatcctggcggatccgtggaatctcctgcgcatacggttacgactggcaatcaccacgccgttgtagcctcccacctggttaagttgcgcggtacctgccgcgacggacaacggactgatgtgccgatgccgactatcaccgctggcggccagcacgtcggggaagttgagaccactctcgctgttgagcattacgacgagcagcgcgcgcaacaggtgttagcattcctgaaagagtattgcggagccgatagcaccgggctggtggaaatcgaccgagtgacttaccgcatcgttgatatcggcatgcgtatgcttcagccgcatgagctctaccgcgcgcagggcttccccgagtggtacatcattgaccaagattaccgcggcgttaagtatgcgaaggataagcaggtcgcgcgctgtggcaacgccgtgccgccgccgtttgcagaagcgctggtgagggctaatttgcctgagctatgtcagcagaaagaaatggctgcttaa

SEQ ID NO: 181617 - DNA, 258 bp, Klebsiella oxytoca
gtggatatttcactgaaatatgcctgcaaacgcattcaggaattagaaagccttctgctggtggacgtgcctgaaactgtatggccagctgaagtagcgatggtcctgtcagaagtagaaaacgccggggaactcccggcacaccaccagcgccgcctgcagcatcacatcaaccggatgtggctggaaaaaatgccggtaccgtcaattatcgccgcggctcgttcgctggccagcgccatggagaaatacgcgtga

SEQ ID NO: 181618 - DNA, 618 bp, Klebsiella oxytoca
atgagagaaaaatactctccagctcaagagttgtttattaggcaccgtataaaaagtagcactgctcgcgagttaacagaaatgttcaacgctcattttggcacgaataaaagcgttggtgcgatccgtatatggtgcaagtctcacggactgggaaatcagttcttactggagccacgctacactgatgaacagctgacgttcatttatgctaataagcagttaacgaatgtggaacttaccgaaagatttaataagcgattcggtaccaataaaaagcccgataacattaaagatgtgaagatagctcgcggatggactcgccaacacacaggccgtaagcgcgctctgccacagtatattacagtgaataaagagaaaattcgccttgatgtatatgtatacgaatgtgttcatggaaaattaccagatggttattctgtaatccatctggataacgatttaaaaaataacaatatcaataatctgcgcgcggctcctaaagaaatacatcgcctgttctctggagccggttactcgaaaatgccgcaggtactcgctcccgcgctatatgcgcagacgatactccgccatgcaattaaaagattgtcgatgtaa

SEQ ID NO: 181619 - DNA, 231 bp, Klebsiella oxytoca
atgaaaaatagtattcaggatttaatgaatcaccagtttgccatgctggaaacaatcacagatcccaacatcaaaggcgaagtacttcaggaagaattatcaaggtcaaaagcggtggtggagatcgtcggggtgatggtcagcacgtatcgggtcgcgctcgatgctcagaaggcgatgtatgaggggacagccggaagcgtaccaaaagttatggggcttgaaaaatga

SEQ ID NO: 181620 - DNA, 357 bp, Klebsiella oxytoca
atgagtaaatcactaaacgcacgctgcatccgtcgctgggaagttgaattcaaaggccgctgcgattcgaaatatagcccctactggcgcaagcgcgatctgcgtgggtatatacgcgaagcggcgctcaccactgcggaaagcatggttgacagtctggcgtataacaacgcaatgcttgatttcttcgccgagaatggcgacgacggcggttggtcccctgagtttttggcttggtacagcagtaagcgacgcaatatttatctcaaagaggcgcgcgactttctgaacgaagaagccactactgaagaaatcgacgaagagattgaaaacgagctggaggcctggaatgactga

SEQ ID NO: 181621 - DNA, 267 bp, Klebsiella oxytoca
atggctaacaaatcacgtgaacagaagcaggcgtgcattcagaaaattgtcgaccttacaagcgagaaagggcgcctgacggtgaaagaagcgtgcgcagaactacatatgtgccgggataccgcaggtcgatatttccaggctgcagtcagaaccggtaaggtcattcgctacgggcgtcttggattgttccgcgatcagagggcgaccattgattttgaccttcagagatttagtcatcggaaaacctcaggagctgccaaatga

SEQ ID NO: 181622 - DNA, 441 bp, Klebsiella oxytoca
atgaccaaaaaaaccaaagaacgagttacccaggcacagatggtaatcgtcatcgtgcacaaaacaccggaatgtgttctgcaggatatttgcgatgtgctggatttaccctccagctctgcgggaaatcacttacgccgcctccatgctgctggcaagttaagtcgaattcataacggaattcagtatgtttaccgggtgccggcagatgttgaaatccctgatgtgaaactgccagagccagccattaaaaccaacgctgtgaatattcagaaagtcaaagatgctatcgttcaggcccgacaacttgaagaaaagggtctttaccgccgggcggctacggcttacaccgacattctgggaatggccagtaacgccagcgaaatgtggaatatcgcccgccagcgtagccgctgtctccgcaatgctgcgaggtgctga

SEQ ID NO: 181623 - DNA, 411 bp, Klebsiella oxytoca
atggggaatacctggccaccagatctcgctgagtttgtttctctggtatccgagagcggcgcaaatccctttggactcactgctgatgccgtaatgacagagtacaagcgctggcgaaacgaatcttaccgttatgccgacagcactgaatacgaatggccagatgaggtgctgtatcacatctgtattgaaatgcgccgtagcgggatcgaacgccagatgacagagcgggaactgagacgactggctgaaaaattactgacgaaatggacgaagcacgtcagtaacggatttacgatcccgccaatacgcaaacagcttgaggcaccgcggcatcctccgggccccacgccagcacagattttgatggaagagtacaaacgccgcaaagcggcaggtttaaccaagtaa

SEQ ID NO: 181624 - DNA, 984 bp, Klebsiella oxytoca
atggcagcgctgccctacatgcaactttacattgctgattacctggcggacaccatgcatctgtcaaccgaggagcatggcgcatacctgctgctgatgttcaattactggcaaacagggagggccatccctaaaagtcggctttcgagaattgcacggctaaccaacgaccgttgggcttccgttgaagcctcgttaaaggagttttttaacgataacggcactgagtgggtacatgagcgtattgaaagggatctggagatggttcgttcatctcagcgacagaaatctgatgcgggaaaagcctcagcaagagcaagaaaagttaaaaaatcagcagaagggaaacggaatggtaacgaccgttcaacgggcgttgatgagccgtttgaacagaatgataacggcaatccaactaataaagatccagatatagatacagatctaaaagaaaacccctctctacgcgggcgtgaaactccagcgattcaggaaccgcaatacctggctggacttgatattccgatcggtaaattcacgatgcacgacatgtggctaccgtcacaggactggccgcagctggctgctacctggggaatagcgcttcctgaaccggcatacctgccgacagagctggctgagtttaccgcgtactggaaatccgaagggaaggtattcacacaagtccagtgggaacagaaatttgcccgcagcgtgataaacgccagagctaaatccaaatcacaaccagcaaccggaggtaacggcaatgcaggaattcaaccagttaacaccgcatcccgggcagttcaggaaatccaggcagccagagaacgctgggagcagaaacacggacttactggcggcggatacgacatggaggctctggacggtcatgggggagattttttcgaaccgctggacccagaagaacgggtcggcgccatcggatatgtggatagctcagatcggttcgatgactga

SEQ ID NO: 181625 - DNA, 555 bp, Klebsiella oxytoca
atgcaaaccatctcttttaaaaatcataccccgattatgggtatgcaactgaaaacggaaaatcagtatgcaccgcggcgccgggaccgcgttaagtgccggaccatctttgcagcggttcaggagtgggaggcaaccttacccgggcgcgcgcaagacactattgcgcagctggtggccgaacagtgggaaaagcaaaacgggagagggatcagcgtcaataagcagaatctctaccgatatctgaaaaatgaaggggcgtctgagaagtacaccagttatgtgattcgactgtcatccgccattgctgacgccatgcctatagagatagccagaaagcatgacctgaaaagaggattaactgaaaccgagctggtggccagcgctattaaagaatgtaacgaagcgcaccaggccaaattacttggagctccacttcaaaaactggaacgtgaaatccgcgatgcggcaatagcgctttttaatctgctacctgcagatgtggcgggaccactactggcgagtatcagcgccgtagcgccacagtgcttttaa

SEQ ID NO: 181626 - DNA, 201 bp, Klebsiella oxytoca
atgaacataaaagttcgggaattgctcaagcaggttgagcgcatggagttagccgctaaacatgggcttgacatcatccgggagcctgttccaggaattccggccgagaaaactatctcagccgagcagtgtgaatggatgctgaaagattgtcgcctgttccgtagcgctatctaccgcatctttgaattgccgcgatag

SEQ ID NO: 181627 - DNA, 258 bp, Klebsiella oxytoca
atgcgcggcgtaattgttcacgtagagcaccgcattggctggatcgcaattcgcgacgatcgaggcgaaatcacaatcgcggagatacttggtggatatgacgttgaaaaggggcacatcatctccggtaacctccatactcacggtggtgaggtgtttattaaccagacaacatctgaaagtatggatgtcatggttgaatatattggcctcacagatcgccaggctatcgcggcaattcaaagatgcggtagatag

SEQ ID NO: 181628 - DNA, 195 bp, Klebsiella oxytoca
atgagcactatgtacgttctgattatcagcgtctgtgcgctgaccggtgaatgctccgatgttctgaccggcatttatgaatcagagcaacaatgcattgattctgctgctgagcagcaagtcaaagggcagtgtttaccttacaaacaggctttcgcccgggccgacgaccaacagccagcagtacgcttttaa

SEQ ID NO: 181629 - DNA, 297 bp, Klebsiella oxytoca
atgtcagctaacgatctggcattgaaattcagcacggcacctgctgaacaactcatcggcgtcttgcctgttcttgaggtcaagaaagctcttcatgatgaagttgaagatgaggttctgaatgaagtttggatggaacacaaacttgaaatggacgctacagaggaagttgtagatgcattcgctacggcaatgaaactggcgctgacacaatctgcaaaaaacagcaaagcaacgttacgaaaggcgcttaaggaatatccaggctacgggcaggagccaccagcagccccgtaa

SEQ ID NO: 181630 - DNA, 2052 bp, Klebsiella oxytoca
atgaacaactatgcgtatcttattaaagccaaagcaaaggccacagattcaaggaatttattctgctggtttaccgctaaatctgactcacgcgctgaacgcaaaattctggatatcctggaggacgctgaaattgaggttggccgcggtgccgaccaccagctaccgatccgcacaaactggcatatcgttgatgatcttcccgaagaaaacatcctagatgaaacatggtgcgaccgctacgaacttggtggtgaagacgggttgacctggcagaaaattgtcgcacccgtagttgaggaaactattgaagctaccgatgctgaagatgcaacaaatgctgaagaaagtgaacaggaatatgccaatgacgaaaacgctctgtttcctgtatcaacgatgcctttccgcacgcagctactggcgcaatatatggaaagtgaccgtcatgtttaccatatcagcattccgcatcggggccgtcttgaagcaatggaaatggatcaggataacagcgctatccaggatctgattcttgcggcagaaaatgtccccggcattaaaaaatttgatatgccgggtatctggaagtttaccactgcgtttaaaacagtattcccggagggaaaacgatacgaaattgggaagcaaatccagttttctaaattatggtttcagactccccacattgagcgcggcattctcgtaaaggaatgggcagataaaaatcaattaacaactgttgatgacgcatcatcagatgcctgcccggtcgaaaggaaaacgtcagatcgtctcactcctttaaccattctgggtctggaatatgagattgccctgggcctgctggcgcgggccaaagagttcgacatttacaatgttccgttcgagatcgatattcaggcaaacggcataatgaataagctcgataataaagaatggctggcgactcgggagctatttatgtctatccccggaggccgggttttttcgcgggcatgtaatattgctgcggtgaaaactacccctcaggatttatggaaagatcctgtcgcacaccgagaatatctaaacaaagtaatgttcgaaactgaccatgctcatcctgacgaactaatcgttgatattgcgtgcgggagatcatcctcaccaatgccggcagcaccaatgtcagcaccaggagaggacgcagctgattacacttgcaaactgctggctgccgggcgtggggagtatgtggaaggcatcagcgatcccaacgatgaaaagtgggttaaagaagatctcacaaaaccaagagcaaccgcggagaccgccagtcatgtgcagatggaagaagctatcaatgatgaaaccgcgcctgctgatgagatttcagaaagcgaaacggcagatgagacaactgcaggcgacgctgaatctggtaatgaagcaagtaccttaaataatgattccggtcatcatattattgaagaggacccacctgctgattatcgccatgtaatggtcgaccttgaaactatgggtaaaaagtctaatgccccagttgtatccattggcgcagtaatattcgacccggcaacaggctttctcggcgaaacattttacaaagtagtcagcctcgaatctgcggtctcgtggggggctgagattgatccatcaacggttatatggtggatgaaacaatcatcagaggcccgttctgaaattgccaatgataacgctattcagctggatgatgccctgctccagtttagcgagttcgttctcgagaatattcccggcggctataaaacggcacaaatctggggtaatggtgccactttcgacaacaccattttgcgttcttcatacgaacgagcatgccttgactgtccatggggctactggaatgaccgcgacgtcagaacgatggttgaacttggcaaagctattggcttcgatcctaaaacctctatcccattcgagggtgagcgacataacgcgctggcggatgctcagcaccaggcccggtatgtttctgcaatctggcagcgactgattaaaaactga

SEQ ID NO: 181631 - DNA, 249 bp, Klebsiella oxytoca
atgcatgaattaacgctgtcacctcaggaaattgcggaaattacaggttatcaacgctatacccaccagcagcgccagctgcggtgtcatggcataccgttcaccactgatgggcggaaccgccctatcgtattgcgtagaaatatttatccgggaataactgaattacctaaggttgatgattatgttgaacttgagccaaattacgacgcaatcaatgggcagaccaagaaaaaatccaaaagataa

SEQ ID NO: 181632 - DNA, 678 bp, Klebsiella oxytoca
atggataaacgtggcgagcgcagcataaaccaggctaaccaggagttaggtggaatgtctcgtatatttggctggggctttgagcgtggctatgtgaagggaaacccatgcaagggagtaagaaagtttacgttgaaacctcgtgaggtctatgtcaccgacgaagagtatcaggctatctatgatgcagctgcaccggcgctgaaagtagggatggaaatagcatatctatgcgccgctcgcctttctgatgttttgtcactgaagtgggagcaaatgtgggaagacggcattttcatccagcaaggcaaaaccgggaaaaaacaaattaaagcctggaccgaaagattgctacatgcgcgttcactcgcaaaatctctggagggctcggtttacgttgtatgtagcagtaaaggagaaaaatattcgaagagtggttttagtgatttgtgggaaaaagctcgcgcagcagcatccgagaccttaggcaggaagataaaagggacgtttcatgatctgaaagctaaagggatttcagattacgaaggatccagccgggataaacagcttttctccggtcataaaaccgaaagtcaggtactggtttatgatcgtaaattgaccatttcgccaacattagatcttccgattctggaagattcagaggatgatgattga

SEQ ID NO: 181633 - DNA, 1239 bp, Klebsiella oxytoca
atggaaattaataatgtttcagaaatgcttaggtgtttcatgatagcagaacgtgatatattgaataattccgatattatccatgctccgactataggggaaatgtatgaaggattgacaaaggatatattaaaaaaagcaataccttcagaattaaatctatctgttgtgaatggttttattcatgatggacatggtgggcaatcgcgacaaattgattgcatggttgtacatggtgaaggtgaagtaattaggcacaccaataaaaaaagataccatgtaaaagatgttgtggcaatatttgaagtaaaaaaagagcttttgtctgaacagttgaaggattctatagatctattaacgacgattgatgatatatatttttcttatagaagtaaaacattagatgcacctgcattttctactttttatgctgctaaatcatttgagagaataacgggaaagattgctcctaggtatgatgaaaaggatagtttatctatcttggatagtgcaatttatcactctttagttattgatcagctaactcctgtcagaattgcaattggatataatggttataaaagtgaatataatttcagacagtcattttataactattatagtagtatgggaaaattccgaacattcaaaatacctagtttattgattagtgatggtttttcaatagtgaaacaaaatggttatccatattatttattcttaaagaatagagggtggtgtattgcttcttcatgtaaaaataaccccttgattttaattcttgaagttattttttataaaataaaacaaatgtttgatgttcaaatagaacttgaagaggttgtggaaaatgaaaatatgactccattagtgttattagataaaaaatcagagaaatggaattttaccttctgtgaatataaccctaatgatcttaaagatagggatgattttttaatatgggcacctttgtatttaaaagaagatgagttgtccattataaaagaaatttgggatgcaggcggtttgtcagaaatagatatattagcgttcacagaggaattcccaactttttcagacattcttgtaaagctcttggaagaaaggtttctgatctactctggtgatttggttgctgttaactctgatattttcactcaacaagcagatgaaggatactacttatttccatcaaaagagaaacatgaagcatggaagaaaaaatattatagcacttaa

SEQ ID NO: 181634 - DNA, 1725 bp, Klebsiella oxytoca
ttggaaaattcaaatttcttcgcatcttctaaggaaatagtaagtagatttcttaataacgttatcgctgttgacgatcaattatcctttggaaaagcaattaccacaatagatagttctgttaatgatgattttgcagagtttgatgcagctagtaatgacgttagtgggttaggtgtcgtaccacaaaccccactcataccagccccaatggataacccactgaattaccaagatttatctattgcattctcagataaaggaataaattgctgcgcttttaaacctgatccatcgagagatgtaaatatccccaacgcatcaaaccgaataatgacaggttccaaacatacagacattactattttagactggcaaatggattcgcagtttaaaaacaatcaagatagtcaggagcgcgatggtacactggctatagcaagcattgcaaaaatattacaacatgataaagagcaacaaggtcggttacgacttatcgtaatttatacaggttcaccagaacttacagggattacaaaagtagtttcagatcatttgaattcaaaaggttattctaatacctttgaaagtacaaaaatcacatttaatgatgacgtttttaaattttgtcatatcgaagtcatagaaaaaatggttgacgctgctcaattagttgacagagttataacattgtttacaaaattaactattggattactgtccaatgctactctttccgctataggagaattaagagaaaaaacacatcatatattacacacattcaataaacagcttgatcctgcttacttatcccatgttgttggccttttctcttcacctcaagtgagagaaaaagctcatgaagttgcttttgactacgctacagacattatttcagaagaaataaaatccaaccttcaaattagtcaatcaataacaaataatttaaacttaactagaattcatgattgggtagattatattaatagtgagagccgtgatgatttattccaagttaaaatcaatgatggtaataacatttccatcacatccgacagaatcaaaagacttttatccacagaatcggaagatactctattaaataccttatcagaagcacctgtcattatgaaacgtaatggtgagacaattgaaaaatttaagaaggccaaaatacagattagcctaaatggtgttgagtatctccctcatgaaaacttaagcgcaattgagtgcaaacgtagagatttaaaatcactaaccgactcatccccacttccgactataaaacaaggctctatcgttaaaaaaagtgacactgaattttatatgtgtatgcaaccactttgtgatagtgttcgtatacagagccctactaatttcatttttataaaaatagataggatgactgcggctaaccctaaatttactcatgtgttacgaagtgcagatgatacttttatgaagtttaaaattaaacccggctctaaggacatccacatattcaaactcattccagatataaccaccagctcaataaaagtaattacaagggataacagacttgttgtttgttacattaaagatgatgagcaacaagctgaattatcatggattggtgaatttaaaaatagtgtagcccaatctatcgctaatagtctcgcctctaatatatctagagttgggttagatacaaatgaatggctgagattgagttgttaa

SEQ ID NO: 181635 - DNA, 2958 bp, Klebsiella oxytoca
atgctgggtagacaacagattgcagggattccaactgcattaagcgagttgttcaaaaatgcccatgatgcatatgctgacaacgtagaagtagattatataagaaaaaaaaatctacttatactgcgagataacggcttgggaatgagccgagatgattttgaagaaagatggctaacaattggcactgatagtaaattcattgatgaagacagtattggtgcaccgactactgacgacaaaaagaagaaacgccctattatgggtgaaaaaggaattggacgtttagcaattgcggcaattggacctcaggtattagtaattacacgctcccgcaaaaatgatatattaggaaatatcgttgtatcttttgtaaattggacgttattttccttaccaaagcttaatttagaagatattgacatacctattattgagttaaatcatgatgagtctttgaataaaaagcatatcgataacttaatttcacaagcattgaaaaatgttaataacttaacaggcaagatttctcaaaataaaattgagcagcttattaaacaaatagaatactttgattatgatcctgagttctggtccatcgctcttgataatttagataaacaacttaatctaattccttcacgccctcacttaaatttagaaaatgaaagtgggacacattttattatagcgcctgttgatgatatattatctgacgaagttgaaggatttgataccaagaaacgtactgatcaagcctctcgtttagagaaagcgttacttggttttacaaatacgatgtacgagcattcgcaagtacctattattgcccgttttcgtgatcatacacttcatggcgaatgtattgataggataagtgagtcagttttctttacaccagaagagttttcgattgcagatcaccattttaatggcaattttaatgaattcggccaatttgaaggaaccataaaaatttatggagaagagaaatctattgtagtaccgtgggcagaaaataataacaaagaggttttatgtggtccatttaatctcaatcttgcttatattcatggtacacaaagagatagtaagttatcgcctgaaatctggcaagatttaagagataagacagataagtttggtgggctttacatttatcgagatggaatccgaattctaccatatggtgattctgattttgatttccttcgtatagaacaacgcagatctaagagcttaaaagagtattttttttcttatcgcagaatgtttggcgctatcgaactgactaaagaatttaactgtgaacttaaagaaaaagcaggtcgagaaggttttattgaaaataaagcctacaaacaactaaaagcaatccttgaaaatttctttatctcaattgcatcagactttttcaatgataaaagtgaacttgcagctacctttatcgaaacaagagcacgccaacagcgtgaatacgaactattaaagaaaagagaaaaacttaagaccactaaaagaaaaaactttgaagcagcacttaacaaattcttcaccaagcttgatgaaggaaaattagactcttcaattctccagtcaaataataaactggacactctctttaataatttcaatcaaaatacggattcaatagatgatcttgccttctctgttgagtcagtagtaaataatgattttggtaagttgattaatgatatagaaataaataaacctactggcattggccttaataaaaacttagctgaccaatgggatttatatcaagtcagaaaaaatgaacttatcaataagattagtaatgttaagaacaacgcaaataaaatattagttagtttcgaagagaaatatggtgataggactgggctaagaagaagattcaatgactcgttagtaaatcaagatgagtatcaaagaaaactattgaatgaagcttttaataaggccacgtctattcttgaagatttgcaacaacaagtaaaaaaaatgattacccataacagggaagttgcaaaaaaaaatacagatgaagtattcaatgcgttcaactccacaagtttccagggtgttacagtcgaacaactttatcgtattaaaaatgaactagaaacaaagattgataattcctcttcaatggtaattgaaaatattaatctgattaccgaaagattattgacagcaaaagaagattcagagcaaaatataacatcatcatcagaacttgtttctgttctggagtcagaatatgagcatataaaagaacaaaatgataggaatcttcatttagcgcaaataggaatggctgtaggaattattaaccacgaattcaatcataatgttctttctattcgtcgcggcctcaatgaaatgcaagttttcgctaaccgcagtgaaaatttcagagcaatatatgatcgtgtacgttctggcttcgatcatcttgatgcatatcttaaaacatttacaccattgactaggtcgcagtcaagaagacggacgactataacagggaaagctcttagtgaatttatagagtcggtatttgatgaccgatttaagaaagaagaggttcgcataagttacacatctagttttattaaccaaagtattcaagcttatacatcaacaatatattccgtattcattaatttaatagataatgcgatctattgggtatcgaaaggctcggcggataaaagtataactcttgatgcttccaaaaatggtttcaaaataatggatagtggcccaggtattcctactatcgaccatgagaacgtttttgaattcggttttgggcgccgtattggtggacaaggaatggggttatatatcgctcgacaaacattacagcgtgatggttttgatattactcttgaatcttatcaacctaacactggtgccgtttttattatagaaccgatacaagataaagaataa

SEQ ID NO: 181636 - DNA, 1059 bp, Klebsiella oxytoca
atgagggttatagattttttttgtggatgtggtggagctagtaaaggctttgaactggcagggtttgaggttgctctcggcattgattttgatgaaaatgcagctagtagctataaagcgaacttccccaacacaaagttcattcgggatgacattaggaacgtcaaagtaaaagacgttgctaagctagtaccagatctgaagagttctgagctggtcttttgtgcctgtgccccatgtcaaccattttcttctcaaaacaaaattcgtaactcaagtgataaacgaagaacgttattgggtgagaccaaaagatttataagagcatttcgaccagcttttatttttattgaaaatgtaccaggtattcaaagcatcaaaatagaagaaaatggaccattctctgattttttgaattttattagtagattcggttaccagtatgattacaaggttgtttccagtgaattttatggagtacctcagcaaagaaaacgacttgttgtgttagcaagactaaatgacaaaccaatattcccttcttactcacatggagttgataatattcctttcgctacagtaagagactatattggaagtctgcctaaattacaagcaggtgagtcagatagtaatgacctactacatgcggctgctgttatccaacccatcaacattaagagactacagcatacaccagaaggtggtgacagaagagattggcctgatgaactatggttgaattgccacagaaaatatgatggccacacggacgtctatggtcggatgagctgggataagccatgtaaaactttgactacaaaatgtacgagcatttccaacggtcgttttgggcatccggatacaactcaaaaccgcgcaatcactttcagagaagcggcttgtcttcaaacattcccaaaagattttcattttcttggtagtaatgtatctaaatcaaaacaaattgggaatgcagtacctgtattgttggcacagcgagttgctgaatcaatattagagcaggcaaaatctaatagggaggatgggggttgttaa

SEQ ID NO: 181637 - DNA, 144 bp, Klebsiella oxytoca
atgcggttgatggcagacctgtttcctccattgtgccgctttcttttggggtatagcgtcgtggactggcattcatctgccctgtgtttcaacctgccgtatgaagcaaaaacccccgccattgctgacgagggttttctttga

SEQ ID NO: 181638 - DNA, 1002 bp, Klebsiella oxytoca
atgaaaacaaaactgatcgtgctggcgatggcgctgggtatggcatcggcccaggcggcggaccgtatcgcctttattcctaagctggttggcgtcggcttctttaccagcggcggtaacggcgcgaaagaggcgggcaaagcgctcggcgtggacgtcacctacgacggcccgaccgaaccgagcgtctccgggcaggtgcagctgatcaacaacttcgtcaaccagggctacaacgcgattatcgtttccgccgtatcgccggacgggctgtgcccggcgctgaagcgggcgatgcagcgcggggtgaaggtcctgacctgggactccgataccaaaccagagtgccgcagcatctatatcaaccaggggacgccgcagcagctcggcggcctgctggtggagatggcggaaaagcaggtgacgaagcctggcgccaaagtggcgtttttctactccagcccgacggtgaccgaccagaaccagtgggtaaaagaggcgaagtccaaaatcgaaaaagcgcatccgcagtgggaagtggtgaccacgcagtttggctataacgacgccactaaatcgctgcaaaccgccgaggggatcttaaaagcgtacccggatctcgacgccattatcgccccggacgccaacgcgcttccggcggctgcccaggcggcagagaatctcaagcgccagggcgtggcgattgtcggctttagtaccccgaacgtgatgcgcccctacgtggagcgcggcacggtaaaagccttcggcctgtgggacgtggtgcagcagggcaagatcgcggttaacgtcgccgatcgtctgctgaaaaagggcgatcttaacgtcggcgacagcgttgatgtgaaagatctcggcgccctgaaagtcgagcccaacagcgtgcagggctatcagtatgaagcgaaaggcaacggcatcgtgctgctgccggagcgggtggtgttcaccaaagagaatatcaataactacgatttctga

SEQ ID NO: 181639 - DNA, 1467 bp, Klebsiella oxytoca
atgggcattggctattttttagtgcgtggtaatagaacaacctgtggtggtagtattatagaaggatgtgataatcattctatacacggtcaggccacagcacgtaatggtgataaatatatatgtggagttgataaaaaaatatatcatattgcgggaggcatacctaattattttatacatggcgttgcagcagctggaactgcacatagcagagggacatgtgcttgcaaatgctattttataaattcttttactgattgtatttatggatatgaatctgaaactattaaaagtactgcgagtgctacccggcccacttcacccatacactcacaatcattatcagaatcatcaccagcaccaaaacccgttacacccgttgtagaacttgctgaagcgcctacaaaaccgcaggaaaagcgtgaccccgtagatgcaggcttttgcgtactgccctatggcgcgactcccgcatcatatgaaccgtatcttttcactacgcctccagcgggaacacgagaactctattatcaactgaatccagaaatgaagaaaaagcctggttcgatattaatcgtggtggatcctgaaaagcaggaaccagaacaggttgagacgctacagcgagcaagagacagaattgatgcagcattggcccctctgacagttcaggaagcaaagttattgcatgataacagaggggcggtagatgcattttcatatcagctttttgccgataatttaggtaaagctggtgatggattaggctatatcagtgaaataggaaaaagttattatgatgaaatcaatagaattttggttgagattgaagatttatataaaaacacttacaatcgcaacagaggtattatttcaggtcaagagttttttggtcaaaggacaaggttattcaaacaacttgatttggttttaactaaattctcaaaagcacagttaaacttaggcgaatatcagagcattaaaagagtgttaggcttgtcaacaagatctattatgcaccgctgggatagaacaggtgttgataatatagaaggatatgcaacatatattgaacagtcagctaaacttatgaagattatgaaaacagtagggtatgtgggcataggtttagattttgcaagttatacttcaaatgtttatgatgcatgttcgaaggggcgagaaagtgaatgccgtaaggcagctattactgaatatagtaaatttgggtttaagcaaattggaagtgctgctgttggtagtgcaagtggatgggctgcccgtggagcctgtatgtggatactgggaatagtaacttctgaagttggcgcattaggcgctggcttatgtttagttacaggagtgggagcttcgctaggagcagcaaagctagttgaaggaggagcagaagatttaggtgaatcttttggaggggatattctttatgagaaactttttaaatag

SEQ ID NO: 181640 - DNA, 531 bp, Klebsiella oxytoca
atggtatttttatccagaatagaagctacaatatacagtatacatctggagaaaaaattcagtgaaaaatgggcagtttattccctgaatgaatttaacattaaagaaatgatgattcataatcagcgtgttaaaaaaagtgaagattataatgtattgctgagtgcaggtttttgggctaataaagataatcaattaatgtattcaggacatcatcttgtacaggttacgattccgattacttataactccaatgctgtagcaaatgaaaatggtcatgccatattaagaataccatcaaacgtcatagaacactttgaaaaatactggaaatcaagatttgcagattttaaagattatactgaattccttgcaggttcgaataatgaaatcattcaggaacaagccttacttgcatacaataatttaagcttaattgaatctaacagtatagaagactgccaatatattaccacatggaaaaacaactggatttttaataatccagaaaatttaactttgattaaatga

SEQ ID NO: 181641 - DNA, 651 bp, Klebsiella oxytoca
atgaaagatatccttagaaaatcacctatcgaaaggctttgtgtgtctgtctcaataaccccgcaagagatggcgctggctcttgctgggttgaaccctttaactcgaataagtgacgttcccgaagagcattttgattacgttgatcacaccagaagggcaatagctagagcactaaaggtacacagggataaaaaaatatctactgacgaggcctgtaacgctctggatattctcttagctgctttcccatttattgaagaaagtacgcccgagataattacgcaaaaagttacagaggctatcgacgatttgcgtggaacaaaaggctgggaggaaaaagcccgcaatttgggtggcttgcatcttgtgaactacatcaaagacacgaatcgcagcgggcgaggccagcaccgcaaacaggatgaggaagacggaacaatgaagatgatgggcgtgatcatccagttgctggtaaaaaaatctggagcatcctcctatattaactcaggcaagcctaatgtgacggccatctataaggatgtgcttgatttattagagtgtgaaggtatttcaaaaaaagggataagcagagctgcttttgcggcaaaagcaaagcaggctttgttagcaatccataaccttgattaa

SEQ ID NO: 181642 - DNA, 219 bp, Klebsiella oxytoca
atgatgccaagtcaaacgacacattcagccattcctaccactgggtatatccgccgctttcgcatgccggcgttgttaggggtatcaatgccaaccattgatcgatgggttaaaaacggcacattgccacgcccggtgaaactcaccaataacgtgaccgcttttgatgcggtagagattaacaactggctggcagaacgccgcgggggggtggtctga

SEQ ID NO: 181643 - DNA, 432 bp, Klebsiella oxytoca
atggaaaaagaaaaccgcccattacaggcggctaacatagatactcgcgaatctgatgttacgccactagcctacaccgttcaagcctcaaagcgcattccgaagaaacaccgtgctcgcacctacatgctgcgttgtggggctggtgggtggacagaaaacgatatcctgcgcaattgccgcctttcatctggccgcaactatgcgagcgaacttgagcgcgagcttgatatttgcctggaacgcctggaagagaaaaaccctgatggtatcggtgcgcacatgcgttaccggtttgcgtgccgcggtgacgtgctgaaggtgattcagttcgttaaccgcatggccgcagtcaaccaacattgcgggctttcaaagcaggatatcgccgacattctgaacctctacccggacaacttcaccgccgcataa

SEQ ID NO: 181644 - DNA, 810 bp, Klebsiella oxytoca
atgaaaatcgaaaaaagcagattcaattctgaggccgcccctcaacccaaggttaacccgggcgtaattaacggcaatgactttgccgccatcgttcccgttattcccggccaaattggcgggcgcgaaaccaatattgcgagcgccagagctctgcataaggcgctgggggtgggccgcgactttaccaactggattaaaggccgcatcgaccagtacggatttgcggccgggactgactacatccgtgttgaaaatttgagctcaccaaaacgggcgagcgcaaaatttcgccagcaaatcgagcatgattaccttctctcgctggatatggctaaagaagtggcaatggttgagcgcaatgaacaggggcgcgccgtccgccgctatttcatccagtgcgaggaagcgctacagctgagtgcgccggaaatcgccgcgaagtatcgccggcacctcaaagcccgcattggtgctgccaacctcttcaagccgatgtgcgccgctctggatgctgcccgggcagaacaggggaaagagacgcaatcccgccactacagcaatgaaagcaacatgatcgcccgtattgtgctgggtggcatgaccgctaagcagtgggcgcaagtaaacggtatcgacggcgaaccgcgcgatagcatgagtgccggccaactggagcacctcagctacctagagagcaccaacatcacgctgatcgatatggggatggagtacggccagcgtaaagcagagctaatccgcctgtctcagcggtggctggcaaagcgtctgggggcggctcatgactaa

SEQ ID NO: 181645 - DNA, 573 bp, Klebsiella oxytoca
atgcctgtccctcggcctgtagccagccagaaagagatattccaagccgaagagagcgatatttcagttattaaatttgaggggtataccgtgcgcattgtgaatgtttacggtgagccgtggtttgttgtctcagacgtctgccaggcgctggagatcagcaatccaaccagtgccgtttcctctctggattgtgacgaggtaatgaccctaactttaactgagggtcattcgggtaagcgcggcggggcgcgtagctggaatatggccgcagaatcgggcttctataaactgattgcccgtagccgtaaagcatccacgcccggtacgttcgcccaccgcttcagcaattgggtattccgcgacgttatcccgtccatccgcaaaaccggctcctacggagtgccgttcgcattcctgaatgatcatacccggcgcaaagagctgtacacgaagaaggccagtaagcgcggtaaagacctgcagtcgtgcaaaggcgagaaggcccgccttgctgctgaagaaatcgagctttggcgcaagtatcagccggatctgctggaggttcattaa

SEQ ID NO: 181646 - DNA, 180 bp, Klebsiella oxytoca
atggttaagcccaccagcacaccgttaccaaatcactcctaccgcgacgctcacggccagatggtgagcgtaaccgctgtagcgcataaccgcgtgacgttctatcgcgagggctatcagttcccatgcgtacagcccattgagcgcttcatgaaggagtacacggaggtgaagcaatga

SEQ ID NO: 181647 - DNA, 429 bp, Klebsiella oxytoca
atgattaccggtgcacggcgcaaaagcctctctctggctggcctgatgtatgcaaaagttaacgctctgcaggcggtgcgccaccgtggaaacctgtcaaaacctgtcactttgcgggccactgacagtggcgcacaagatgcccggcggaattttgggggaagtacgtgcgccggcgagagctcggtatctaactatctgccagatagccagtcctgcgctggtggatgtgtagcccatcacaccgccagctataaattgccgcaacgtaacaaaaagggcttgcggcctgacggtatcccggtctatggttatagcgcaccagcaaaatctggtgccgggattggcgtcctggtaattcgaatggcgacacatgacgcgcctagcgtctttttttgtgccgttagtctgactcacccttttttttga

SEQ ID NO: 181648 - DNA, 192 bp, Klebsiella oxytoca
atggctactaccctcacccaaattccgcaatttatctggattatcgccgctgttcgccgcgatatgccgacaattaccgcaaaaattcaccatgtcgccgcacctactgagcgcgaagcccgccgttctctggttcgggatcacgtctgctttttcgctggccgtatccgtctggaggtggctcatgcttaa

SEQ ID NO: 181649 - DNA, 210 bp, Klebsiella oxytoca
atgcttaaaacctacgatgtgcctgttaatccaactgaacgcacccaccacctgatttctctggcggagctgatgcgtgatgtattggacagtaaagctgattctcgcgaggactatctggaggcattgattgccatgctggagatgtctttgcgcgatctgcatggtctgctggaaggtaatgaactgccggaggtgcgccatgcgtaa

SEQ ID NO: 181650 - DNA, 180 bp, Klebsiella oxytoca
atgcgtaactatttccgcatcaccggctacgccgttaataagcgcggtttaacggtagggatcggctatcaactcacatccagcgacactaaaacagcaactgcccacgcagtgcttcaggcgcagcgtgaaggtctcagccatgtacgcattacacgcgttcaggaggtggcagcatga

SEQ ID NO: 181651 - DNA, 282 bp, Klebsiella oxytoca
atgagctccgcgattaccaccgtccccaacgaaatcactaccccccccgaagttatccaatcaggagatgcggcggcggtagtcatttacgccagtgagcttctggaactgtggaatttgcaccttgataagccactgcgtgccgccaacccgctttttgccgcgcggcttgggacgctaatagttgaaatgcgatgcgcagccattagaaccgagcgcaaagttaatcgcctggctgatgaactaacgaagatgcgtgagtaccgggagggcggcgcatga

SEQ ID NO: 181652 - DNA, 213 bp, Klebsiella oxytoca
atgagcaagttatccctgattgattcagcctgccgtatcaagcaagcgcagcaagttctttctctttggcttgaagcaccgattaaaaaagatagcggcacggatcatcttattggcgcagtcattacccttctggatggtatccccgagttgatggattcagtagaaggcgagttagttgatatggatctaagtttgggcggtaaagcatga

SEQ ID NO: 181653 - DNA, 636 bp, Klebsiella oxytoca
atgagcaacgcacagaaattcagaccgggaagtgccgacttattacacgtcgaggccacgccagacggtatcaacattctgacgctgaacgatgacggcctttggcagcattcgcggatgctgggctactccgctgcgattcgccagcttgatagcggcggctatgaccgtgatttgaccgcagggatgcaggttatttccgggatctgggaagccgagaggaaaggctacctcacagaaagtagcgagcaaatggcgattgtctggcgctggctggtggcctgtctgttcattctggagcagcaggaacgcaacggcacggtagatatagccaacgacgagggcggctatgatcgtgccgtgaagtacgtcggtagacatggcggaataagcatttacccggctacggaacgcttttcactggcgaaccacgtcgaggcgctggcaattgagaaatatggcgcagatacaggattactgatggctgttcatatgtaccagagcatgacggagacagtgccggggaaagggatgaaattgtctgctgtggggcgtgaattgctggaaggatcgcacgacagctttatccagatgctgaataccgaaggtatgccagcagcgccaacagcgcactga

SEQ ID NO: 181654 - DNA, 2760 bp, Klebsiella oxytoca
atgcgtaatatcgaccttatccgcgaagtgaccaccaccgccgcgaacaactggcctcatgtgctggctggcctgtctatcgacgtgcctgattcatcacgccgtcatgccccctgccctgcatgtggtggaaaagaccgtttcaggttcgacgataacgggcgcggtagctttatctgcaaccagtgcggcgctggcgacggcttagacctgattaagctggtgaaccactgcgacaccaccgaagcggcacagcttgccgctgacgtgctgggtattgattaccgggctgcggaaacagaccagaaagcagccagccagagaagggagcagatggaagctgaccgccagcagcgggagcatgagcgccagaaacaggcagcggaggacgcagagcagcgccgggctacgtttgcccgtctgtatggtgaaatgcgccagagcgccacagagggtgaatctgattacctgaaatcaaaagggctgaccgggtttaattaccccattctgcccgatggctcgctattgctggcgctggtggacggatccggcgcagtcaacgccgcgcagaccatcaccccacagggagaaaaacggcttctgaccggttcggcaaagcgcggggcatatcacgccgtaaacgcaccagaaacgccgcagagcgttttaattgccgaggggctggcgacggccctttcagttcacctgatgcgcccggacgcgctggcagtggcagcaattgacgcgggcaacctgctacccgttgccgaagtgatgcgccgtaaacacccgaaggcgcaaattattatcgccgcagacaacgaccaccaccaaaacggagaagccaatacaggcaggaaggcagcagagaaagccgccttatccgtggctggatgggtgacactgccgccgactgactataaagccgactggaacgacttccaccagcaaaacgggctggaggccgccgcagtggcatttaacgattcgacgtaccagccacaggggggaggtgtgaccgtacaactgaaggcgattgagggcggcaagattacggcaacggatagcgacccgctaaaaccgcgtatcgaaagccgcaaagatggcgttttctgggtatcgccaaaagtggacaaagacagcggcgagattatcaacaatgaaagctggctggcctcaccgatggacgttatcggaaccgggcgcgacgacaaagaccagtatttgataatcagatgggcggcttttggcgcagataccgcaacgaccgcagctatcccgctggctgatattggtgagcgcgagggctggcgcaccatgaaagcgggcgggattaacgtcacgaccaaaagcagcctacgggcgatcctggctgactggctacagcgcagcggctcgcgtgaactatggcgcgttgctcatgctacgggctggcaatgcggggcgtacatcatgccggacggggaaatcatcggcacacctgagcggcctgttttgttcagcgggcgcagttcagccgctgccgggtataccgtagcaggaacgtcggaaagctggcgtaacagtgttgcacggctggcatacggcaactacgcgatgatgacaggcatcgccgcagcactggcagcgccattaatcggggtggcagagcgtgacggattcgggattcatttttatgaacaatcgagcgccgggaaaacaaccgcgcagaacgtggcgggcagtctatacggaaaccctgatgccttgcgcctgacgtggtacgggacggcgctggggctgataaacgaggccgccgcccacaatgacggactgatgccgctggatgaagtcggacagggcgcagacccgataagcgtttctcagtctgcctatgccctgtttaacggcgtggggaaattgcagggcgcaaaggaaggaggcaaccgggatctgaaacgctggcgcaccgtggcaatcagcaccggggaaatggatttagaaacgttcatcgccaccgcaggacgcaagacaaaagcggggcaactggtgcgactgctgaatatcccgctgagtaaggcggtgcgctttcatgagtaccagacagggagagaccacgccgacgcgctgaaagacgcttaccagcaccatcatggcgctgcagggcgggagtggattagatggctttcagaccaccagcagcaggcgattgatgccgttcgtgagtgcgaggcccgctggcgcagtcttattcctgccgactatggcgaacaggttcaccgcgtaggggcaaggttcgccattctggaggccgctttactgctgggtggcgtggttactggctgggatgctcaaacgtgccgggatgcgatacagcacacctataacgcatggctgaaagagttcggcacggggaacaaagagcaccagcagatcatcgagcagacggaggcgtttttaaatgcctatgggctgagtcgattcgcgccgctgggttatgacccgcgcgatttacccatccgtgatttagccgggtacaggaagaaggggaaccacgacggcgacccgataattttctacaccttcccggcagcgtttgagcaggagattgcaaagggcttcaataccaaacagtttgccgaagttctaaagaatgcaggaatgcttacacccccaacgagcgggcgaggctatcaggggcgagtaagggagggtgggcgacagattcgcgtctatgtactcaatttcatggcggaggaaaacagccagccagaagaataa

SEQ ID NO: 181655 - DNA, 456 bp, Klebsiella oxytoca
atgacagcacagatatcagcatacgggcggctggtggcagatccccagaccagaacgacgaacagcggaacgagcatggcaatggcgcgtctggcggtggcgctgccgtgcaatgcggcagataacggagaagctactttctggctgggcgttatcgcctttggtaaacaggccgacgcgctggcagggcacgttaaaggcgatttagtcagtgttgccggagcgatgcaggtcaatcagtggacgggcaaggatggcggtacacagcagggctatcagatagtggctgacagcgtgatcagtgcaaagacggtaaggccgggcgggaagcgtagcactgcgggaatgaataccagccagccggcgagccgaccgcagcagatcgcgccgggctgggaggtgtacgacactcctgatgactttgatcaacgccagccgtttgatgatgggttttaa

SEQ ID NO: 181656 - DNA, 306 bp, Klebsiella oxytoca
atgatacgcgacaaaaaggccgaagaactggaggctaaagggttgttccgcagggcggcggcgcggtggcttgacgttatggcggcgtgtaccgaggatgccgacagggagcaggcgaagcggaaccgtgaaagatgccttgaaggcgtaaagcgcccacgctttaagctggaggaatttgcagaccttcacagagcggcaaaagccaccactaaccgcatggggatagcgcagaacaacggggaggctttcagattgccagccagcagaaaacgagcacgtaaggcgcgcaatgatggcgcataa

SEQ ID NO: 181657 - DNA, 378 bp, Klebsiella oxytoca
atgaaaattattatggtattaatttcatcacttttatttctcacggcatgtaagcctacagaagagaaagccatagagttggctaaaagcgagatatcgcacgacatgaaagatccatcatctacccagtttagagatgttgtgtcaaaaaaagttggtgaaaaggacgatggctctatcgcaatgcttgtctgtggtgaggtgaactcaaagaacagctttggggcatattcagggtactcgccttttgtcatcgcgctaacgatgaaatcaaagggttttttctcctccggcgtggtgtatgcagtcgaagggaaaacagttgatgaccgtccaacacgcaagaatagtgcaaatacgatcaacccctgcaagtaa

SEQ ID NO: 181658 - DNA, 327 bp, Klebsiella oxytoca
atggaacaactacagaggctggctgaagtaattgccgagacctatattcgcgatctgcgccgggaaactggctccaacgttcttagcattgatggtgtaagtggcaacgttgaaaaacacctgctcgccgcggggcttgtcgataacacaatatatgccgctaaagatgaatatggcgcgacatttgaacgagaagcctatcgcatgttaatgaattttatatcatttgatggtccggaatatcgccttaccgaacatggtcgattagtcataactcttctgaacaccaacgctctgaaaaaaaacaaagtaagaaccctacactga

SEQ ID NO: 181659 - DNA, 2787 bp, Klebsiella oxytoca
atgacaactgattttggcaaatacaccattgagattgaagccgatgcggccaaactgctggcgggtcaggcgagcgcagattcagctttaaagcaaattgaaaactcagtcaaaaaaacagctaactctgctgacaagctagataaaagcctggataacttgggcggaggtttttcgcgccttgctgtggccgtgaaaggatacatatcaattcaggcgttgatgaagctccaacagctgtctgaggaattcacgctacttcaggcgcgagtaacgcgtttatcttcaagttcagaggaaggtgcgcggagctttcagcagcttgtgggtattgcttcggcaaccggtgccagccttggggataccgtcaacctctggcagcaactgaccgctacactaaaaactgtaggcgccactaacagtgatgttaaccggctagtgatgaccctgcagaagatcggcgctatcggtggctcatcggctcaggaaatggctaacgctctcaggcaatttatgcagtcggttgcgtccggcagaattcaggcggaagagtttaactcagtgctggaacagatgccggaactggcgaggcagatcgccgatggtatggggattccgtttaacgagctccgtcagttgatgctggcaggcaagttagatattggtgaggtgctagcggcaatcgaaaagaggtctgacgaaatcaatcagcagtttgaaactatgccgcgtactgtatcgcaggcaacaaatgctttgatcactcagttcggggtagctatctccaaaattgatgatgctattggggcgtcgcgctatttggcaaaacttctcgaccaaactgctctttcaatctccgtagccaccggaaatgtagatcctattgttgcgatagatgcgcagttggattcgctgaataaaaaattagctgtaactgaagcggcttacaataccgtttccaaagcttctatctacactgacgcaggcactaaaacacaaatagatgctatcaaaggtcaaatagcggccctagaacgagcaaaatccctttattccgatgttggcaaggcggcatcgggttctgtagacggatctaagccagcctatatcaccaatctcgaaaagaaaactgcagagaacaacgccaattcgatcattaaatctggtcaaacagtagttgataagctcacccagcagcgtgaacagctaagcaaagacaaggccaaagggctaatcgatgataagaaatatgctgaagctgctgctgttctggataagcaaattgccgacgccagaaaaaaacaggataaaacgccgaagaatgcctttgcccgcggcgatgactcaatagacaacttgcagcggcagattgccgttttgacaatgcgctatgacgagaacaccagagaggctgcgcagtttaatgccgtggccgctctcggagctaaggccaccgacacgcaaaaagagcgggtgcgcgaactggctggacagttatttgacgcccagcagcgccagaaagaccttaacgacgcgatcagcaatgaccctgtgcgtaaggaaaataaaacctattcagacggtcgagaccagctaaagcgccagctagacggccagatgattgaccagaaaacctataaccagcaatcagagttgatggagcagcagcatcaagtcaatctggcaaaaatacgcgctcaggagcaaacagcaaacccgatagcagccgcccgcgctgaaattgacccggtacagcaactggtcaatgaaaacaaccagaagctggccctcatgcagcagtaccagcagcaggaacaggcaatactccagcagagctatcagcagggaaaaatcagttacgatcagttcatcgctgccaaatcagctacggatgctcagtatctggcgctgagaacggcgcaggagaatcagttcaacgagcagatgacggcggcgcagtggcagttgttgagccagcagggacttggctggcagactttgaccagcgccgtggatgctttctccggcagcgcgtccaacgccattaccggaatgctgactggctcaatgagcgcgtctgaggcgatgaaatcgcttggatcgaccatcctcaacagtgttgttaactcgctggtgcaggcggcaattcaggcagctattgttaagccattgctggaagcgtttggtttatctgccgaaagcacgcttggggcaagtacggcatcggcggcagagtcctacgctgcatgggcgccagcggcaatagcggcttccattgccacgctgggcagtgcggcaggcgttggctttgctgcatattctggtgctacgttggctggcaaggctcttggcggacgtaaaaatggcgggccggtatcatccggcaatatttaccctgtaggagaaggaaaccttccggaactcatgcagaccagcaaaggtcttttcatgataccgggtgatggcgggaaggtattcagcaacaaggatgtgacaagcgacacccccagaattaagagagcgtcaaccggtaaagaatatctcccgtcatcctccgcatcacccagctcggcggaaagccgcactgaacgaccgatacaggtcaacataacacttatagaccagaccaccggcaatcagcacaacatcactggcactgaagctttccagcaaggtgacattgtgacagtgactggatggctaaatgacgtagatactgccggcccaatgtctacagcattcgcaaatgctcacggactaagaaggcaggcaaggggggctttttaa

SEQ ID NO: 181660 - DNA, 372 bp, Klebsiella oxytoca
atgggtattaaaggcaggggcatgaacaacattcgccgcaacatcaatgcgctggtgagggacatcaccgggcggcgcttaccgcgtgcaatgacagccgccttgcatgaaggtgggctcgtagcagcaatctatacgccagttgataccagcaccctgattaactcgcagtttaaagaggttatcaccaacgggacgcgcatcactggccgaatcggatactctgcgaattatgcaatttatgttcaggatccgaacatcccgcagaaatttaccctccccagggccagaaaagagtttttgcagcatggtgttgctgatgctaaaccgcagatggaggcagctttcctgcgagaattatcaaaacgctga

SEQ ID NO: 181661 - DNA, 630 bp, Klebsiella oxytoca
atgagagagcagacgcgggtttacacctctgcgctaccacgaattaacctccagtttctggcagatatgcaaagaaagctggtggactcgagcccgaaaacacagattttttgtgataccaagagcggaagggtgtgtttctctctggttcctggcggctacagtgcgacaatcaacggggtaacgcgagttattggcatcacgattacccgggcagggtttggttaccggcgatggtacatttgcccgcattgtggtggccgggttgcgaaattattcattggccggaaggacgtagggtgtcgtaaatgctggagccttcactatgccagccagagtgaagatgaggtcgctcgcttacggcggagtgtgtggaagcagaggcatgacctatggggggatgattacccgcccgcgggcagcctgctaaatagcccgctcaagtttccgaagcctgccggcatgagatgggataccttcgagcaaaagcgctctcgactgctaaagactgaatcagcttactggcggttgaaagaaccgagggatgctaaagggttcgccagcgtaatgcgcagagctgaggcgtcaatgcgctcatttgaacgggcatcgaaaaaggctaccccatga

SEQ ID NO: 181662 - DNA, 192 bp, Klebsiella oxytoca
atgttagaccgcataacactggagttagccatacaggagatagccaggcagagcggtgaaacacttgataaccacgcccgctacaccattcgaaacggcgtggcgcaggtgctacaggccaaagaaagccaccgccgcaggatggtagcgccagcctaccagtggaagaagcccaccgcgccgcgcagataa

SEQ ID NO: 181663 - DNA, 426 bp, Klebsiella oxytoca
atgagcaaatccaatctggtagcattccgcgttccggctgaattgcaggacgcatttaatcaggctgtagcggcatcaggcggcgatagaacagcgtggctagtcgatgccctgcgcagcaaactaagccagccagagagtaaccctcagtcccgtatgctggcgctgttggagcgaatggaagtagcggcagcggcgctagccggaggtaagcaggggatcccgcctaccccgtacaatgaaacggcggtgatcgggattatcgcggacactatccgggagggtttcgataacgggcgcattatcgctgagaggctcaatgaggcgggttatcagactaaggcgggtaaggcgtgggataaagacatttacagcgcctggaagcgtcaggggcgcaatgctgagaagttatcggcggcgctgtaa

SEQ ID NO: 181664 - DNA, 375 bp, Klebsiella oxytoca
atgagaatgaccagccgtaagaaaaagatactcagctactttgagccggataatctcgactggataacgggagagattgggcctccgccgttcgacgtgtccggggtggcctacctgcttcatggtatggagtctttcgataagcgatatcaactcgaatcaacccggcgcactctcgaaaacatggtagctggtggcctgctggaaagagtgacggtgtacgagcggcggcaaaacatcacacagagtagcgccaattctcccggcgtctggtgtaatgtcacgcgttatggcctgccgggaacatgccggctaatacgtgatacatgcggcgctgataattcgatatcaggcgagtgtgtgcggcttggttaa

SEQ ID NO: 181665 - DNA, 294 bp, Klebsiella oxytoca
gtggcgcacgtattcggtgaacgcacgttgtccacgctggagcgtcttctgggcctgctgtcggcctttgaggtcgtggtatggatgacggatggctggccgctttatgaatcacgcctgaagggagaactgcacgttatcagcaagcgatatacgcagcgcattgagcggcataacctgaatctgaggcagcatctgtcaaggctgggcaggaagtcactgtcgttctcaaaatcggtggagctgcatgacaaagtcatcgggcattatctgaacataaaacactatcagtaa

SEQ ID NO: 181666 - DNA, 1539 bp, Klebsiella oxytoca
atgaatgacatctcttctgacgacatccttctgctgaaacagcgccttgccgaacaggaagcgctgaaccgtgccctgctggaaaagctggcagaccgggagcgcgaaatagaccatctgcaggcgcagctggataaacttcgccggatgaacttcggcagccgttccgaaaaagtctcccgccgtatcgcacaaatggaagccgatctgaaccggcttcagaaagagagcgatacgctgaccggtcgggtggatgacccggcagtacagcgcactctgcgtcagacccgcacccgcaaaccgttccccgaatcactcccccgcgatgaaaaacgcctgcggccagcgggttcctgctgcccggagtgtggtggtgcgctgagttacctgggtgaggatgccgctgaacagctggagctgatgcgcagcgccttccgggtgatccggaccgtacgggaaaaacatgcctgcacaaaatgtgatgccatcgtgcaggcccccgcgccttcgcgccccattgagcggggtatcgccggaccggggctgatggcccgcgtgctgacctcaaagtatgcagagcacacaccgctgtatcgtcagtctgaaatatacggtcgccagggcgtggaactgagccgttcactgctgtcgggctgggtggatgcatgctgccggctgctgtccccgctggaggaggcgcttcaggactatgtcctgactgacggtaaactccatgccgatgataccccggtccaggtgctgttgccgggcaataagaagacgaagaccgggcggttgtggacgtatgttcgtgatgaccgcaacgccgggtcagcgctggcaccggcggtgtggttcgcctacagccccgacagaaaaggcatccatccgcagacccatcttgcggggttcagcggtgtgctacaggcggatgcgtacgccgggttcaacgagctgtaccgcgatggccggataacggaagccgcctgctggcctcacgcccgccgtaaaatccacgatgtgcacgttcgcacgccgtcagccctgacggaggaagccctgaagcgtatcggcgaactgtatgccgtggaggcggaaataagaggaatgctggcggaacaacggcttgctgaacgtcagcggaaaacgaaaccgctgcttagtaccctggaaagctggttgcgtgaaaaaatgaaaacgctgtcgcgacactcggagctggcaaaggcgttcacgtacaccctgaaccagtggccggccctgacgtactatgcagaaaacggctgggccgaagccgataataacatcgctgaaaatgcgctgcggatggtcagtctgggtcgtaaaaactggttgttcttcggctcagaccacggtggtgagcggggagcgttgctgtacagtctgatcgggacgtgcaaactgaacggcgtggatccagaaagctaccttcgccatgtccttgacgtcatagctgactggccggtcaaccgggtcagcgagctgctaccctggcgcatcacactgccaactgaataa

SEQ ID NO: 181667 - DNA, 348 bp, Klebsiella oxytoca
atgatcccgctaccaacaggcaccaaaatctggctggttgccggtattaccgatatgagaaacggcttcaacgggctggctgcaaaagtgcagacggcgctgaaagacgaaccgatgtccggccatgtcttcatcttccggggccgcagcggcagtcaggttaaacttctgtggtccaccggcgacgggctgtgcctggtgaccaaacggctggagcgcgggcgcttcgcctggccgtcagctcgcgatggcaaagtgttcctgaccccggcgcagctggcaatgctgctggaaggcatcgactggcgacagccgaagcggttgctgacctccctgaccatgctgtag

SEQ ID NO: 181668 - DNA, 141 bp, Klebsiella oxytoca
atgtaccgggtaaaacagctgttcgggggttcactgacgctgcgtgactacgatggtcaggttgcggaggttatggccctggtacgagcgctgaacaaaatgacgaaagcaggtatgcctgaaagcgtgcgtattgcctga

SEQ ID NO: 181669 - DNA, 354 bp, Klebsiella oxytoca
atgccagaaattgcatccctacaacttttcaaaatactatctgatgaaacccgcctgggtatcgtgctactgctcagggagatgggggagctgtgcgtatgcgatctctgcacagcgctggaacaatcacaacccaagacctcccgccatctggcgatgcttcgggaaagtggcctgttgctggatcgcaaacaggggaaatgggttcattatcgcttatccccgcatattccttcctgggctgccctggtgattgagcaggcctggttaagccaacaggacgacgtacaggccatcgcccgtaagctggcatcggccaactgctctggcagcggtaaggctgtttgtatctaa

SEQ ID NO: 181670 - DNA, 363 bp, Klebsiella oxytoca; identical to SEQ ID NO: 59977

SEQ ID NO: 181671 - DNA, 1752 bp, Klebsiella oxytoca
atgaaattcttagagaatatcccgtcttacctgtttttcaccggtaagggaggtgtaggcaaaacttcgatttcctgcgcaacggctatacgtctggctgaactgggaaagcgtgttctgcttgtcagtaccgacccggcttccaacgtcggtcaggtattcgatcagactatcggtaacactatccagcccgtgactgctgtgtctggtctttcggctctggatattgacccgcaggacgccgcccagcaataccgcgccagaatcgttgaccctattaaaggtcttttgcctgatgacgttgttaacagcatcagtgaacagctttcaggagcatgtacgacagagatcgctgcattcgacgagtttactggcttactgactgacgcttctctgctgacccgctttgatcacatcatttttgatactgccccaactggccacactattcgccttcttcagcttcccggagcctggagcagcttcatcgaaagtaacccggatggtgcttcctgtcttggtccaatggctgggctggaaaaacaacgcgagcaatatgctcatgcggttgaggcattatccgatcctgaacgaactcgccttgtgctggtcgcgcgcttgcaaaaatcaactctgcaggaagtcgctcgtactcatgacgaattatcagctattggccttaaaaatcagtatttagtcattaacggtgtcctgcctgcgagcgaagcagaacgtgatgcactggccgctgcaatatggcaacgggagcaagaggcgctggcaaatcttcctgccgggttatctgatttgccgacagacaacttatacctgcagccgctgaacatggttggtgtgtccgcattgaaagacctgctcaacgaacacgctgagataacatcgcttcctgaacaaagcccacagaacaagccagagaatatgtcgttgtctgtcctggttgatgatatcgcccgcagtgaacacggtttgattatgctgatgggcaaaggtggtgtgggcaaaaccacaatggctgcggctatcgccgtcagtctggcggataagggttttgatgtgcatctcaccacctcagatcctgctgcacatctcagtacaacgctcaatggcagcctcaaaaatctgcaggtcagccgaatcaaccctcacgatgaaactgaacgctatcgtcagcatgttcttgagacgaaaggcagggatctggatgaggctgggaaacggctgctcgaagaggatttacgttctccttgcacagaagagattgcggtgttccaggcgttttcacgcgtaattcgagaagctggcaaacggtttgtggtcatggatacggcacctaccgggcatacgctattactgcttgatgctaccggggcttatcaccgtgagattgccaggaaaatgggggataaaggtcattttaccactccgatgatgcagcttcaggaccaggaacgtaccaaagtcttgctggtcactctgcctgaaaccacacctgtactggaagcggcaaacctgcagtccgatcttgaacgtgcggggattcatccctggggctggattatcaataacagcctttcgattgcacagacgcaatcgccgctgctttgccagcgtgccctacaagagcttcctcaaatcgaggttgtgaaaaaccagcatgcaagccgcatagcgttagtaccggtaatggctgtagagcccactggcatcgagaaactcagagagctggccgtttaa

SEQ ID NO: 181672 - DNA, 1290 bp, Klebsiella oxytoca
atgttactggcaggcgctatttttgtcctgaccatcgttttggttatctggcaaccgaagggattagggatcggctggagtgcgacgctgggcgcggtactggcgctgatctctggcgtagtccattttggtgatatccctgtagtgtggaatattgtctggaatgcgacggcgacctttattgccgtgattattatcagccttctgctcgatgaatcgggctttttcgaatgggcggcgctgcacgtttcacgttggggtaacggtcgcgggcgtttgctgtttacctatatcgttttgctcggcgcagcggtggcggcactgtttgccaacgatggtgcggcattgattctgacgccaattgtcatcgccatgctgcttgcattaggtttcagcaaaggtactacgctggcatttgtcatggccgccgggtttattgccgatacggccagtctgccgcttatcgtgtccaacctggttaacatcgtttctgcagacttctttgggctgggtttcactgagtatgcgtcggtaatggtaccggtggatatcgcagccattatcgccacgctggtgatgctgcatctgttcttccgcaaagatattccgcctacttacgacctggctctcctgaaagcaccggcaaaagcgattaaagatctggcaaccttcagaaccggctggatagtgttgatccttcttctggttggctttttcgtccttgagccgttgggtatcccggtcagtgcgattgctgctgtaggggctgtcattctgtttgcggtggcgaagcgaggtcatgccattaacactggcaaagtgcttcgcggtgcgccatggcagatcgtcatattctctctgggaatgtatctggtgatctatggtctgcgtaatgccggactaacagaatacctctccggtgtgttgaacgtgctggcagataaaggactttgggccgcgacgtttggtactggcttcctgacggctttcctctcttccatcatgaacaatatgcctaccgtgctggttggcgctctctctattgatggcagcaccgcaacaggcgttatcaaagaggcgatgatttatgccaacgtgattggctgcgatctggggccaaaaattacgcctattggtagcctggcaacgctgctctggctgcatgtcctttcacagaagaatatgaccatcacctggggatactatttccgcaccgggatcgtcatgactctgcctgtgctgtttgtaacgctggccgcgctggcgctacgtctctctttcactttgtaa

SEQ ID NO: 181673 - DNA, 426 bp, Klebsiella oxytoca
atgagcaacatcaccatttatcacaacccagcctgcggcacgtcgcgtaatacgctggagatgatcctcaacagcggtatcgagccgaccgttattctttaccttgagactccaccttcacgcgatgagctggtcaaactcattgcagatatgggcatttccgtccgtactttgctgcgtaagaacgtcgagccgtatgaggaactgggtcttgcagaagataaatttactgacgaccagctcatcgactttatgctgcaacatcctattctgattaaccgtccgattgtcgtgacgccactcggaactaaactttgccgtccttcagaggcggttctggatattcttccggatgctcagaaagcggctttcaccaaggaagatggtgaaaaagtcgttgatgatacaggtaaaagactgaaataa

SEQ ID NO: 181674 - DNA, 576 bp, Klebsiella oxytoca
ttgaccacttcagtcctggaaaatcagggcaaaggattagatgcagaagggctggcggtgctggaggaagacctccgctcgccatgcactgaagagattgctgttttccaggcattctcgcgggtaatcaaagaggcagacgaccattttgtcattatggacaccgcgccaacgggtcacacgcttctgctactggatgcgactggagcctatcaccgggaaatggtgcgccagatggggcaaacacatgaccatgtgatgacgccaatgatgcaattgcaggacccggagaagacgaaggtgattatcgtgacgcttgccgaaacgacacctgtactggaagcagctaatctgcagcaggatctgcgtcgcgctggcatcgagccgtgggcatgggttgttaataacagcctggcagctgctcaaccgtcttcacctttcctgaagaccagggcgaaccgcgagctgcctctcatctctgatgtggaagagcagtatgcaaagcgtattgcattaacagcgctacagagtgaagagcctgttggtattgacctgctggaagagatggcgaagtaa

SEQ ID NO: 181675 - DNA, 2727 bp, Klebsiella oxytoca
atgaaaatcatgctgggggctaactgcacattgattgccttattgagcgcaaatgtcgcgttggcatctaatgaagttgccgttgcaccttacttttccgattggccagcaatacatagcgtcattaccaaagacgaaacgattgaaaatagagtcaaagagattcttgcaaagatgactcttgatgaaaaaattggccaaatgctgcagcctgattttcgggaaatcacccctgaggaagtggctcaatataaaattggttcggtacttaacggtggcggtggttggcctgataacaataaacactctctggctcggagctgggtcactgaagcagataaatactggattgcaacggataaggcctttgctggtcgtggcttcagaattccctttatgtgggctaccgatgcggttcatggtcataacaacgtcttccaggccactctcttcccacataatattggcctgggagccgcccacgatcctgatttaatttatagaattggccaggcaacggctctcgaagttgccgcgacaggtcttgactggacctttgctcccaccgtcgcggtgccacgtgacgatcgttggggacgcacctatgaaggttattctgaggatccctccatcgtctatgcctatgcaaaagagatggtcaggggcctacaaggttctgcatctgatctgaagggacaacatcatgttatttcaaccgttaagcactttgttggcgatggcggaacgctgtacggcgttgatcgcggtgatactaattattcagagaatgacctgcgtaatattcacgcggtaggatatttttcaggcctagacgcgggcgctcaggccgtaatggcgtcgtttaatagctggaaaaacgataaaaattccgctatgggaattaaggtcgggagcgagtacaacggcaaactgcacggcagctattatatgctaacgcaggtacttaaggacaaaatgggttttgatggcatagtcatatctgactggaacggccatagtgaaatctctggttgtagtatgggagactgtgaagctgcagtgctggctggcatagatattttcatggtgacagcaagaaaggactggatgtcatttcggaccagcttactcgatagtgttaatgacaaaaccgtcccaatgtccagaattgacgacgcagtcagtcgcattctgagagtcaaaatgcgtgctggtatgtgggacaaacctatgccgtctcagcgtacccttgcagggaaacagagcattcttgggaatcctgaccaccgcgcactggcaagggaggcagttcgtaagtccctagtattgctgaagaacaaaaataacattttgcctcttagccgagacctcaacgtgctggttgccggtagcgctgcgaatgatatcagcaagcaaattggcggctggagcctcacctggcaagggacggaaaataacctgtctgatttccctgacgccgttaccgtcgcaggagccattgagaaaaccattggcaaacacaacgtaatgacactctcctcaagccagctggatcttaaagaacggcccgatgtggctatcgtcgccatgggcgaagactcatacgcagaatggttaggtgatattcctgataataagacgctatcctactccgagctgaaggctggctattccggagatctcaaattattaaaaaaacttaataaagccggtatcccgacggttgttattttgctttctggcagaccgctctacgtcaacgaagagatcaatctttccgatgcattcgttgccgcctggttaccaggcaccgaagcagaaggcattaccgatgtcatcttccgcgacactagcggtacgataagtcatgatttccagggggctttgtcgttttcatggccagcacagaaatgtgcgaccacaatcaacgcggcaccaaccaatatcgctggctggcagcgtccggaatttgaacagaagccggataaagagcatgtgttatttaattttggttacggattgacctacaacccgccttcacgaacggcggctaattatcaagatttggatcgcttaccgctcgataatcgtcgcctgggctgccgggagttgagcatggaaaaatcgccggtggccaccacccgactcgagctgttcggtgaaaaagcctccgatgagcatcgtttaagaatgggagatgagagtaactggaccggtaccgaggtatcaataaacggtaaatccgcgatgcagtatattagcgtacgccctgtcgattataaacgtcagcaggatgcgcgcgaggtaacatttatggggaccagcgagagtaccggtgcatctatccaactccagacaaccaatgttaaagggattaatcggaataattatctcaaggcaaacagtaacttaatggtgactttgcgcgttaagaaaaaaccagatcgtaaaatggagataggtatgcagtgcggttggccatgcgcttcctctatcgctatcaacgagaccttaaatactctcccgttaaataaatgggtcaccctcagcattccgctaacttgtttcaaagaaaatatggatttttctaaaactaatacaccctttattctgacgaccacggcgaatgccaaactcgatttgggattaattaactggactccagctggcgttaatccggagatggataacctcgtccaggttacttgtgatggaaccccgagataa

SEQ ID NO: 181676 - DNA, 2340 bp, Klebsiella oxytoca
atgaacacacgcagaacagttaagttctcactcattttctcaagtctttttgctttacagggttgtattaacggtgatggtagtagcactcaacagagtgccagcccggcagaggagttagtgaataatgggagttttgccgcggggacggatggttggtgggccgcaggaggccagttggatcgtgtagacaatatgggctgttttactttcactaacggtggagcgaacccctgggatgtcatttttgctcagtccgggatccctctggcggaaggccagtcttataatcttagctttacagcggtaaccaagaagccaattaatgccaaaattttggttcaacaagatggcgcaccatatacgaactatttcgcccaggacgttgaattaaacgaaacacggaaagactttaattttaaattcacccctaaatcagcagacgagaaggctcagttccagctacagttgggcactcagtctccgaccacggtttgcctcagcaacgtttctttgaaggggcctcggctgaaagtcgcgtcgaactttgcgccgattagggtaaaccaggtcggatacttgccgcacgcgttgaagcgagcaaccatggtgagtgattcgactcagccattgagctggactctactcaatagcatggggacgaaagtggccgagggtcagactaaacccttcggtatcaaccgtgcatcaaatgaaaatgtgcatattatcgatttcagccagtacacggaagaaacagacgagttaacgttggtggtgggtgataaaaagagccacccatttaatatcagcagcaaactctatcaacagctgaagtacgatgcgctctctttcttctatcagcagcgtagcggtattcctatcgagaaacagtacgttcaacggcccgatcttgcccgtccggcagggcatccgtcagaacgagtaacgtgctttaataagaccgacgccaaaggcaataaatggcctggctgtgattataagctggatgttaccggtggctggtacgatgcgggggaccagggtaaatacgttgtgaatggcggtatttccacatggacattaatgaatttctttgaacacgagaaatactctcgcaacgttaaggaaagcgcatttagcgatggtaaagtaaaaatccccgaaaataacaatcgcaagaacgatcttctggatgaagcgcgctggatgatggactttatgctggcaatgcaggttcctgatggcaagaaggcgtgggtacccgtcggcgatcagtccggtcatcttgaggcactcaagctgacagagatcgatgcttcagggatggcgtttcataaagtggccgatgaggcctggactggcatgccgcttccgccacataaagatccccagccgcgttatttaagccagccgagtactgcagcgaccttaaatctggcggcgactgcagcgcaatgcgcgcgcgtctggaaagatacggacgcagcctatgcgaaacgctgcctcgcagcggcagagaaagcatggaaatcggctaataagcatccaaatgtttttgcctacgacaactttgtcggttcaggcccgtatgatgataccaaagtggatgatgagttctattgggctgcggcggaactgtttaccacaacaggaaaagctgaatatctcgatgcgataaaaaactcacgctactacctaaccagccctaaaggcgataaagacgctacgggcgatctcttctggcaggacgtctctgctgccgggactattaccctggcgctggttccgaacgatcttcctgctgaagacgttaaaaaagccaaacagacgattattaatactgcgaatgcctacgcgcaaagcgtacagactgaggggtatctgattccttattctgcagtggagtatccatggggttctaactcgaacctgatgaaccgcagtattttccttgggctggcgcatgatttcaccggcgaccgcaaatatgtccaggcgatgtctgacgccatggattatgttcttggacgcaacccgctcgatcaatcctatgtgtcgggttacggtagccgaccgctcaagaatccgcaccatagattctgggctcagcagctcgatccgtcatcaccgctggtgccgccaggcgtgatgtccggtgggccaaactcgatcagcttcagcgatcctatcgctgccagtctcaaaggacattgtaccgggcaaacatgctggaaagatgaaattggctcatggactctgaatgaagtcactatcaactggaatgctcctttcttctggacaaccagctatatagatgaaggttatctgaataagtaa

SEQ ID NO: 181677 - DNA, 834 bp, Klebsiella oxytoca
atgacgcttggcgtgctgacacagcatcttgatagtccgttttctaatgaaatgttgcgtggtgtggaaaaaacccttgaaggtaccggctacgtacctgttgtcgtgagcggtcactggaagtcgaagcaagaactcgaacgtatgcagttattgattgaccgtcgcgtggatggaataattatattaacaggacacattagccaacaaagtctcatcgagttatcccttcaggtccctatcgtagcagccggccatgatattaatacagcgcaggttcgttcatttaatgtcaacaatagcctcggcggttatatggcgacgcaatacttattagatcttgggcatcgaaagattgcccatattcttggcaagatggatcaaaaggatgcggttgatcgtcttaatggctaccgccaggccctgagcattgcaggcattgagtataatccagacctcgttgtacaaggtgacttcagcgaagaaggtggtcgccaggcgattaagcatctggtctccaataatattgatttcagtgccgtattttgtgccaacgatcaaaccgcatacggtgcgatactcggcctcaaagaggctgatttagacgtgcctgatgatatttccgtgattggcttcgatgacctgcccttttcaacatatagtaatcctccccttaccaccatcaaacagcccatttatgaaaccggcgttaagctggcgcagacgctgcttagcttaattaatggtggtgatgatgaagtgacaaaagaaagtgaatccctgcttcctgaactgcagattgttaaccggaaaaccgccttggaattcaaatga

SEQ ID NO: 181678 - DNA, 900 bp, Klebsiella oxytoca
atgaaacataaaaaatcttcgctaaatctctctctgctactactcagcctgatggttactggctgtcattcatttgtagcatcgacatcaggcacaagcgctcattcactgcaggaacaggtggccatcgaccggaatgcgcttgcggcaaagtcagccattgataagctcagcgatattaagtacacccctatccagggtgataacgtcatggcccagatcaatgaaaatagccaggttttttcttttaactcagagaagagttatgttgcggcctattctatcgaaggtaaacaggtgggtcggtcggtaaaattaagttcgccactcgattttagcgtgttcatcccttccgtgatgattttagatgaaaactttaacgttgttaatgtaataaaaagtagccacttcccctacaccgaggattcattcggcgccaatctttacaaaggcacattctcattaccggatggttatacaaaactgtatttattaatttacacaaccgctaaagacgcttccggaagtaccgttattgacaatgaattgttacaaaatagtatgcgttacgacagggtttctgatgtcggtaaattttctaggctagccgtcccccattccaccacgggacgtataaagcttgaacttataaaaagtgctgatgaccgctatgttacagaagaggccccggtaaggacgcctgtatgtctgcaaaataggcccaacactgctgctggtataagcgcacaggaatattatgaaaaaataagaaaactcttatctttcaaagactatgaacaagctattcagtatgttcgtgaagctgagtgttcaggctttacaaaagccagagatgttttcttttctgtgattgaggataatgaaaggaaaaatttatag

SEQ ID NO: 181679 - DNA, 1290 bp, Klebsiella oxytoca
atgaaaaagaactacctcgcaagttcaattatgctctgctgtggaatgttactttcctcacaggtaacggcgagtgaaaccattggttttcacggctatataagagccgggtccctttttgatgccagagataactttagcaaagcgggttatgcagatgagattgataaaaacatgggccgtctgggggctgaagttgacaatagctgggaaggtcggctgaataaattatggaatttaaatgacggtaaatctgtcgatattcatctgacaatcgagtctaaaggggatggtttacaaacccgtgcggcaccgcgcgaaacaggtatttcagaaagctacgtagaactcggcggcattaccccgacgggtaaactatggggtggcctgagatactacgatcgtgaaaactatgtattcacaaccgattatttctataccgattactcaggtaccggtattggggttaaagaccttgaattgggtggtgggaaatgggatatggcttacatcgtcagtaatgatgctaaccatactgaacgcccggatggtaattcggcgatcatgcacaccgtgcactccagcgcaaaatatggcgcatgggattttgagatcgccgctaaacagatgccagataactcatttattggtgatgaccacaaatatgcaactaaaggcatagaaggaaccgtcatctactccagggatgatttctttaccgccactggcggtttttcaaaagtcattttacaggcaggacgcggactgggttccggagatctcttgggcgcgacattaacggatacgtcgatgtatcgtaaaagctctctgtatcagaaaacaatgcaggatgtaaataacggctataaaccctatcaaactaaggtccaggagggcgaccagtcctatcgtatgtttgtatggggaggctggtatggtgctaacgtcaatattttacccaccttcacctaccaatataatgactatgaagcaggccaccatgactcatggtatgcagcatcattacgctcagttttcccgtttaatgagttcttctcaatacagacagaagtcggctacgtcgataacgatcttgtcgtgaataatatggaccagagcagccgctccagtaagattagctttgttccgacatttaccgttaacaccggaatggggccatcaccggagattcgactgctcgcgacctatgtcgatcgtaaatacaatgtgagctggatggacagtcgtggtgacttccttgtaggtgtccaggccgatatgtggtggtaa

SEQ ID NO: 181680 - DNA, 306 bp, Klebsiella oxytoca
atgaaaaagatcatgctttgttgctccgcaggtatgtctacaagcctgctggtaaaaaaaatggaagaagccgcggaagcgaagaacctggatgttgaaatcaaggcttttggcgtagctgaatttgatgaaaacatgcccaactaccatgtcgtgctgcttggaccgcaaattaagtatatgcagaataatttatcgtctaaagcgtccgtttatggaattaaagtccaacctatcgagatgctggactatgggatgctgcgcggagatcgggttctggatattgcattagaactggctaaatga

SEQ ID NO: 181681 - DNA, 1335 bp, Klebsiella oxytoca
atgaactcattttataattttttggttggcatcattgaaaaacggcttgcgccgatggctggtgttattgctcagcaacgatatgtcctggcaatacgtgatggattcatcgccgcgctgccgtttatgattgttggcagctttatgcttgtttttatctttcctccaatatcaactaataccacttttcaatttgcgaaagcctggctgaatttctctgcaaactatcgcgaacagttgatgttaccgtttaatatgagtatggggttaatgaccatatttatttcagtcggggtaggggcaagtttaggaaaacaatactctttagatcctataacaacgggtcttctttcgctgatgtcgtttatgctggttgccgccgaccttaagaacggcgccctgtcaatgcagtatttttctggccaaggtatctttaccgcgttgctttgttcaatatatgcgacagaggtctatcgttggctgaaaaaacggaatattacaattaaattaccggagcaggtgccgcctggtgtttcccggtcgtttgaggtgctgatcccggtcattgttattatgattaccttacatcctctgaatcttttcattgagcatgctacaggtatgattttacctgaagctattatggcgatgcttaagcccttagtcgcggcatcggatagccttttagcggtgattctggccgtgctgttgtgccaaatcctgtggttcgcgggtatacatgggacgatgattgttaccgggatcatgaaccctttctggatggcgaaccttgcgtctaaccaggccgcattggcagcaggagaagcgatcccgcatacttttgtacaaggcttctgggatcatttcctgtttataggaggtgtgggttcaaccttaccattggcaattctgctgatcagaagtagggctgctcatcttcggactatcggccgtatgggctttgtacccggtcttttcaacatcaacgaaccgatattgttcggcgcgccgatcatcatgaacccgattttgttcattccgtttgtgtttatccctgtgattaacgccattcttgcatggtatgccatcgatctggggctggtagagaaagtggttatgatgaccgcatggacgactcccgctcccattggcgcatcatgggcaactaactgggctattgctccggtaatactgtgctttatctgtatggctatagccgcgttaatgtattacccgttcgtcaaagcatacgagaaaacgttgctggcagccgataattcaaacgttgaaagtaaaaatgaagaaagttttgaattaaagtcagaaaaagtttaa

SEQ ID NO: 181682 - DNA, 1380 bp, Klebsiella oxytoca
atggaatataaattcccggatgggttttggtgggggagcgcttcatctgcgacgcaatcagaaggttcggttgatggcgatggaaaagcaaaaaacatatgggatcattggtataatcttgagccgaacagatttcatgagcaaattggtccggctgaaacatccacgttttacaagaattatcatcaagatattctgttgatgaagcgtattggacataacagcttccggacatctatctcctgggcccgattgatgccggatggcgaaaaaatcaaccgggaagccgtcgaattttataataatgtcattgatgatttaatcgaaaatggcattgaaccgattttcgggcttttccatttcgacatgccgctatactggcaggagcgaggaggatggcaaagcagggaaacggttgcagcctatgaaacctacgccaaagtttgttttgaactgtttggtgatagagttaagcactgggttacctttaatgagccggttgtcgttgtggaagggggatatttatacgacttccactacccgaataatgtaaatttccgcagcgcggcgcaagttgcgtttcatatcatgctggcacacagtaaagcggtaagagcgtataaagacatggggctgtccggtaaaattggcatagtgcttaatctgacgccttcataccctcggtctaataatgaagaggacttgaaagcatcgtttattgctgacctattcttcaaccgttcattcctggagccagcaataaatggtatctatccggtcgaactaatagagattttaaaaacctacgatcagttgccagaatacgaaagtggagacctggaaatcatccagcagggtaaggttgacttcctcggcgttaactattaccaaccgcgaagagtcaaagccagggcaacgatgatcaatcctgattcaccgttcatgcccgattggttttttgaaaactatgaaatgcctggccgtaaaatgaacgtatatcgtggctgggaaatttatgaacagggtatttacgatatcttaatcaacctacgcgataactatggaaatatcccttgctatatttctgaaaatggcatgggtgttgagaacgagacccgatttattgctgatgacgggcaggtaaaagatcattaccgaattgattttattcgggagcacctgaagtgggtacaccgtgctattagcgaagggtctcaatgccagggatatcatttatggacctttattgacaactggtcgtggatgaatgcttacaaaaaccgatatggtttcattagcctggacctggattctcaagttcgcaccgtgaaacagagcggtgaatggtttgcagaagtttccgtgaataatggattttga

SEQ ID NO: 181683 - DNA, 312 bp, Klebsiella oxytoca
atgttagataccgaagaagtcgttatgggtattattgttaatgccggccattcaagaagtttatgctatgaagcattaaatcatgcgaaatcaggtgattttgatcatgccagcaaattacttgagatggccgctgaagcgggtaaagaagcgcatgccatacagactaagctgattgaagaagacgaaggaatggggaaaacgacgatgacgcttgtgatggtacatgcgcaagatcatctgatgacatctatcctgtgtcgcgaaatgataaccgagttggttcagatctataaaagtaaattgaattag

SEQ ID NO: 181684 - DNA, 672 bp, Klebsiella oxytoca
atgaaattaaagcatgcgctgtgcggatgggtaccttcggattttgacctctacaaggaaacatacctgaagtacggtggcagtgtgaatatgcacccagacgttgttcgcttttttatggacgaaaaaatactaacattcgatttctggcataccgaaaacaatggggatatcactgccgcatatttcgtgacgaataaaaaatatcccggcctgaatgtttggcaggattatcccatatcctatgacgaaatcattctgcctgcggctcccgaacataaggtgattctcccgacgaaaactaaccgactttcgtcggtccttcgtggatgcgtgctcaattccattccggcctttggccaggcgcctgaggtttaccgaattaaagagtcgttttcgacgaaaacgacccggaagcgaaatggtgaactaaaacgttttataagtgcaggcggggaaatccggccccttgcagaaatgtccgccagcgtgattgcggacctgtacgtcgcgctgttcagatcccgttttgtggattccgtccggtgctatgacagattcaggattgaagcgctgcttagcgcactgccgcagatggtctccgggaatgcgctcttattaggtgcaatgagtccggtgaagtaccggcagcatcttgggatcacaacataa

SEQ ID NO: 181685 - DNA, 192 bp, Klebsiella oxytoca
atgacaaggcataaaacagtcacgcggctaaattaccggatggccgtttccggcagatccgatttttttgcgtataacaactttccggaagtgtgccactgtctgggaaaaagcaaagcggcaatatcggccgttgagcagcaggtcacgaatagggtgcggaatacaacatatagcgtcactgtcatctga

SEQ ID NO: 181686 - DNA, 921 bp, Klebsiella oxytoca
atggcgaagatccaggccagaaatgttgacgatgcgctgtttgcacgcattgagcagtcagcgatgaaaaatgaacgctcgatggagggggagatccgcctggcacttgccgcgacttatccgcctcccgagcagattgcccgccggctttctctacgggaatcctggctgaaggaaaccggacaacggtttctcaccctgctggaaaaacttcaggcggacaattatttccaggagtactcccgtgacaaccggaccggggtgccggagctggtccgggctgctcgtctcctgcaagtctctccggggctgcttatggatatcagcgagggacgtcaggagctgtctgtcgcactggcagagaccatcgccgtgcgctttgatgccagtgccgactggttgctgacaggctgtggcagacctttcccggttcgctctctcggcgataactaccacgacttcttcctgccgcaggaggacatgacaggctggcgctttgatctgatgcggatctgcggcgggcgccatgatgccaccctgctgtgtctgcgtcagtcaccggacggccatttttccctgggggctgtcagtgccgagtttgtactgggggacggcatgggcggaaccggaagaggtaaactgcaggacttcctcatttttatcaaaacatcgtgttcatcactgcgtctcgacgcctatgagtttgaggatggtgagggactggaaagcggctgggacgccgccgggcaacatcatccggtctggttccagcgcctcatacgccgttccccatctcgctggctaatcgatatgctccgtggtgaaagcccggcctggatgaccgatttcggttatgagctgaaagaaatcgcggccattccgtttcccggaaccgtgccagacaaaggagaaacggtttga

SEQ ID NO: 181687 - DNA, 810 bp, Klebsiella oxytoca
ttgaccaatgtacaggcagatattcaggttgatgccgggaacaatgcctggctgctgacgcttcctgaggtccgcatcgaaggggagttatttgaggagtgtactgtcgtcgccctccggactctgaaagattcctggtaccaccctgacggggagaattattccggtccccgtacgctggccggccgcgaatgtcagataagtcttttctggaatggcggaggatgggggaaggagcagacgtttgttgcccgctatacgtcagatctctgggatcgcaccccggaactggatctcactggaccggatttcatactggaaaaggtaataaagggacgaggtgttggctcatgggtaatgcagcagcttatctgctgggcaagaactctgccggcagagactccagtcaagagtatatggatttcccctaacgatgaagtaaatccggaaaacatgacaaggcgggacagcctgtggcacggagttggttttcgtttccgggaaggtgggcgacagtctctgccattgcgtgtgagtgaccttcagctgcctaaaggtcgtcactcgcccctgacggccgtccctgtacacaagggggtgggcgagctggtctgtgtcagaaatgagcaaaaccgggagcttaagagactgaaagagattaggttacaccaggcagaacgtattaagtttctgacagaacgacagtgggatgtgctgctgattaaaggcgtttctgcggttatcctgtcacccatctggataccttgctggttattcgagagattatcaggacgaaataaacatggttga

SEQ ID NO: 181688 - DNA, 717 bp, Klebsiella oxytoca
atggttgaaggcttttctgaatggttgccggtgatctcaactctggcgggtggggtactggccttcggcgctgcacttgtggtgaataaggtaaatcatcgttatgcacttgagcgtgaagcccgggctgctgcagagcggcaacgccatgagatgaaagttgcccaggataagcttgaaagggaacgatattttatttccactgagcttatttttcagcttgaacgctttggggaggactgcgtagcggctgcctgggattatggtgaaaaggaggatgaaagcggcatcgcttcggctgacagcgatataccctctatcagtttctcagctattacgggggactggagggctcttccgccaccccttatgttccgtattcgtgaactggacgtacaactggcagaatcgcgtaacgccctcagtatcgagcgtgaaaatgatgcagaaccttatttgaccgagttttttttctggcgtcgtcgttatgcaaccagactgggaattaaggcttttctgttggcggcaaaactaagaaaacttaacggtatgcctgaaatgaaaggtaccagaagtcactggtttgcaccacgaaacttgtggaagcagtactgcgaacaaagagaaatccttcgtcaccgtaatcaaagtgggctagtgcttgccgtatgcataattgcgaaaatacatgaaaaaaatgagaaggacatgacttag

SEQ ID NO: 181689 - DNA, 279 bp, Klebsiella oxytoca
ttgccaagcggcccccatattgaatggctgacggtactggatttcgatgagataaaaatagaccgtatttttattgccaatattgatgacccggtgaagcgagcgctacttgtttctgtggtgaaagggttacgtggtactggcaaaccactggtgtttgtaggggtggaaacgccaggacagtttgaattcgtccgttctcttggcctcggttacctagttcagggctggtataccggaaaacccgaaacaatatctgcgatgaatattcagggttaa

SEQ ID NO: 181690 - DNA, 426 bp, Klebsiella oxytoca
atgagcaacattaccatctatcacaacccggcctgcggcacttcacgcaacacgctggagatgatccgtaacagcggtaacgaaccgaccattatttattatctcgatacgccaccgacccgtgataagctgattaaacttatttcagatatgggaattacggtgcgtgcattgctgcgtaagaatgttgagccttatgaacacctgggccttgatgaagagaaattcagtgatgagcagttgattgattttatgcttcaacatccgatcctgattaatcggccggtagtcgttacgccgcttggcactcgtctttgccgcccttcagaaatagtgctggatattctacctgaaggtcagaaaggagcgtttaccaaagaggacggcgaaaaggtcattgacgaaacggggaagcgggttaagtaa

SEQ ID NO: 181691 - DNA, 1263 bp, Klebsiella oxytoca
atggctggacaaatcagcctgcacctcctgctgaggcaggaaaacatatttacaaaatcatatatgatggggtctgagatgcttttggcagggagtatatttttactgacgctggtactggtgatctggcaacccagaggcctgagtattggttggagcgcgagtatcggggctgtgctggcgctgggaaccggtgtcatccatatcgctgatattcccgttgtctggaatatcgtctggaacgcgacagcggcatttattgcggtcatcatcatcagcctgctgctcgatgagtccggcttctttgaatgggccgcactgcacgtctcccgctggggtaacggacgtggccgcctgctgttcacctggatagtcttgctcggtgccgctgttgctgctttgttcgccaatgatggcgccgcgctgatcctgacgccgattgtgattgcgatgctgctcgcactggggttcagccagggcacgacactggcctttgtcatggctgcaggatttattgcagatacggccagcctgccactcattgtttctaacctggtgaatatcgtctcggcggacttcttcgatctgggctttacgcagtacgcctccgttatgatccccgtggatgcggcagcgattgcggccacgctgatcatgctgcatctcttcttccgcagggatattccggcaacgtatgacgtttcgctgctgaagacgcctgccagtgtgataaaggatgcggcaacgttcagggcgggctggattgtcctgttattgctgcttgtcggtttcttcgttctggagccgctggggatccctgtcagcgcgatagcagctgctggcgcagcagtactgtttatcgtggcgaaaagaggtcatggcatcaacacagggaaagtcctgcgcagtgcgccatggcagatcgtgattttttcgctgggcatgtacctggtggtctatggcctgcgcaatgccgggctcacggagtatctgtctggtgtactgaacctgctggcagaaaaggggttatgggcagcaacgttcggcaccggcttcctgaccgcgttcctgtcgtcggtgatgaacaatatgccgacggtgctgattggcgcgctgtcgattgacgggagtacggcgactggcgtcgtcaaagaggcaatgatttatgccaacgtgattggctgcgatttaggcccgaaaatcaccccgattggcagtctggcaaccctgctttggctgcatgtgcttgcccaaaaaatataa

SEQ ID NO: 181692 - DNA, 321 bp, Klebsiella oxytoca
atgctacaacctgttcagcttttcaaaatcctgtcggatgaaacacggctagccatcgtcatgcttctccgtgagtccggagaattgtgcgtctgcgatatctgcgttgccacctccgaatcgcagcccaaaatttcgcgacatatggctatccttcgcgaggctgatctggttcttgaccgtcgggaaggcaaatggatccactatcgtctgtcaccccatattccggcgtgggcagcagagacaatcacgacgacctggcagtgtctgcgcgaggatgtacgtgaatggctggacaaatcagcctgcacctcctgctga

SEQ ID NO: 181693 - DNA, 699 bp, Klebsiella oxytoca
atggaacaatttccagccctgaatactgactgttttgatcaacatattgccgaacgtctgcacctgcaggagcccccacggattctgatcctgtatggctcagtaagggagcgctcctacagtcgctttgccgcggaggaagcaggtcgcctgctgacggcgatgggcgcggaggtgaaattctttaacccctccggtttacccctgccggatgatgccccggatacgcaccctaaagtctccgagctacgcgggctggtcagatggtgtgacgggatggtgtggagctcgccggaacggcacggggctatgagcgcggtgatgaaggcgcagatcgactggataccgttgagtgaaggcgcggttcgtccttcgcagggcaagacacttgcagtgatgcaggtttgcggcggttcgcagtccttcaatgccgtgaaccagatgcgcattctgggccgctggatgcggatgttcacaattcccaaccagtcctcggtggcgaaagcctggcaggaatttgatgagaacggaaggatgaagccgtcctcatggtacgaccgtatcgtagatgtcgcagaggagttgtttaaaattacgttgctgctcaggggacaaaccagctaccttgcagatcgctacagcgaacgaaaagagagtcatcaggaactttcgtaccgcgtcaatcaggaaaaaatataa

SEQ ID NO: 181694 - DNA, 306 bp, Klebsiella oxytoca; identical to SEQ ID NO: 102371

SEQ ID NO: 181695 - DNA, 1206 bp, Klebsiella oxytoca; identical to SEQ ID NO: 120241

SEQ ID NO: 181696 - DNA, 579 bp, Klebsiella oxytoca
atgtcacgagtttttgcctactgtcgggtctccactctggaacagaatacagaaaatcagcgccatgaaattgaagcggcgggttttgccatcagaccccagcggctgattgaggaacatataagtggttcggttgctgccagcgaaagaccagggttcatccggttgcttgatcgaatggaaagcggtgacgtattgattgtcaccaaacttgaccgactcggccgtaatgcgatggatatccgaaaaacagttgaacaactggctactttagatatccgtgttcattgtctcgctctcggaggtgtggatttaaccagcccggccggaaaaatgactatgcaggtgatttcagctgtggctgagtttgagagggatctgctgattgaacgcacacattcagggatttctcgggcaagatcagccgggaaacgcttcggtcgtccgcccatcttgagcgaggagcaaaaaaaaatagtgtcagagcgccttaattccggggccagtatcagtgcggttgccagagaatttaataccacccggcaaaccatactccgggtaaaagcaggacagcaataa

SEQ ID NO: 181697 - DNA, 1428 bp, Klebsiella oxytoca
atgccacggagacaaatactcagtagtgaagaaaaagaacgcttgttgattgtgccagatgatgacgtatttctgacgcgcaggtgctttctgagtgaacatgacctcgcgctcattaataaacaccgcaggccagctaaccgtctgggctttgcagttttactctgttatttgcgaggactagggtttcctcccgacaaaagtatttcacctcacgactgtgttgtcttcaggctggcggctcatttgaaagtccagtctgatttgtgggccgagtatgcatcaagagaggtcacccgctgggaacatctggctgaactctaccgctacctggaattatccccttttaaccgggcgctgcaaaaaacctgtattcgccacctttatccccacgccatgcggacagacagaggttttttacttgcggaggaaatgctctcctggctccacaataataaggttattttcccctctgttgaagtgatcgaacgaaccctggccgaagcaacaacacttgccgacagggcggttttttctgcgcttaccgcgcagcttgaaccagggcataaagcggcactggaccgtctgttggtatctgagggtgagcaaccttcacggctggcctggctgctccagcctccgggaaaaattaatggtaaaaatgtcctgcaacatatcgaccggttaaatgcgattgagtcgctggcactccctgacggcattgcactttccgttcaccagaaccgactcctgaaactcgcacgcgaaggcaggaaaatgagtagccgggatctggcaagattcacggatgttcgccgttatgcctcgctggtttgtatcatatcggaggccagatccaccctgactgacgaagttattgatctgcacgagcgtattctgagtagtctgttcagcagggcaaaacgtactcaggccgagcggctccagcaaacgggaaagctgattcagagtaaactgaagcaatacgttaccgtcggacaggcattacttaacgccagagagtccggggaagatccctgggccgcaatagaagacgtccttccctggcaggaattcatcaacagcgtggaagagacgcggttcctgtcacgtaaggacaacttcgacccgttgcatctgatcacagaaaaatacagtacgctgcgtaaatacgccccccggatgctgtccgtgttgcagttcagggctgcacccgccgcaatgcagctcagtgacgcattggataccgtcagagatatgtatagaaaacaactccgaaaagtaccgccttccgcgccaatcgggttcatcccggaaagctggagaaaggttgtgatcacccccaccggcattgaccgaaaatattacgaattttgcgtgctgaatgaactgaagggagccttacgttcaggtgacacttgggtatag

SEQ ID NO: 181698 - DNA, 1005 bp, Klebsiella oxytoca
atggaaaacattgcgctcattggtatcgatctgggtaaaaactctttccatattcattgccaagatcgtcgcggcaaggctgtttaccgtaaaaaatttacacggccaaagttaatcgaatttctggcgacatgccccgctacaaccatcgcaatggaagcctgtggtggctctcactttatggcacgcaagttggaagagttggggcattttcctaagctgatatcaccacaatttgtccgtccattcgttaaaagtaacaaaaacgactttgtcgacgccgaagctatttgtgaagctgcatcgcgtccgtctatgcgttttgtacagcccagaactgaatctcagcaggcaatgcgtgcgctgcatcgtgtccgtgaatccttggttcaggataaggtaaaaacaaccaatcagatgcatgcttttctgctggaatttggcatcagcgttccacgaggagctgccgttattagccgactgagtacccttcttgaggacaatagtttgcctctatacctcagccagttattgctgaaattacaacagcattatcactatcttgttgagcagattaaagatttggaatcccagttgaaacgaaagttggacgaagatgagattggacagcgcttgctgagcattccctgcgtcggaacactgacagcgagtactatttcaactgagattggcgacgggaagcagtacgccagcagtcgtgactttgcggcggcaacagggctagtgcctcgacagtacagcacgggaggtcggacgacattgctgggaattagtaagcgaggtaacaaaaagatccgaactttgttggttcaatgtgccagggtattcatacaaaaactggaacaccagtctggcaaattggccgattgggtcagggatctactgtgtaggaaaagcaactttgtcgtcacttgtgctctggcaaacaagctggccagaatagcctgggccctaacggcacgacagcaaacttatgtagcataa

SEQ ID NO: 181699 - DNA, 267 bp, Klebsiella oxytoca; identical to SEQ ID NO: 180802

SEQ ID NO: 181700 - DNA, 300 bp, Klebsiella oxytoca
gtggcttctgtttctatcagctgtccctcctgttcagctactgacggggtggtgcgtaacggcaaaagcactgccggacatcagcgctatctctgctctcactgccgtaaaacatggcaactgcagttcacttacaccgcttctcaacccggtacgcaccagaaaatcattgatatggccatgaatggtgttggatgccgggcaaccgcccgcattatgggcgttggcctcaacacgattttacgtcacttaaaaactcaggccgcagtcggtaacctcgcgcatacagccgggcagtga

SEQ ID NO: 181701 - DNA, 765 bp, Klebsiella oxytoca
atgaaaggcatcccgagaggtgatgtgaataaacgtccggttttgcatcctttttgtgatctaatccctttttttgaaaaaatggagaaacatgaaaatggatatgactcattcaacactgggccggacgtgacaacgacggccagtgtcaggggacggcgtcggggggaccactcaacggtctgtaaatgccggcacccgttctatttcagacctccggactggaaacctctgaaggggatccacgggcatgcctatgccagtctggtcgcccgcgaccgcaaaaccggccagtgttcgttgcggcgccgagtatctgccgatccgatattcattgcgctgcgtacggcgcttggccgcaagcgcgggttcccgaaagttcgtcgtgatttactggatgcggtattcgtgcttctcatctcagcggcagacctggccaccgggatcgttgttctcaatattaccgaaatcagccgtcagctcagcccggtgcgaccggatggctcaccagatccctcgcagtatgtggttgtcagccgcctgtcacgtcttctgaatgaactggaacgatttggtatcctggaaaatccacgtcctgaatttgattttacgggtaaggttcgtttcccgaaacatgtcattatcaccgacctgggatggagcctgacagggattgatatggcgcgtttccggcatgaacgtgaggtgcgtctgaacaacgaggcgctgaaagaagcttatctgcaaagtagcaaaccgtcgtga

SEQ ID NO: 181702 - DNA, 519 bp, Klebsiella oxytoca
atgcaaaaacaagaagaagcgtggtttctggccacctacgcgccccccgaagacaaccggctccgcctgttccggttgctggaagaacacaatatcacagcctggacaccggaataccagtctgtacaacagtatcccgggcgccgggtcatccggcagcgggcactgttcaccggttatttttttatcatgctcaacctgaaccgaacgccaacagatttcatttatcagcagcccggcttcggtggctttgttcgtcagggaaaccagttgctgccggtccctgcgcacctggtcaggcagcttcagcgctgctttccgcagtgccttgacccggaggcctttgcttcacgatttccgcagttcgcacgaaaacaatgtcccggactgacgcgaagtgagtacaaccggctcatcagggccctccggaacccggacagtcatcaccgcaatagtgccttactcagcctgatatttccgaccgaaccaatgccccggcacgcccttcctgacctttaa

SEQ ID NO: 181703 - DNA, 429 bp, Klebsiella oxytoca
atggataccgccaaccggctgttgccttcactacagcacaataaccttacgcttctctccccgaggaaagtttccctggctcattcagatccatccggaaaggaccttgattatcaacgccgtatgctcgacaggggagtctggctggagtttgatatgattgggctcgacattacatttccgaaagaaggtgtggctccaggggtacaggagacagccgatgccgtcagcaagctcattgaactggggtatggagatcagcttgtattaagtcacgatgttttcctgaaacaaatgtgggcgaaaaatggaggaaatggatgggggtttgtgccaaacgtcttcctgggctatctgtccagccgcggggtcgatgcggagtcagtgaaaaaactttgtgttgataatccggcaaatctcctggcctga

SEQ ID NO: 181704 - DNA, 954 bp, Klebsiella oxytoca
atgaagaaaaaaaacaataatccgacacctcatgatgcgacgttccggcagtttctgacacagccggataccgcacgcgatttcatgaatatacacctgccggcagagctgcttgcgatctgcgatctcagcacgctgaagctggaatcgggctcgttcgttgaagatgatctccggcagtatttcagtgacgtgctctacagtctgaaaacaaccgccggtgatggatatgtccatgttctcattgagcaccagtcgtcgcctgataaacatatggcctttcggcttatccgttacgcggtggctgcaatgcagcgccatcttgaggctggccataaaaaactgcccctggttataccggtattgttctacacggggaagcgcagcccgtatccatactcgactcgctggctggatgagtttgacgatccagaacttgcaggaaggctctacagtaccgcattcccgctggttgacgtgaccgttattccggatgatgaaattgcagggcaccgcagtctggctgcgctgacgctgctgcagaagcatattcatcagcgcgatctagcagaactcgttgaccagctggcgccgattttactggccggatatctgtcttcatcgcaggtcctatcactggtacactatattttacaggcaggcgaaacagcggacgccgaagcctttgttcgcgaactggcacagcgtgtgccgcaacacggagacgcacttatgaccatcgcacaacagcttgagcagaaaggtatcgaaaaaggtatcgagaaaggtatagagaagggcatccaactgggggaacagcgaggaattgaaaaaggcgagcgtgaagccacccttaaaattgcccgtactatgctgaagaacggtattgaccgcagtaccgtcatgaagatgacaggtctgactgaagacgacctggcgcagatccgccactaa

SEQ ID NO: 181705 - DNA, 1200 bp, Klebsiella oxytoca
atgaaagtactgccggaaggggcggcgcgcctggagcactttgctgatacggaaagtctgacgacgtatgcacgccagcactgttttgaacagattgatcgcctgttgtccggaccgcatttctcctggggggccgcgcatgaaattttgtgcgcggccggactgtgcctggatcgcaagggagaagggctggcgatctacagcctgtatgacacagcacagacaccgatacgagccagccggcttcatccggatctgacactgaaacaggaagcgaccgccggtgcgtttcagtcaccggactggtatccggacagccataaccggtaccggaacacgctgcatgtgcgtgaccagggggcgagggcagaacgccgggaggccagggcaaatgcgcggcttgagttgcgagctcggtatgagcgctatcgaagggactggaagaaacctgacctggatgtggcgggacgttttcgggcgatagccgcagaggcgcgcgatcggaaagcggaagtgaggcggcggggacggacagccgatccgcagatacggcgtctggcgtataacattattgcgtttgaaaagatgcagaaagaagcggcgctgcgtctgcagttgcgtgaggagcgggcgacactgcacgtggcgggtaagctgcgcccaatgacgtacagggggtgggtggagcaggaagcggttaagggcgatgtggcggcaatcagccagttacgaggctggcactaccgtagcaagcggaagggatttccgactaacagtatcgtctactgtgctccggcagatgatgtgggcatcatggaagccccggagtttgaggcaactgtcagacgggacggtgtggtggtatattgccggaacggctgggcagaggtggcagattatggtgaccgactggaagtggttacaccgaaggaaatcccgtccatgtggtttgctgtgggggcggcttcgctgaaaagtggcgagcatgtgagcttcagtaacgatcctgacttcaggacccgggcctgccgaaccgtggcggagtttaaccgggaatttccgtctcgcaggcttgcactgcaggagccggagcagcgcaggatcgtggaggccgagcagaaccgatatacaagccaggaacagccgcgcagacaggaacagcaagattctccacagggtggaatggtctggaagccctga

SEQ ID NO: 181706 - DNA, 573 bp, Klebsiella oxytoca
gtgtgccgcgcccggacggtcacgggacgggcggcattttcgctcctgtccgacgtcgctgtgattttacgccatccactcgcacactttaaggagagtccttcaagccgctttcgcggtatcggctcgctgacgatggggactgtcggctcgttattccacggtcagcttgacccgtacccggagcggctgccttgtgcgcaggagtggttgactgcggcgaaatgtgatgatctgctggccttcctgaaagatgtcattgaccggatagatgacatcgttcaccaggacgcgcagcacatcgtggcggtacttgtaccatctgccgcgccgcggctgatggaaaaacgtttcggagactggcgactggttgcggacgaatatgggcatgacaactggctggacagtaaggacggggaacggttggatcaggtgctggacggtatactggtccgggaggcgcggttttgtccggtcctgctcaccctagtgaatgagtcccgggaagaaatcgaagcggccggggttatgaccgatcttctgcgtttcccgagggaaccggttcgtcgctag

SEQ ID NO: 181707 - DNA, 2118 bp, Klebsiella oxytoca
ttggacgttctggacgccatgctggccgttatcatccgtgacgccagaaagattgggcagaaaaaacggctccgctcgctgaaggatctggataaatctgcattggcgctcgccagcgcatgttcgtacctgctgaaagaagaaacaccggacgaatcgattcgtgctgaggtgttcagctacatcccaaggcaaaagctggctgaaatcatcacgcttgtccgtgaaattgcccggccctcagacgataattttcatgaagaaatggtggagcagtacgggcgcgttcgtcgtttcctgccccatctgctgaataccgttaaattttcatccgcacctgccggggttaccactctgaatgcctgtgactacctcagccgggagttcagctcacggcggcagttttttgacgacgcaccaacggaaattatcagtcggtcatggaaacggctggtgattaacaaggaaaaacatatcacccgcaggggatacacgctctgctttctcagtaaactgcaggatagtctgaggcggagggatgtctacgttaccggcagtaaccggtggggagatcctcgtgcaagattactacagggtgctgactggcaggcaaaccggattaaggtttatcgttctttggggcacccgacagacccgcaggaagcaataaaatctctgggccatcagcttgatagtcgttacagacaggttgctgcacgtcttggcgaaaatgaggctgtcgaactcgatgtttctggcccgaagccccggttgacaatttctcccctcgccagtcttgatgagccggacagtctgaaacgactgagcaaaatgatcagtgatctgctccctccggtggatttaacggagttgctgctcgaaattaacgcccataccggatttgctgatgagtttttccatgccagtgaagccagtgccagagttgatgatctgcccgtcagcatcagcgccgtgctgatggctgaagcctgcaatatcggtctggaaccactgatcagatcaaatgttcctgcactgacccgacaccggctgaactggacaaaagcgaactatctgcgggctgaaactatcaccagcgctaatgccagactggttgattttcaggcaacgctgccactggcacagatatggggtggaggagaagtggcatctgcagatggaatgcgctttgttacgccagtcagaacaatcaatgccggaccgaaccgcaaatactttggtaataacagagggatcacctggtacaactttgtgtccgatcagtattccggctttcatggcatcgttataccggggacgctgagggactctatctttgtgctggaaggccttctggaacaggagaccgggctgaatccaaccgaaattatgaccgatacggcaggtgccagcgatcttgtctttggccttttctggctgctgggataccagttttctccacgcctggctgatgccggtgcttcggttttctggcgaatggaccatgatgccgactatggcgtgctgaatgatattgccagagggcaatcagatccccgaaaaatagtccttcagtgggacgaaatgatccggaccgcaggctccctgaagctgggcaaagtacaggcctcagtgctggtccgttcattgctgaaaagtgaacgtccctccggactgactcaggcaatcattgaagtggggcgcatcaacaaaacgctgtatctgcttaattatattgatgatgaagattaccgccggcgcattctgacccagcttaatcggggagaaagccgtcatgcagttgccagagccatctgtcacggtcaaaaaggtgagataagaaaacgatataccgacggtcaggaagatcagttgggagctctggggctggtcactaacgccgtcgtgttatggaacactatttatatgcaggcagctctggatcatctccgggcgcagggtgaaacactgaatgatgaagatatcgcacgcctctccccgctttgccacggacatatcaatatgctcggccattattccttcacgctggcagaactggtgaccaaaggacatctgagaccattaaaagaggcgtcagaggcagaaaacgttgcttaa

SEQ ID NO: 181708 - DNA, 1650 bp, Klebsiella oxytoca
atgtctcaattcttttttaatcagcgcgccaacctcgtcaacgaagtgattgaagggaccattatcgccagcccgtggaacaacctggcgcggctggagagcgatcccgccattcgcgtggtggtgcgtcgcgatctcgacaaaaacaacgtggcggtaatctccggcggcggttccggtcacgaaccggcccacgcgggctttgtcggtaaaggcatgctgaccgccgccgtctgcggcgatctgtttgcctcgccgagcgtcgatgcggtgctgaccgccatccaggccgtgaccggcgatgccggatgcctgctgatcgtcaagaactacaccggcgatcgtctgaacttcggcctcgccgcggagaaagcgcgccgtatgggctataacgtcgagatgctgatcgttggcgatgatatttcactgccggataacaaacatccgcgcggcattgccgggacgattctggtgcataaagtggccggctacttcgccgaacgcggccacaatctggcaaccgtgctgcgcgaagcgcagtatgccgccagacacaccttcagcctcggcctggccctttccagttgtcatctgccgcaggatgcggaaacgactccgcgccatcatccggaccaggccgagctggggatggggatccacggcgaaccgggcgcttcggttatcgctacgcagaacagcgcggaaatcgttacgctgatggtagagaagctcagcgccgccctgccggaaaccggccgcctggcggtgatgatcaataatctcggcggcgtgtcgattgccgaaatggcgattttgacccgcgagctggccaatactgcgctgcatcagcgtatcgactggctgataggtccggcgtcgctggtcaccgcgctggatatgaaaggcttctccctcaccgccatcgtgctggaagagagcattgagaaggcgctgctttccgcggtagaaaccgccggctggcagacgccggtacagccgcgcgcggtcagcgtgatgccatcatcgctgcgcagtacgcgggtggagtttgcgccctcggagaacagcgaagttgcgggctacgtggaacgggtgaccggcacgctgtccgggctggaagcagaccttaacgcgctggatgcgaaagtcggcgacggcgataccggctccaccttcgccgccggcgcgcgcgacatcgccgacttacttcagcgtcgtcagctgccgctggctaacctcgccacgctgtttgccctgattggcgagcgtctgacggttgtgatgggcggctccagcggcgtgctgatgtcgattttctttaccgccgccgggcagaagctggaacagggggcaagcgtcgccgaagcattaaacgccggtctggcgcagatgaagttttacggcggtgcggatgaaggcgaccggaccatgattgacgccctgcagccggcgctcacggcgctgctggccgaaccggataacctgcaggcggctttcgccgcggcccaggcgggcgcggatcgtacgcttcacgccagcaaagcgggcgccgggcgcgcatcgtatctgaacagcgatagcctgcgcggcaatatggaccccggcgcccacgcggtggccatggtatttaaagcgctggcgcagaaatag

SEQ ID NO: 181709 - DNA, 1005 bp, Klebsiella oxytoca
atggcgctaaaactactggcaaataacaatgctaaaagcgtcctcgcgtcaggaattagcgcatctgcaactgttattacagtgagtagcgggacaggtgccttattccctcagcccgtatcaggtcaaagctatttcaaattaaccattgttgatgccgcgactaaattaattactgaaatcatgcacgttacctcagtgtctggtgatgtgatgactgtacagcgagggcgtgaaggtaccactgcaagagtctggtcaacgaatgatattgtggcaaatatgttgaccgcggggtctttcctttcctgcctgcagatcgcaaataatttttctgaaattgcagccgaaggaagtgaggcggtaagacaggccctattaaatttaggctcatctgatggaacacttaacgggcgtctcattggtataaaaatattctccgatagtggtacatatacaaaatcagaaggaacaagacatttaatagttgaaatagttgcaggcgggggtagctccagaactgtctctgctgatagcgcctctactggaggatctcagcctggatttagtgggcaatataataaatcaagatttaatgccagcgatgtcccgtcgtcagtcaatgtaacgattggtggtggaggttttccgggcaacgctggaggaaattcatcctttggcagtctcatcactgttgccggcggatatccgggggcagagggaatgtcatcatcaagagctttcatcttggggagcgcttaccgatacacggggttagtaaacacgtcatcggggcttgtgcttgcgtcgagcggtggggaaacacaatcaccgcaagtgatgcaggttacagcgggcaccgccaccggatttatagcttatccgtcacagttccccggtgggcggtatggccgtggtgctgatggacgttatgcgggtgctggaacaactgcaacaggcctttcaggaaataagggcttctgcattgtttatgagtatgcatga

SEQ ID NO: 181710 - DNA, 327 bp, Klebsiella oxytoca
gtgaaaggcaccgcgaacttcagcgtgtacagcgccagtaaggccgccgtgcgtaatctggcccgctcatgggcgctggacctgaaggcgcgcgctatccgcgtgaatgtggtcagcccggggcccgtccgtacgcccggtctggggggacttgtcgccccagagcaacgtcaggggctcttcgatatgctggccgccgacgtcccgctgggccgcattggcgagccggaagaagtggctaaaacggtggctttcctggcctctgacgacgcgagctttattaacgccgctgaaatctacgttgatggcgggctggcgcagatctaa

SEQ ID NO: 181711 - DNA, 909 bp, Klebsiella oxytoca
atggatcggttttcagcccttaaagtctttacgcgcgttgtcgaagccaacagttttacccgggccgcagactccctgaatatgcccaacgccactctcagtaaagcgattcaacagcttgaatcgcatcttggcgtgtgcctgctgcagcgcacaacccgacgcattaccgtcacgccggaagggcgtgaatactatgaaaaagcggtgcgaattctgaaagatctggacgagattgatgcctcatttcgcgcttcccgcaataagccaaagggccacctgcgcgtcgcggtaggcggctccaccgctcgcgacgtgctgatcccgctgctggctgattttatgacgacctatccggatatccgcatcgatctggcggtcgctgacagcccctcggaccttatcagcggcaatatcgactgcgcgattagaggagggccgctggacgactcgacgctgatcgcgcgcaaaatcggcgaagcaacgattgtgacctgcgctacgccgggctatttcaggctctacggcattcccgcgtatcccgatgagctgaagaacggacatcggctggtcagctatttatctcccgccagcggaagagccttcccgttccgctttctggataacggcatcagtcaggagatcaaaacggaacatcaccttggcgtaaatgagagcaacgcgcatatcgcggctgcggaggctgggctgggtattgtgcagaccttctcatattcgttgagaaatgcgctggtgaacggaacactagtggaaatactcagcaaatggcgcccggccccttatccctttcacgtggtttatgcgcagaatcgccacgtcacatcccggctgcgcgtatttatcgactggctggcggaggcatttccggcagcggtaaaagggggctaa

SEQ ID NO: 181712 - DNA, 825 bp, Klebsiella oxytoca
atgaacaataaacgtgtggctctggtgacaggcgcttcttcaggcatcggcgaagcgacggctcatcaacttttagcggcgggttataaggtttatggcaccagccggcgtggctctcaggcgggtacacaccgctttccgctgctgacgcttgatgtgactgacgatgcttcggtcggggccgctattgacgatctgctgcgcctggaggggcggatcgatattctggtcaataatgcgggctttggggtcgcgcctgccgccgcggaagaaagctctattgaacaggcctggagcattttcgataccaactttttgggcatcgtcaggctgacgcgggctgtgctccctcatatgcgccgtcagggcagcgggcgcatcatcaatatcggttcgattctcggggtcgtgccgttgccgtatgtcgcgctttatgcggccagcaagcatgcggtcgaagggtacacgggagcactcgaccatgaactgcgcacccagggcatcagggtttccgtgatcgaacctgcctacataaaaacgcagtttgaagccaataacagagaagcggatgcaaagctggaagagtatgaccttatccgggctaagctgacgaaagtggtcagtaaggcaatggccgaagcggaaagtccggaggttgtggctaaggtggtggttaaagcggcccaggctctacggcccaagatccgctacacggcaggatcgctggccggtaaattgaatttcattctccgattcgcgcctgcaaaaatcctggataaggtcgtgcgcaacagccttcagcttgatgcgagagagtcatcatga

SEQ ID NO: 181713 - DNA, 141 bp, Klebsiella oxytoca
atgactgcctatcagccgctccgaatggtttattttgcaggcaacgaaatccagttctgcaaatttaaccagcaggcattgggatcgggtctgaaaacgataacttttctgattaaacttttattcttcctgcgttgttaa

SEQ ID NO: 181714 - DNA, 372 bp, Klebsiella oxytoca
atgcagcgcatcaatggcaacatcatccccgcgcctcaccgggagcgtggcaataaaccagccgctggccgcctccgccacaccggccatcgtcatacgctggccgcgcgtgatggtcgcctcatgcgtcaccgggcgcaacacggtatccgcaataccgctacggtagtccagcaggcgggggaatctggtcacggcggtggtgataccggcgatgacgcgccagcagacggcaatataaccggtctgtgccgccacggcgtaaaaatcccctttcgagtagttgccgtcagaggtcacggactgcaacacagagacgaaccggcgcgaagggtcggtctgtaccaggacaggaatcacttccgcgcgtga

SEQ ID NO: 181715 - DNA, 813 bp, Klebsiella oxytoca
atgagggaaaactattattatggtcagggtaaggtgttcctggcacccagagataataaacgcgcattccgatgggtcggtgatgtttcaacattgaaaatagcgttttcgtatgagcaacaaataacaaaagcatcacgtggcggacagctctatcagaatcagaggatcattaccggagccagcggctccatcagttcaacctggcataatttctcggttgaaaatctggcgctgttattgggcgctcaaccggtggacgaaccgttttcatttaatgagcagttcgccttacctgatgggatcgtgaaaggggatattatcgcgttgccccataccacggtttttaacgtcagtattaacgggctggaacgtgatgctgattatgttgttgaccgtcagtttggcaccatcgagtttcttgaaactcccgaatctacgggcctgattgcggcatatgagcacctatttaaccagtggctaccatttttctcagcaaaaactcaggagttttatttacgttttcaggggttgaatcttgcagaaggttcggcacctgtactgctggaactgtacagagtttcttttgatcccctggcaacattagaaatgattagtagcgggacggacatcgcaggtatggatatgacttcgttgatcctccctgattttaatcagcagacaggaacggttttcagctatttcggcaaactacaggtagttaactctcaatcaactcaaccaccgcagtcacccctgacatataacgggcgggctaagtatgacggtcaatatcaataccgaggtaagtaa

SEQ ID NO: 181716 - DNA, 2709 bp, Klebsiella oxytoca
atgggcggtaaaggttccaaaaaagtcaccgttggatatcgctattcctgggacgtacaggcggggctggggcgcggtccggttaacgaaattgtgtcgatcatggcagataaaaagacggtctttgccggtactccggggcaaatttcatccagcacctcggtgtacatcgacaaacccgggctgttcggcggcgatgataccggtggtgagggcggcatacagggtcaactggatatcatgatgggagaaccggatcaggtaccaccggcatcgctcctgaagttgctgacggggctggtgccggggttccgtggcgtggtgaccaccttcttcagtggtctggtcagttgctacagcgccagccccaaaccgtggttataccgggttcgccgcaccacaaaaggctgggacggtgatgtctggtacccggagaaagccactatcatgcttgagaataccgagggccagctggatgacgagagcgatctgctgccggagcagattgccaatcttcgggccattcatgccatgaacccggcgcacatcctggtggaatgtgccactaatcgcgactggggacgtcagctgacactcgccgatgacctgaacctcgacagttatcgcgccgctgctgatacgttgtatgaagaaggctttggcctgtgcttccgctataaccgtcaggacgggctggatacgttcgttcagcaggttttagatcatgtcggcgcggtgcagtatgccgacctcgaaaccggcaaactgaccctgaagctgctgcgcggggattaccgtgtcgatgacctgccgctcttcacctacgataacggcattattgccgttcaggatgacgacagcgccagcaccacgtcgaacccgaatgaaattgtcgtgacctggaatgaccccgtcacaaatgccgatggtgaggtccgggcgcagaacctcggggcgatacagaataccggacttaacagcagttcggtcgagtacaaagcgatccccacacattcacttgccgcccgcgtagcccagcgagacctggagacggcccagtctgaactgacccgtctggtcatccagttcgaccggcgcggcggaattctgcgcccgggtgatgttttccgcgtccagttgcccgaccgtaacatcgacaatatggtgctgcgcgtgggaaaaatagaggaaggtgataccggcgtcctgacgctgactgtggttcaggatgtttttggcctcccatccacctcttacagctccggacaacaggacagtggctggacaccgccggataaatccgcccgacctgtcaccatccagcggctgattgagctgccttatgctgttctggccgagaccgtcagcgaggctgagctgaactatctgaaacctgaatccggctatcctggcgtgatggccatcgcaccaacctcactcagcatcaactatctgctgcagacccgcgcagcgggagcgacgttcgccgaccgtggccagggtgactggacaccatcaggaacactgacggctccagtcgggcgactcgataccgttctgcatgtcagcatggccattttcccggccattggtgatggtctgatgattaatgatgaaatcatgcgtgtggacgcggtcgatattcctgctggcaccctcacggtcgggcgtggttgcatggactccctcccgtcagggcactttgcaggggacaggtgctgggcgtatcaggatgcgctggactcggacgggctggaatacctgtccggtgaaacggtggaggcacgtttgcttacccggaccagcacggagacgctggcagaatcagccgccccggtgaccacgctgaccatgtccgggcgtcaggccagaccgtatctgcccgggaatatccgtgtgaatggcgtcctgtatcccgatgtggcggccagcgcagataactttactctggcattttctcatcgtgatcgcctgctgcaggccgaccgcctgattgactgtaccgaaaacagcatcggccccgaacccggtacagagtatgtggtgaaacttattgctcagagcaccgggagcgaggtctggtcgttggccaccagtgacgccagcatcccgatcccctatgtcaccggtgatgatgatgctgatgtgcataccctgacgctgcagagccgccgtgatggactgatgtcgctttatacattccgggcgggactgccttcaggtcgttataaggcgttcccgatcaccgtcaccctgtccctgactattgttgatggtagcaactggtccacggcaacaccggaagataccaccaccggtgcagtgccggagctgcacgccattgctgatgcctccggagtctctgcctggtatccacccgacctggtggccagcggtctttctattcctgctgatgatattgaatggccagccggtacctggccgacgtcgccgtggtcgttcggcccccatcctgttctggccatcgctctgtggacggaaaccagcgggccactgaccgtgctggcgctggaaggcgatgcctctgcgctgcttctggattcagcaaccggggcggcagcggctatcgaatgggacgccggtatttatctcgcagaaatggatatcactattttcacggcaggcagtcccgttttgaacgagggcataatctccctgaaactgactgaacggagtatcgggccatga

SEQ ID NO: 181717 - DNA, 204 bp, Klebsiella oxytoca
atgttgataacgatggagcatattcgcgccggtggcggctgtgcatgggggctgcggaccttttttgctcgctataacctcgacctgcaggcgttcattcgtgatggtggcattgattcagacctgctggccggaaccggcgacgcgctggcgattcagatcgtcgaactggcgcaacagactcagaaagaagcgggagcataa

SEQ ID NO: 181718 - DNA, 234 bp, Klebsiella oxytoca
atgtggtgggctgtagctaaattcgtggcggttctgattgcatcatatgtgatcaataccgcattagcgccgaagcagaaaaactccacgccggaagcagccactgaggatgactggaatatgcccatgcccgatgagggcaccccacagtgcgtcttctttggtgactgctggacggctgactggttcgtcctcgggtacggcaattatcgctatcaggccatcaaaaaataa

SEQ ID NO: 181719 - DNA, 816 bp, Klebsiella oxytoca
atgagctggagtgagtttgaatattccgtcgccgatggccagccgctgacgctgtatgagttccggctgggcgacagcctgttctggcgttacagcaacgccgacaaagacattgattttgctggtcaggtctgggaggcgcaggccatcagcaacagcggcctcagttccggaagcggtgacggaatggatatcactgttccggccagcaatgcggtggcgctgctgtttcgtgccacgccgccttcgcgggccgtcagggtgcgggtgatgcgctggcacgcaactgatacctctggcgagtttcgcgtcgtctggattggggagatcagcagcgtcaaacgtgagcagattgaatcctgcaagctgatcaccatcagcctggccagcacgttctcccgggtcggacttcgtcttacctggggacgtcagtgcccgtatgcgctttacgatcataactgccgtgttgacccgctcgggtttgcgatcagtgatgtggtggtcaccgccctcgatggctcctccattaccgtgaacctgcctgctggccttgccagcgactggttctcgggcggttacattgagtttgaccgcaacggatataccgagctgcgtggtctgcgggcccaggatggtaacacgttgcatctttttggcggcacaaccggtctgcaggtcgggcagtccgtcacgctttacccgggctgcgaccgcacgattgcgacctgcgacagcaagtttgccaatcatctgaactatggtggccagccgcatatgcccggtaagtcgccgtacaccattatcaaactgttttag

SEQ ID NO: 181720 - DNA, 1185 bp, Klebsiella oxytoca
atgacaacgttatttccctggctggcagaccccgactggtcccgtggcgtgactgagacgctggagtggaagaccgatgtgctgcagtcgccaaccggcgctgagcagcggatttcccgtcgactatcaccgcgccggacgtttgagttcacggcaatgctgtatgacaccgcccgccagcgcttcgaacatatgctctggcagggctgcgcgggtacctgggctatgccggtgtatccggatgtttatgcgctgccggtagcggtgtccagtggcgcgaccgcgctctccattccgaccgccgggcgtgacttttctgttggcggaacggtgttgctgaaaaccgatgagtcccctgatgcaaccagccggatggccactgttgctggtataaccggggatgccctgcagctggtatccccgctgaccgacagctggcctgctggctcgctggtgtatccggtgcgtccggcagtgctgacagagccgccgtcgctgtcccgtctcactgataccgcgacgaccgcacaggtgcgcttccgcatcgcagagcacaatgccttcagcgatacgccggtgctcacacagtaccgtggccacccggtgcttgagtccgaaaccgactggggtgagtcggtcagcagcagctatcagccgctgagccgtgagctggataacggcagcagcgtgccattccgcattgatactgcaggtcgtccgttctggcggcagacgcacaactggttcaccgctaaccgtccggcacagacttccctgcgccagcttctttggtacctccgggggcgtcagcgcccgatatgggtacccgggcagacgctggacttttccccgacgtccgccatcagcggcaatgctgttgatgttgttgaggcgggctttactgaactgggcatccgcccgggtcgccgcgatatcagcattctgctggcggatggcacccggcattatcgccgcatcaccgcagtaagtctggtcagcggtgcggagcgtcttgcacttgacggcgacgccatttcagcaggccagcaccagattgtgtccatttccctgatgaccctggcccgccaggacgccgacagcgtgtcctgggagcatgtgaccgacgccgatggcgtggcccggattgccacaacttttaccggagtacgtgatgagctggagtga

SEQ ID NO: 181721 - DNA, 3501 bp, Klebsiella oxytoca
atggccgataactccaccctcaatttaatgcttaaaatccgcgccgacctcgcggacgccagccgtgccctgcaggggctggccggagatgtggaagacgttggctctgcagcaacaaccagctcgcagaaactcagtaccactgcccgggcacaggatagcgtcgccgaatcagcacgtagccacgctcaggcagaacagaacgccgccgccgctgcgtcacagaccggcgatgcggcccagcaggcggcgacagattatgccggttatcaggcagcaatcgcccgcacccgggctgagatgggctcgctccagaatggtatggacggcaccacggcagatattgatacccagcgtgctgcgctgaccgccctggtcaaccgtatcgatccggtcgtcgccgcctatggccgactggatgacatgcaggagcagctgagtgcattccgtggcgcgggtctcgttggtgatgatgatttcgagcagtattcctcgcgtctgaacgaactgcgcctgcaggtggaaaaatccgctcatgccgcgtccgatgccgggcgcaaggaagcggctgcagcccgggaagccgcacaggctgaagcacaggctgcggccactaaagaacagttcatcaaccggctgcgcgagcaggccgagaccatgaacctgaccaccgccgagctgctgcagtataaagcggcacagcttggcatttcggcggaagctgcgccgtttatccagaagattaccgaccagaacgccgccatgagtaaaggcggtatcagcgccggtcagtatgctcaggccatgcgatacctgccgatgcagataaccgacgtcgtcacctcgctggccagtggaatgccggtctggctcgtggccattcagcaaggcgggcaaatcaaggactcgtttggcggcgtgggcaacacctttaaagcgctcctgagcatcatcactcctgcccgtttagcgatgggagggctggcaggtattgttgctgctgcgggcattgcagctgtttcggcgatgaatgaccaggatgaattcaaccgctcgatccagaaaaccggcaactatgccggtgtaacctccggcgaactggaacagatggcgcagcaaggtggccagttgcgcggtaattacagtcaggtgcgcgatatcctgaatgggttggtcagcagtggtcggtttactggcgaaacgctgacctcagtggcccaggctgcgacattgatggcggaactgtcaggcgactcggcggatcaggtcgtgtcgaacttcctgaagatgagcgacagtgcaaccacgtgggccgccaataccaatcagcagtatcactttctcgatctggagacctatcagcgaatcctgagcctggaagatcaggggcgaaaagaagaagcgattgagctggcctctcaggcatttaagaaggcgagcgaagaacgccttcgcacaatggagcaacagctcaaccgggcggcgagagcatggaataatgtaaaaattgcggccactggcgcatgggaatcgtttaaagataaagccggtggtgctcttggtttggatgctccggctgacgaactgacagataaaattaaggaattagaagccaaaattgcagctgcgggtagtgatactgaggttgccatgcagcctcgtgaataccaggagtcagtgaagcgatacaaagaggatctggctgcactgaaggaaaagcaacaagctgaagaaaaagccattgcagccgaagcaaagcgcaaacaaaccgatgctgagagcattgctgcagccgagaaactccagaaactctggaaaggcaaccgctccgagcttgaaaaagaagccgacgcggtagaagaaacccgtaagaattatgaaacgttgtggaagagcgccagcggtcgggacatgcttcagtcccgtggcgtcacttccaccgacggtaaaaacttttccggcggtcagtgggataccgacacgaaagcgctggataaatctggccagaaggcggagcagtacaacaaacagctgcagcagacgctgaaccagaaaaaagccatcaccgagctggaccgcgtcgaggctgaaatccgcaacggcacactctctagtgcgaccaaagcccagcaggatgaagcccgggcaacggcgaaaaaaattgacgcagccaacgcggccaataaggcgacaaaggaaggtcagtccctcgccaaacagcaagaaacctccaataaaaacttcgtcaaacagcttgaggatcaggcagcaaaacgcactcagggtgccgcagcgacccgcgcccaggagattgccacccgcaacctgaccgccgagcaacgtcgccaggcggaagcagccaacgccgccatcaccgcccaggagtttaaggggcagaacatccagctgcagctggagtacatgcgcgataccggcgacaccgctggcgcatcgatgctcgagctgcagaaccgcgtatctgacctgcgccgcgagtttgaagccagcggtaacacagaggggctgaactggctcgataagctgttgccggtcgcggaaaccaaaatccgcgtcgatgaccttaaaaagcagctcgacgacctgttcacctggcagtcccagcaggaaaccagcattcaggcgcaggttcagggtggtctgctcaatgagattcagggacggcagcgcctcgttcagcttcaccaggaagttggcgacaaaatcaagggctacctcccgcagctgaaagagatggccaccgcccccggtgaagccggtgacaaaatccgggagatgatccgccagcttgaagaagaactcggcaagctgaatcaggcgggtaatgagctgactcaggcattccgcgacggtctgcagagcggtatcgaaagctctctgatggggctggccaaaggcaccatgaacctgcgtgatgcggtgaaaaacctcgccctcaccatcattaacagcatggcacagctggcggcacagcagctggcgcagatggcgacgtccagcctgatgggagcttcaggtggtatgggcggactgatggccagcgtctttgccgccgatggcggtcaggttcgtggtccgggcagcaccacgtccgactccattccggcgatgctctccgaccaggagtttgttacccgcgccgctgtggttcagcagcctggtgcgctggactttctgcacgcctttaaccgccacggtatggctgcggttgaaggctggctcccgcgcgttcgtcatgccaccggtggtctggcgggcatccccgcgcagaatatgccggtcccgacctccgtgcctgaaaccgcgatggccacacccgccgctgcgtcgcagcagcccatcagcctgcagcagcaactggtgctggacccgtccgaggtttataccgccggagcgcagacgctggctggccagcgccagttcaccacgtcgctcaaggcgcaggtgccgaccctgaaacaatggctggggctgaataaatga

SEQ ID NO: 181722 - DNA, 483 bp, Klebsiella oxytoca
atgaacaagcagaaacccgccgataccgaagacgagctgagcgtgctgctctcgacccgcaatatcaccattgcgggccgggggctggttatccgcgaatacaccctggtggatatgctgcagctgggcgacaaactggatgcgctcacccacagcctggcggaggtcatgcagacaccgtggcccctgattgaagagattgaagccgtgctgcgaaagcacgccggtgatatccctgaactcatcgcctgttctgtggaccagcccgtgcagtgggtggcgttgctgcccgccggtgaaggccagagcctgattgactggtggtggacccagaaccgccgtttttttatgaacgctgtcgtccggctggaaaccatcagggcaacacgggcgaaattgtcggcttcggcagcatcttcgcaaccctcatccgggccggacacgacccgggcaggctcggaacctacaccctccgccagctga

SEQ ID NO: 181723 - DNA, 753 bp, Klebsiella oxytoca
atggcacagcttgaaacctactactacggccaggggaaagtgtttctggcccgtcgtctggctaacgggaagcccggtgcattccgctgggttggcgatgtgtcggccttatcgctggcgctgacggttgagcgtcttaaccacaaagagagttattccggacgccggggcacggtgcgcagctttgtcaccaaccaggacggtacactgacgtcaacctggcacgatctggccccggagaatctggccgtggtgctgtacggtgagcaggttgtgatccccgcaggcaccatcaccggcgaacttctaccggcaggtattacagcgggtgaacgctacattctggaccatcagcgtgtcagtgacgtggttatcggtaccctggtggaagggatcgactacgaagtggattacacctatggggcgatcaccttcctgaccgctcaggcaacggcaccgtccgtgaattataagtatgcaggctcggtcaacaccacactgttcacgcagcagccggaagatttttacctgcgtttcgaggggatcaaccttgccgaaggcggtgcggcgaagattctggagctttacaaaatctccttctccccggcctctgcgctggcgctgattcagggcgacacctcgctggccgggctggaaaccacctccaccgtgctgtatgacaatgcccgtccggacgacccgaccatcggtcgctttggccgtgtcattgatgttgcggagcctgtcgcatga

SEQ ID NO: 181724 - DNA, 204 bp, Klebsiella oxytoca
atgcccgacgtaaaactcctgcagccgcatacccatcagggtaagcgttttgcagccggtgaaaccatcaccgtgaccgaagccgaagaggtctggctccgggaccatcaacttatcggggttgccactccggtcgtcagcgacactcagggcaaccgtggcaaaagcaaacaacaggagccggaagacaatggcacagcttga

SEQ ID NO: 181725 - DNA, 447 bp, Klebsiella oxytoca
atgagcagcgaaccgttttccatcagtctgatcgtcgagcgcctgcagccactgacgccgtccccgctgagcttcctcggcaccatcgtcgaatacagccaggtaacggagttatccggttttgcggtccccggggcgtatgtgctgatggggcctgagcgcggtgttccggggaacgggagtcgggcacaggttgccgaggcggtcttcggcgtggccgttgccgtgcgcaactatggtcagggtgcagacggtttgacccatgaaatcagcccgctggtcggccagatacgcgaccagctgattggctgggtccccggcaagctcgcgaccaccggtatccagtggctcaagggcgacattctggactatgacggcagtaccctgctctggatggataccttccaggtcaatcatgttatcggaggcagacgatgcccgacgtaa

SEQ ID NO: 181726 - DNA, 525 bp, Klebsiella oxytoca
atggccgtgacctggtatatctcccttgctgaactggctgaccgcccgggtgcggtcgaactgtctcaggtgactcagcttccgggcaagcctccggcccgaccggagctgctggatgcggtgttgcgtggggaagagaccacgtcatggcctcctgctgaagtggcggtggcccttgaggtggtggagcgcattggcggtgcggtggaagaagcccagaacctgattgacggttatctccgccagcgcggttacaccctgccgctggtgaaggtccatccgatcctgagcagctggggccgctccgttgtgcgctacaagctgcatcagcatcgtatttctgatgaacggacagacccgattgtccgtgattaccgcgatgcgatgaagttgatggagcagctggctaacggcaaattcagcctcggcgcgaccgatacgcagaaacccgctggcggtccgccgatggtggatggccccggtcgcacgttcagcatggactcactgagggattacggaaaatga

SEQ ID NO: 181727 - DNA, 930 bp, Klebsiella oxytoca
atggccaaagcaccgtttccgattgacccccacctgacggcgattgccatcgggtaccgtaacctctccctgattgccgacagcgtgttaccgcgcgtgccggtgggaaaagccgagtttaaatggtggaagttcgatctcggtcagggcttcaccgtaccgaccaccaccgtcggacggacgtcacaacccaatcagattgagtttgatgcagaggatgagacctcctcgaccaacgattacgcccttgatgccccggttccgcagtccgatatcgacaatgctccggccaattacgatccgctgggccgtgcgaccgagcgcgtgtccgatatcatcatgctcgaccgcgaagttcgcaccagtaaagaggtgtttaacgcggccaattaccctgtgggtaataaagaaaacctggctgctgctgaccagtgggacaacgacgcgagcaaaccgattaagaaaattgtcactgcgctcgacaagatgatcatgcgcccgaacgtggcagtactgggacgctctacggcaacagccctgcgtcagaacccgtcggtcgtgaaagcctataacggcacactgggtgaagatggcctggtaccgctggacttccttcgcggcctgctggaactcgacgaaatcgtcgtcggttcggcgttcgtcaatatcgcccgaccgggccagaagccggtactggtgcgtgcctgggccaaccatgccgcctttatctaccgtaatctgctggccgatacccagggtggcgtgaccttcggctttaccgcgcagtttggctcccgtgtctccggctccattcctgatccggacatggggatgcgcggtggccagcgcgtccgtgtcggtgagtccgtgcgcgagctgattgttgctcaggactgtggctacttcttccagaatgccgtatcggcataa

SEQ ID NO: 181728 - DNA, 381 bp, Klebsiella oxytoca
atgaatattccgggtctgatcacctgccataaggcagaagtggcactggctgcgcgtcgtatggtcacgcatggcacggtgccggacgaaatcactctggccgtcgatggcagcaagctgattatcggtgtcaccaccctcgttgctgccagcgtcggggaacccgccgatgtggttcgcagccagctgaccccggttatctatggtggtgatgttgtcgccggtgacccgctgacggctgatgctgacggtcgtgcaattccggctacagcgggtcaattctatctcggctttgcggagtatgacggtgccgaagacgatctcggttctgtctggattgcaccgggtcaactggccgctgctgcagccggtggcggttga

SEQ ID NO: 181729 - DNA, 1125 bp, Klebsiella oxytoca
atgacgacgagcacagctaaagcaacacttgcggtttttgcccccggcacccacaccgcgatggatggacggaccatcacgttcacccctgaagactgcattgatctggccaacagctacgacccttcagtatcggaagcaccgtttgtcatcgggcatccgagcctgaccgctccggcgtatggctgggcggaacgccttgagtaccgtgacggcatcgtctatgccgcgccgcgtcaggtgaatccggcctttgcggaagccttcaacgcgggcagctacaaaaaacgctccctctctatttatcagcctgacagccccggcaacccgaaacccggtcatttctatgcccgccatgtgggttttctgggggccgtccctcctggcgtcaaagggctccctgatgcgcagttcgcagaggccagcggcgataacggcccgctggagttcgcgttgccgtgggaagccgacaatctggccagcctgtttcagtcgattcgcgactgggtgattcaggagacaactatcgagcaggccgattccatcattcctcagtggcgtatccagtcaattctggactcggccaccgatgaacgtaagtcaatctcaccactggcatatgccgaggagaccaatgtggacccgaacaaaaagacccccagtacggcgacggatttcgccgaacgtgaagccgcgctggcagcacgtgaagccaaactggctgcagacgaggaagttgcccgtacccgacaactggaggaaaaacgcactgccaccgtggcgtttgccgatggtctggttaagggcggtagcattcttccgcgccagaaaacagccattgtcgaagtgctgatgaacctgtcccaggagccgctctctttctctgaaggggagacgactatcagtcagtcgccggaggcactgctacgcgagatcctcagcactaaacctgccgtcgtgaatttcagcgaaaaaaccggcacggctgatgatcctgtcgatttcgccgatgcttccgctctggccactgccgcacagaactatcaggcagagcaggctaaacagggtcgcaccatctccatgacggacgccgttaaccacgtgaagaaaggagcccagcaatga

SEQ ID NO: 181730 - DNA, 561 bp, Klebsiella oxytoca
atgtcgggtgtgacgctgacgtttgatgctcaggatgcgctgagccgactgtgggatgcccggaccgaaatgatgcgcccggcaccactgctgcgttcaatgggagagcgcctgctggagtttcaccagcagcgtttcacggagcagacatcgccggagggcgtaccgtggcaggaactgtcggcccggtaccagaaccgtaagcgaaaaaacagggacaaaatcctgacccgcgacggttatctgcgtaacaccctgcgctggcaggtgaatgctgatgaactgctgttcggtacgaaccgggtctatggtgccattcaccagtttggcgggaccatcgaaatcgccgcccgcagtcagcaggcgtattaccggcagaagaaaaacggcaagattgccagtcagttcgtccgtaagtcgaaatcaaactactcacagtggcacaccattccggcctacaaaatcacgatccccgccagaaagtggctgggtgtgtcaaaagcggaaggggaaacccttatcgatatggcgaaaaactacctgcagggggcgtttaactga

SEQ ID NO: 181731 - DNA, 1218 bp, Klebsiella oxytoca
atggccggtaacgtcagctatggctcgctgccgttcagcgagcagatcgccttcttccgtcgcaagttcagtacaaagaccgatgcctggacagacgtctatggctccgcacatgacaatgagtttatggttgccggagccaaccgcgatgccctgctggcagacctgcgtaccgcagtagagaaaagtcttgacggtggtacgctggaaaccttccgcaaggattttgcggccatcgttgcgcggtatggctggagttataacggcggctttgagtggcgctcccgcactatttacgagacgaacctgcgcagcgcttacatggccgggcgctaccagcagctgatggacatgcgcggcacccatccgtactgggagtatgtccacagcgatgcagtggagcatccccgccaggagcatctgggctggaacggtatggtgctgcgggcagatgacccgtggtggatttaccatttcccgatcaatgcctggggctgtcagtgcagtgtgattgcccgcaccgaagacgacctgcgacgcatgggcaaagacggcccggatactgcgcccccgattaaattcatggcccgcgtgattggtcagcgcagcccgggtggcccgaggaccgttattgtgccggaggggattgacccgggctttgagcataccccgggtcgcagccggtatttcagcgaggtgcccccaccccggggcagtaacccggtcggcgacggaccgttcaccccggtggcggaagcgccagccacagcggcaccgctgccagctccccgtccggctccggtgcctgaaggcgatactgatgcggtggacgccttcctgaagctgtttggcgcgaccgctgatcgcgatgcagcattcagggacccgacgggccagcgcattgccattggcagcgacatgttcatatcgccggaaggtcagggtcagataccgctgacactggcgcaggcgcttcagctggccgaggctgtccgtcaccccgatgaaatatgggcgcagattgtctggttgccggaagagcagcagtcgctggtgaggcgctattacctggcacgcctgcagcaggaagatgaagcggacccactgtcggtggtgttcgcgaccgggcgcgatggctgggccgggaatatttcaactgacgatacgctgctgcagtcactgcgacagggtatcagcctgtggtcgcgggaggactga

SEQ ID NO: 181732 - DNA, 1521 bp, Klebsiella oxytoca
gtgagtcgcaaaaaacaaaaaagacaaatgccatcaaaaccctcatccacaccgcgtcctgaactggggcgcgagtttgcctcgaccggtgacggccgcgatatcacccgcccgtggattggcgcgctggcgttatcagatgacagcgttctgcagcatcgcggcgcacctgacctgaagatttaccgcgaggtactgagtgacgacgaggtcaagtcggccttcagccagcggcaggatgcgctgatatcccgtgagattaaggtcgaggccggaggcgagcgcccggtggatatcgaggcggcagacgccatgcgccagcagatagacgcgctgggcttcgatcgcatcacccgtctgatgcactatggcgtgttctatggctatgcggtatcagagctgatttatggtgtccgggataatttactgtggattgacgacattaaggtccgcgaccgtcgccgcttccgtttcagcccgaaaggcgagctgcgtctgctgaccccacagaacatgatggccggtgagccctgcgaggggccgtatttctggtcattttccaccggcgcagatcatgatgatgaaccctacggtctggggctggcgcactggctgtactggccgacgttcttcaagcgcaacgatatcaagttctggctgattttcctggacaagttcgggatgccaaccgtcgccgggaaacaccccgaaggggccacgcaggaacagaaacgtaacctgctggcgctgacccgtgccatttcgaccgacagcggcgtcattatgcccgaggggatgagcgtcgaactgatgtctgcagcccgttccggtgccgctgactaccaggcgatgtacaacgcgatgaatgaggccatccgccgcgtgacggtgggtcagatatccagttcaggtggcgcggcaaaaggtatcggtggtaacgagtccctgcaggacaaggtactggactccatcgtcaaggctgatgccgatattatctgcgagtcctggaaccgggggccgggcaaatggtttaccgagtttaacttccccgatgccgcagtacctgtggtgtcccgtgttttcgaagaggcggaagatctgaaagaccgggctgagcgcgacaaaaccatcagcgagaccactggctatcgtccgacgctggccaccattaaagagacctacggcggcgagtgggagccgaagcccgagccggtatcatcttcttccccccgggtcgctgcgccgtcgtcattcgcggaacatgacccggaccataatgatacgtccacactgatggccggtcgccttaataccgaactgcggccggtcatggacggctggatcaatcagataaaagcgctggttgactctgcagagaccgccgacgaactgcgtgacgggctgacggcgctgatacccgatatgtcgcttgatgactatgcccgtattctgggtgaagccatgtccgccgctgccctggcaggacgcaacgatctgctggaggaaatgaatggccggtaa

SEQ ID NO: 181733 - DNA, 1683 bp, Klebsiella oxytoca
atgaaaccattagcgtccactatccgtaccgttgaatgggatgagcttccggcgcgggcccgggaaatcccgttcggcttcaacccgtttgccgacggtgtgctaatggcccaccaggtggaatgccttaagtatgacgtttctattctggctatcccgaaaggccgtcgtaccggcatcacctttgcctgggggcttaactcgaccctgatagccggggcgcagaaagccgctggcggcgacaacgtctactatattggtgataccaaagagaaagggctggagttcattggctacgtggccaagtttgcccgcgtcatcgcagcccagcaggcgcaggacgtctcagcgattgaagagttccttttcgaagaccaggacgaacagggtaatacccggatgattgcggcctatcgtgtccgcttcgccagcgggttccaggtggctgcactctcgtcccgtccggccaacatccgtggtcttcagggcgtcgtcattatcgacgaagccgcattccatgctgacgttcagggggtactggatgcggccaccgcgctgcttatctggggcgggcgtattgtggtcatcagctcagagaacggcaaaaataacccgttccaccagttctgtaaggatatcgaagaggggcgctacggtgacgatgccgccgtgttacgtatcaccttcgatgatgcagtgacgaatggcctgtttgagcgggtctgcgccatgaagggggaaacggcaaccgtcgaggggaaaaagacctggtataaccgcatccgtaacgcctatggcccgcgtaaagcggcaatgcgtgaggagctggacgccatcccgcgtgacggtaacggtatctgtattcccggcgtctggatcgagcgggccatgccggaggaacggccagtcatacgtctcgcgctggatgatgactttatccatatgaccgaggcagagcgagcggcctggggtaatgactggattgacagggagctgcgtccggtgatggcagagaccctgaacccggaactgcgccacgtgtttggtatggacttcgcccgccaccgtcacttttcctccatcgtaccgatggccatcatgcagaacctgtgtcgcgacgtcccgttcctgctggagctgaacaacgtgccctcagcgctgcagcagcagattttgttctggatcatcgagcatcttccccgccagtcaggcggtgcgatggatgcaaccggaccggggatggtactggccgagtataccgccgaccgctatggccgcccgcgcatcgccgagattaccctgaaccgcaagtggtacggcttctggatgccgaaattcaccggcctgtttgaggacagcatgatcatcctgccacgcgatgagaacacggcgcaggacctgcgggccgtggaaaaaatcgatggcgtgccgatggtggccagtctggagaaaaaagacctcaaagaccccgaactggtgcgtcacggcgatacggcaattgccggttgcctggcgaactatgccgccctgaatctggccactgagatagcatttgagtccaccggtgagcgcgatattttccgcgtgctgtcaggcttcggcgacagcagcagcgcaggtgaattcactgacaccgggttcggtaccgtgcgtggcattaatgactttggaggattcctgtga

SEQ ID NO: 181734 - DNA, 549 bp, Klebsiella oxytoca
atgggaagaaagtccacgattcaccgtctggagcctgacgtccgcgcccatatcgagcgccgtctgcgggaagaccgcatgacgctggatgagctgctggccgacattcacgagcacttcccgggcgaggatgcacccagccgcagtgcgctgggtcgttataagcagacgtttggcgaaatggtcagtcgcatgcgcgagcaggaccagatggcccgcctgctggtgagtgagctgggtgagaatcccgacgaacgcgccggtgccctgatggttcaggctgtcaccacgctcaccacccatgccgcctttaccgcccaacaggaagaagatccggatattgatacggtgcgccaccttgcccgggcagcaaaagacgtcctgcagtcgcgtaaggccagcctcgatgagcgccgcgagattgagcgtgccgcccgtgagcggctgctgcgcgagcaggaagagaatctgaaagagacggccagagcgcagggactcagcgaagaccaggtgcagttctggcgtgagcgcgtgctggggatcaagtga

SEQ ID NO: 181735 - DNA, 297 bp, Klebsiella oxytoca
atgaactttgccagttttttgcgtgaggaccagcgcctcgtcatgctgcgttttttatccgaaatgccgagctacagctccaacagttccgtcatttaccaggcactgacccgctatggccacgcccccagccgcgatcagattaaatcagagctgcgctggcttgaagagcagggtctggtgacggttgaagatatcgggacggtgctggttgcccgtctgaccgaacgcggcgctgatgtggcagcgggtcgggctattgtgcctggtgtgaagcgtcccggcgcggggggctga

SEQ ID NO: 181736 - DNA, 303 bp, Klebsiella oxytoca
gtgggaataaatgaactgagattcgactgggcatttttgcaatgggcagtgatggcggtggtcggtgtctatacctggctgattggtcgccagtccgccagtcagaaggaattgctggagctgcgcacccgcatcaccaccgttgaggcgcagattaaatcggtgccaacgcagtcgcaaatcaccgaactcatcgcaaaactgagccgtactgaagcccagatgcatgggatgcaggagcagatagcggccacctatcgtcgtactgagaatattgaagcctatctgctgcagaagaaataa

SEQ ID NO: 181737 - DNA, 450 bp, Klebsiella oxytoca
atgacgtcgactgagtgggtgaaagtgatcgcccgttacctgctatggggagctctgatactggggtcagtctggtttatctggcatcagggatacgagcgtggggaagcggatgtgcgcattgaggtcgcgaatcagaagactcagcaggccgccgactccctgaatcagtttatcgacggagccaggcaactgactgcgcaggcaaatcaggccagcacgttactggcacaacaaatcaacgcccgccagcaggcggatgaaaaatccacggaggccattcgtgaggctctcaaaaagaacgctgccagtcgtgctggttgcaggtttgatgctgacgtcatgcaggaactcgccggagcccgggagagagcagcaacagccgcttcctcgggtcttgccagcgaggatggccgtaccatgccctcgtccggtgtttccggcaagtag

SEQ ID NO: 181738 - DNA, 633 bp, Klebsiella oxytoca
atgatccgactcgcgctgtccctcgtcctgctttgcctgctgagtggttgccatccggtctttgcggccagcattccggttgaggcccggcaataccagcgcgagctgacccgcaatgcccgtgctgtctgggggcttaatgcccctgtatccaccttcgctgcccaaatccatcaggaatcacagtggaacgcccgggcccgttcgccagtcggggcgcaggggctggcgcagtttatgcctgccaccgccagctggattgccggtatttaccctgagcagctgaaagaccatcagccttacaacccgtcgtggtccatgcgggcgctggtgcagtacaaccgctggcactggcaacgtatcaccggtaccgccagcgactgtgaccgcatggcttttgcgctgtcggcctataacggcggtctgggctgggtccagaaagaccggaagctggccaccagtcgcgggctggatgccagtcgttactggaaccaggtcgaaaaggtgaatgcgggccgcagcgctgccaactttcgcgagaatcggggttaccccctgaaaatcatctacacctggcaaccgctctatctggcagcgggctggggaccgggagaatgcaatgacgtcgactga

SEQ ID NO: 181739 - DNA, 411 bp, Klebsiella oxytoca
atgtcgttacttcacaaggtccgtcaccagcggctgcgcaactggattatccttgccgtggccctgctggctgctatcgccatcatttccccggaacagcttggcgtcacgctgtacaagctgtcactggtttccatcgccgccattctcggctaccaccttgatcgtgcactgtttccctatgccagcccggggagttatctgactgagaactggaaaacccgggaagcgaagaagcgaagcaccggaaataacagccattctgatgctcctccaccacttcctcacggttgcgagggaagagtggaatttccggtctcgcacggttacgagttgatttttgccgctgttctgctgcgacgggcaatgattgtcgcggcgatttgtatcggcgtgacgatggggctctga

SEQ ID NO: 181740 - DNA, 498 bp, Klebsiella oxytoca
atggacgttaacgccttactctccagtctcacttccatcggtgctattgggaaagcgcttcttgatgagcgcgacagccaaaaactggcgaccctcaagggtgacctctcgaataaaatcattgaggctcagtcccagttcatgcagttgcatagcaccgtcatcgagcagcagcggtttatccttaccctggaggagcgcattcgcgagctggaggctaccagcgctgaaaaagctcgttatcaacttaccaaactcggaactcagcgggagttcttcgcttatgctttgcgtcctgattccgaacttcctcagggcactggcgaggtcgctcacttcctctgccagccttgcttcgatgccggtaagaaggttgtcctcactggtaatggcgaggggtactggaagtgccccgtctgtaaccttggggcccaaacaacgccggtagccagagtcagattcacgactggtagccgttacgatcttgatgatttttga

SEQ ID NO: 181741 - DNA, 771 bp, Klebsiella oxytoca
atgaaatctcagtttttgccagtattaccctggatgggtgggaaacgtcgtctggccagacacatacttccgttatttccgtcacacacttgctacgtggagccgttctgcggcgcagctgcgctgtacttcatgaaagagcccagcaaggttgaggtcatcaatgatattcacggtgagttgatcaatctctaccgggtgatcaagcatcaccttgatgagtttgtccggcagttcagatgggcgctggtcagtcgccagatataccgctggatgaaggataccccggaagaaacactgaccgacattcaacgggcggcccgcttcttctacctgcagaaacaggcttttggcggtaaggtggccgatcatacctttggcaccactaccaccagcgcaccacgccttaacctgctgcgcatcgaagaagaactgtcgctggctcacctgcggctttcccgaaccaccattgagcatctggactgggctacctgcattaagcggtacgatcgcccccatacacttttttattgtgacccgccgtacctgaaaacggaggggtatggcgttgaattcaggctggaggaatacgaacgcatggcggagctggcgcggaccatcagcgggaaaatggttatttcggttaatgatatcgaagaaatgagggaaacctttgccgggctgcggattcagacggtcgatatccgctacaacctgcagacaacgggtaaagctgaactcaagcgagagctaattatctgtaatttttga

SEQ ID NO: 181742 - DNA, 702 bp, Klebsiella oxytoca
atggataacgttcgaattcaatatggtttttttatgggaaatagatgttttctccttcttttaattattgtttcgaccttgattctctcaggttgtgacaatgctcaaaaagccggaactaattacttggcgcaacaaatgcgtgacccagactcggcaaagtttcgtgacgtacagacagttactgattctgctgatccttatgttcaaaatatctgtggtttcgtgaatggaaagaacctcttcggcgcttacagaggtgaacaacgttttgtcgtcaaggtgttcactggcccccaaaaatcaacttttactcccttgagtttcgttgttgaagctgacgacaaccagtctcgtcgggctacaaaggattcgaacaaaacaacccacccgcagacgctctttgaagaacgatactggaacaaactttgtataaccaatgagcgtaaacctacatattctggtgttagctggaagactcccttcgaggtttgcaaagataaaatactctcatcattagaaatcaaaggagatataccagtcgtttcagaagaatccgttagcggtgaaacaacccttgtatggtggggtgataatgaattatttgtaccaacatcgacaccaaatgtcatggatctgcgcagggttcgttgtgttgtgaacaatgattctggggagattagcgagtttcatatattttaa

SEQ ID NO: 181743 - DNA, 189 bp, Klebsiella oxytoca
atgactgcagaacaagtcaaatcactctttcgccagcgggggatcactttcacccagtgggctgaagagcatggctactcccggaatgaggtctaccgggtacttaatggccagaccaaagccaattacggtaaatcgcacgagatcgccgtcaagctggggctcaaacccggcaacgttgcagcctga

SEQ ID NO: 181744 - DNA, 306 bp, Klebsiella oxytoca
atgagcaaggtaatcacatccacatccgggggccgtatcctgcgggttctcaaagcgctcaaaggctcttcactcagtggccgttccaacagcgaactggcgaaagcactagatgagtctccggccaatatcaaccgcgccctcaataccctgatagacgaagggcttgcccagaagctcgataacggcaggtttgcacttagtgtgcaggttctgcagatcgctgttgctcacagtaatgaaattgcccgcgctcaggggcgtattgatgaactgaatcagcgcattatcgctggcagtcgctaa

SEQ ID NO: 181745 - DNA, 939 bp, Klebsiella oxytoca
atggcccgaactaagcaacaaaccactgaactggcacctgatgcaaccctcagccctgaactggaagccacccagaatctgatggccacggtcagcagccagatgaatgacgaacgagacctgctaaaccagctactgggtcaggctcagatggctgatgcgtttgagcaattttcccgaacggttcggacttctaaactggcttttgttaaggaaaacaagctataccgcaacctcaaaggcaagaagacaccgaacggttcggagttttcgggcacatgggatgagttctgcagtgtgctcggaatatctgcggataaagccgatttggatattgccaatcttaccgccttcggcgaagaagctctggaatccatgtcccgcatgggcatcggctaccgcgagctgcgccagttccgtcgcttgccggaagaccagaaaagcgccctgatcgaagtggccaaagaaggcgacaaaaccgcgctgcttgagctggccgaagagatgatttccaaacatgcccgcgagaaggaagagctgaagaccgaccttgaaatcagtcgccagatgctggccgagaaaaaagaagaactcggcacgatgcgcaatgaaaaagaggagcttaagtcccgcctggttcgccgcaccaccactgaaacaccggacgaagaaggcgtggcgcttgagacggaagtcactggctttaaaagcggggttctcagcgcattctttgaccttaaaagcggcttcaacgcgctgaccgagcataccgaacgcactggcatcaaccataccggaatgatggcgggcctgcttgatgaccttcaggcgcagtttgaagaactgcgtcaggaattcagcctgccggaagcccgtgaaaccagcgtgataccggactgggtaaaagaagcacagcaagaggatgaaaataatggataa

SEQ ID NO: 181746 - DNA, 1677 bp, Klebsiella oxytoca
atgtcacgtgccacattgctcaaaaaactgaatgccgtccgcctgcagaagccgagaaaacagcgctctgatgccggtgattccgcgctgacccgcgaggaggcgatgaccatttccggcaccctgatggaaaccatccgtgggacgggcaaacgtaccctcagcgtggaaaaagccatcaacagcctgcgcgataacggtctgatcgtcagcggcaggcttgatgagaccactggtgagattgtgccgctgtcggccagcgccattatccgcgccctgcgtcagtaccgcctgcaccctgaccagctgcgggcaccagctccggcagtgcagctggccagccgccacccgaaccacgtctggcagctggatgcgtccatctgcgtcctgtattacctcaagaacccggccaaaggggttaaaggtgataccgggctgcgcatcatggatgagaaggagttcaacaagaacaaacccgccaacgtggccaaagtcgtcaatgatcgcgtctggtcttttgaaggaaccgaccacaccaccgggtggatctacctggagtaccgcttcggcggcgaaaccaccgagaacttcacctcggtgctcatcaacatgatgcaggagcgcggcggcgctgacgtgctgcacggggtgccaaaggtgctgttcaccgaccccggcgcagccctgaagtcccccacgatgggcaacctgtgccaggcgctgggtatcaggctgattgcgcacaaagcccgcaacgcacgggccaccggctcggtggaaaaggcccgtgacatcctcgaacgggatttcgaacacggcctgcgcttctgccgcgtggagagcatcgacgagctgaaccgtctggcacgtctgtggcggatgaagttcaaccgtacggccattcacagccgttacggcatggcccgcacggataaatggttgctgatcaccgaagaacagctggtcaaggccccctctgttgaggtctgccgggaagcagcggtgtcagcgccggtcagctgtaaggtggacagctttgtccgggtacgtttccgggggcggcagtacgacgtttcctctgtgccgggtgtctgtgtgaatgaccgcgtgatggtagcccgcaacctctaccgtgacgatcaggctcaggtcgtgatgaccggcgaggacggtctgaaatcattcttcctggttgacgaggtgcagaaagacgaacacggctttgctgttgatgccccggttatcggtgagagctttaaaccactgcctcagaccgttgcccagcagcatcttgatgaagttgagcagcacgtctttggcacggccagtaaagaagaaaccgaggccgcgagaaaaggcaaagccctgccgttcgggggacgtttcaacccatatctcgatattgaacgcgacgatcacccgacctacctgccaaaacgcggccaggaaagtcaggttcgtggcccgcgcatcgagcagcgtccgttatcccatgttgaggcggctaaattactgcgtgagcgtctgacggcaactggccataactggttcccggaacactacgcgcagctggtcagtcgctttccggaaggcgttccggcagaagatcttgacgccatcgcgcaggaactggccgggaacaaagcgccacggctcagcatcgttaacggccattaa

SEQ ID NO: 181747 - DNA, 1170 bp, Klebsiella oxytoca
atgctggtactgaaagacctgatgaaacagcacggtattgaacagacggaagtcgctgcagcagcagctgtttcgcagcccgccgtttcacagctgattaaccacggcatctggccaaagcgtcgccctgaagaagtgcggcagaagattatgacattcctggcatcacgcgggctcggggaggaattatcccgggcgtttgatgaggtactgacggcggaacccgccaggacctccgtcccgcaacaggcaaataacgaagaggacgaaaatatgttactggcaaaacaggtattaaatccagtcaccaaaaagcaattcggtattttccgtgacccgttcgcggatgacgccatgcagagttcagaggacgtgttcaccacgccagatattcgctacgtccgcgaggcactgtatcagacggcccgttttggcggttttatggcggttatcggagaatccggcgcggggaaaagcactctgcgccgcgacctgattgagcgtattcaccgcgaaaatgcgccggtcatcgtcattgagccctacatcatcgcgatggaagacaacgacaataaagggaaaaccctgaaagcggccagcatcgccgaagccatcattaacaccattgcgccactggagaatgtcaaacgcagtcaggaggcccggttccgccagttacaccgcgtactgaaggattccagcaacgccggttacagccacgttctggtgattgaggaggcacattcactgccgctgcccacgctgaagcaccttaagcgcttctttgagctggagcatggctttaaaaaactgctgtccatcgtgctgattggccagcccgaactggcgatgaaactgtctgaacgcaatcaggaagtccgtgaggtggttcagcgctgtgaagtggttgaattgctgccgctggacacagagctggagcgctttctgaccttcaaattcgaacgtgccggaaaaccaataactgatgtgctggataacaccgctgtcgacgccatccgtgcccgcctcagtaacaatattggcggtcgcagaggggttgtcagccttttatatcctctggcggtcagcaatctggtgattgcagccatgaatatggcggcacagctcggtgttccggttgttaatgccgacgttattaaggaggtttaa

SEQ ID NO: 181748 - DNA, 273 bp, Klebsiella oxytoca
atgaaaacaataccgaacgttaataaacagctggctgatttgatgaatgccattgcggcactcaatgcaatgaatacgcctgtcaccagcatcatgatttattcaggaaagccggttattcgtgtttctcgcgacagtccgtgcgtcagtcatttcagggggaaaaagtcgggttataccatgaccggtattgaccatcaggggcgttaccgtcagggggaagttgagatgtatggttgcagggttatctggtcagaatcattacttcactga

SEQ ID NO: 181749 - DNA, 216 bp, Klebsiella oxytoca
atggcaataaagatagagattttaatcgcgctgacaccagaaggatttatctattgcaaaatgaccggcgcaaatacaaaagacgcgagtgaaagtgagctggcgacgcttgagtcattaaagcctgttgtaaatgaatctgttctcaacaaacttaaacagagcggatatcgggttgcagctgattatctgcagccttccggcaaatcacattaa

SEQ ID NO: 181750 - DNA, 612 bp, Klebsiella oxytoca
atgacgacgattaatcaggacgaatatatgaaagaccgtaaaggtcgcctggttccgataagccagatttctgattacgatctggcaatggacagctttgtccgggagcaggttgctgcggcgaaagccaagaatgctgaactgagtgaatttaaaaaccgtgcatttaacgaatgctatgcctggcttgaccttgtggcagaaaaattcggcagaacacgaggcggtgccaagggcaatgtgacattccccacttttgacggtagccagcaagttaccatccgtgtacaggaaacactgacgttcgggccggagctgcagatagccaaggaactgtttgatgaatgtgttaccgactggtcgaaaggtgctaatgccaatctgcaggcgattgtcaccgatgccttccaggttgataaagaggggcagcttaataccgggcgtattctctccctacgaagggtaaaaattcaggatgagcgctggattaaggcaatggatgcgatatcggaatcgctgcaggtggccatgtccaaaacctatattaatttccgggagaaagataagtccgggaagctggttaatataccgttagatatcgctgccatttaa

SEQ ID NO: 181751 - DNA, 186 bp, Klebsiella oxytoca
atgctgacattagccggttttattttactggtatcagcctgcggaacagatgcctgtgacgcactgcctgttactgaagatatctatctgaataagcagtcctgcgagctggtcgcagacgtcattcatgagcgctcaccgggcgctttattgatttgtggggaagtctggcgggaggaagaataa

SEQ ID NO: 181752 - DNA, 195 bp, Klebsiella oxytoca
atgtctctgttatgcaaacgttgtgacaacccggtcgatgatctggattttgagcaagcgaccattatggaaagttttgatggtacgtggtgtatcgacctgattctgaaatgccctcactgcggactttcctataacgcttttgtccccaccgctgaattacaacctctgactggtgatgaaaatgacaaatga

SEQ ID NO: 181753 - DNA, 342 bp, Klebsiella oxytoca
atggtcaaagcccgccgtatctttattagctctctgcgtaagaatattaagccttccactaaaacggcccgcgcagaccagttctgcgaagggtgggctgaaggcgcgtatcaggcgatagagccatttatagtgactgaaagcgaagaaacattgatggcgaattttctggcgaagattaagaaagagcaggaattatccgatctgaaaccccgtgaagctaaaaaatgccggggtgatcaggatgcagcggaagcgggatttaacgagggattaaaagcgcgtttaaatcacggcgtatccggtaaagattctgccctttctctggagtacaagtcatga

SEQ ID NO: 181754 - DNA, 126 bp, Klebsiella oxytoca
atgaagctaactgtcggaaatattcttttactgtgcgtactgggctgcgttgtcatctgggttgctgtcgggtttatcggttattacaccgttatcgctgccctggattattttaataaatcgtaa

SEQ ID NO: 181755 - DNA, 210 bp, Klebsiella oxytoca
atgattattggcgcactgattttaaccattatcggccttttactcgctatcatggctgggtatttatcggcagataatctaagccctgtaccagccatgctgggagtcattggctcagtatttgttattgcagcacttgccctggcccatggcccgggcaacgtcaatacccagacttccatccccgttactcaggaggcaggtaaatga

SEQ ID NO: 181756 - DNA, 435 bp, Klebsiella oxytoca
atgacacgaacccagctgattaaaatcatccatgtggcaaagcgtgagctgcgcatggatgaagatacttaccatcagttgctgaatacctacgctggcattgaatccacgcgtgaaatgaatctcgggcaactgaaccagatcctcgatgcgatgaagaaaatcgggtttaaggtccggactcagaagaaagaaaagctcacagctaccgacgaccagtcgaagaaaatccgggctctgtggctggaaatggctgacgaaggttttattcgcgaccgcaccgaacgggcaatcaacgtctacgtgcatcgcataacgggcgtcagccgccttgactggctcaatacatcggcagcaagccgtgtgattgagacgctgaagcagtggcagacacgcgaacgcaaagctctggaagaactgcagggcgcaaagtga

SEQ ID NO: 181757 - DNA, 363 bp, Klebsiella oxytoca
atgacaacaccaatggagcataagcggcataaactgctgtctgaagttgccgaccacgttactgagaccggcgttgattacggtttatcatccgaacaggctgaacaattggggctggctgtggcagattttctggcatctcactttggcgggcaaaacttcacctttcctcgtgactacgcatataagctgtctctgcgtgatatgcagatttatgaagagttccgggggaataactgggctgagttaagtacgaaatacggtattactgaacgggggctacggaaactgattcaccgtgtacacaaacaagtgatggctcaccgccaaccacagctgttttcctttggtgataacgagtaa

SEQ ID NO: 181758 - DNA, 3111 bp, Klebsiella oxytoca
atgtctaagttttttatccatcgaccggtcttcgcctgggtgctggcgatcatcatgatgattgccggtggcctcgcaattatgcagctaccgattgcacaatacccgactatcgcgccgccagcggtggccatctccgcaacctatccaggtgcggacgcacaaaccgttcaggatacggtgactcaggttatcgaacagaacatgaacggtatcgataatctgatgtacatgtcctcaaccagcgattccgcaggcggcgttaccatcaccctgacctttaaatcaggtacggatccggatattgcgcaagttcaggtgcagaataaactgcagctggcgacgccgcttcttcctcaggaagtacagcagcaggggattagcgtcgagaaatcaagcagtagtttcctgatggttgctggattcatctccgataacacaagcactactcaggatgatatatccgactacgttgcatcgaacgtcaaagataccatcagccgccttaacggcgtcggcgatgtacagctcttcggcgcgcagtatgccatgcgcgtctggctggatggtaatctcctgaataagtacaacctcacgcctgtcgacgtcattaaccaactgcaggtacagaacgatcagattgcagcaggccagcttggcggtacgccggcccttaaaggccagcagctaaatgcatccattattgctcagacgcgactgaaggatccggcagagtttggcaaagtgactctgcgcgtgaacgcggatggctcagtggtgcacctgaaagatgtggcccgtattgagctgggaggtgaaaactacaacgttgtcgcaaaaatcaatggaaaaccggcttcaggactgggaattaagctcgctaccggcgccaatgccctcgataccgccgccgcgattaaagcgaagcttgccgaactgcagccgtacttcccgcaggggatgaaggtcgtctatccctacgacactacgccgtttgtgaaaatctctattcatgaggttgtgaagacgctgtttgaagcgattatcctcgtcttcctggtgatgtatctgttcttacagaatatccgggccacgctgatccccaccattgcggttccggtcgtcctgctcgggacctttgccgtactggcaatgttcggttactccatcaatacgctaacgatgtttggtatggtgctggcaataggccttctggtcgacgatgctatcgtggtggtggaaaacgtcgaacgcgtcatggtagaagagaagcttccccccaaagaagcgacggaaaaatcaatgtcgcaaattcagggggcgctggtcggcattgccatggtgctatcggcagtgtttgtcccgatggccttctttggcggctctacgggggcgatctatcggcaattttctatcaccatcgtctccgccatggcgctgtccgtactggtcgcgctgatcctgacccccgcgctttgtgccacattactgaaacccgcatcagccgatcatcatgagaaaaaaggattttttggctggtttaatgcgaaattcgatcgtagcgtgaaccactacactaacagcgtcagcgggattctgcgctgtaccggacgctacctgatcatctatttgctgatcgttgtgggtatggccgtcctgtttatgcgcctgcccacctccttcttgccggatgaggatcagggggtatttatgaccatgatccagcttccttcaggcgcaacgcaggaacgcacgcaaaaggttcttgatacggttaccgattactatctgcataaagagaaggcgaatgttgaaagcgtctttaccgttaacggctttagctttagcggtcagggtcaaaactccggtatggcgtttgtcagcctgaagccatgggaagaacgcagtggcgcagagaatggcgttgaggcaatcatcaaacgtgcgaccgttgccttcagtcagattaaagatgctatggtctttcctttcaatctgccggcaattatcgagctgggtacggcgaccggttttgactttgagcttatcgatcagggtaaccttggccatagcgcgttaaccctggcccgtaatcaacttctgggtatggtgagagagcatcctgaccagctggtacgcgttcgccccaacgggctcgaagacacgccgcaattcaagctggatgttgatcaggagaaagctcaggctctgggtatttcgctatccgatatcaatgaaaccatttccgcggcgctagggggttactacgtcaacgactttattgaccatggacgagtgaaaaaagtctacgttcaggccgatgcaaaattccgtatgctgccgagcgatatcaataatatgtacgtccgcagcgcgaatggcgaaatggttccgttctccgcctttgtcacctcacgctgggtttatggttcaccgcgcctggagcgctataatggcttaccctctatggaagttttgggtgaagctgctccggggaaaagtaccggcgatgcgatgattttaatggagcagttagccagcaagcttcctgccggtattggttacgactggacaggaatgtcctatcaagaacgtttatccggtaaccaggcgcccgcgctctatgccatttcgcttattgttgtctttctgtgtcttgcggcgctttatgaaagttggtctattcccttctccgtcatgctcgtcgttccattaggggtagttggtgcattactggcagcatcgttacgcgggcttaataatgacgtttatttccaggtgggcttattaacaactatcggcctctctgcgaaaaacgcgattcttatcgtggagtttgcgaaagacctgatggataaagaaggcaaaggaattatcgaagccacacttgaagcatcgcgtatgcgtttacgccctatcctgatgacttcgctggcctttatcctcggggttctgcctctggttattagccatggagccggcagcggcgcccaaaacgcggtcggtaccggcgttatgggaggaatgctgacggcaacattactggcgatcttctttgttcctgtcttcttcgtcgtggtaagacgccgctttacgaaacacgcagagtaa

SEQ ID NO: 181759 - DNA, 1140 bp, Klebsiella oxytoca
atgacacctcatgtcagggttacacttttatccagccttatcatcccggccatcctgctcagcggttgcgataattcaggcgatcggcaaccgcatgcgcagatacctcaggtctccgtttatgtcgtacacagcgcgccgctgtccgtcaccacggagctacctggccgcacatctgcctaccgcgtcgcggaagtccgcccgcaggtcagcgggattatcctgcaacgtaactttgtcgaaggtagcgatgtcaccgctggacagtctctttatcaaatcgatccggcgacttatcaggcggcttacaacagcacaaaaggtgatgaagcgaaagcagaagccgcggcggctatcgcccacttaacggtcaaacgctacgcgcctcttctcggcacaaaatatatcagccagcaagaatacgatcaggcggtggcgaccgcgcgccaggccgatgccgacgttatcgccgcaaaagcagccgtggaaagcgcgcgtattaacctggcgtacacaaaagtgacgtcgccaatcagcggccgcatcggcaaatccagcgtgaccgaaggtgccctggtgacaaatggtcaggctgacgcaatggcgacggtacagcagctcgatcccatttatgtggatgtcaccgaatccagtaatgatttcatgcgcctgaaacaggaaagcctgcagcacggcagtgacaccaaaagcgtgcagttgattatggaaaacggaaaaccttatgcgcttcagggcacgctgcagttctctgacgtcacggtagatgagagcaccggctcaattacgcttcgcgccatcttccccaacccacagcacgctctgctgccagggatgtttgttcgcgcccgcattgatgagggcgtttcaccgaatgccattctcgttcctcagcagggagtcacccggacgccgcgcggcgatgccagcgtgatgctcgttaatgataaaaacctggtggaaacgcgagccgtcaccgcctcacaggcgattggcgataagtggttaatcacgagcggtctgaaagccggtgaaaaggttatcgtcagcggtctgcagaaagtacgtcccggcgtcaccgtgaaggccgaagaggataccgcgacgtccgtcgcgcaataa

SEQ ID NO: 181760 - DNA, 1224 bp, Klebsiella oxytoca
atggctggtggtacgaacaaattaagcgatacatccctgcgtaagatgatcgggagggaaagccccggcgaaagcttccatgccgatggtggaggactgagcgttaaggtatcgaaagtgggggtaatgacctggtattttacgtaccgtgttggcggtcgcactacggcgccgcaacgcataaagctgggtaattatcccgatctatccatcaaggccgccagagagaagcgcgagcaatgccgcgcatggcttgcagaggggaagaaccctaagcaccagctcacgatcaccactcaggaatctttaaaaccggtcactgtgaaagaagcgctcgattactggatcagagagtatgcgacccacaaacgggccaacgtccaaaagcacattgatcagctaaataagcatatttatccgtacattggagattatccactttccatgtgtgaaacccgccactggctggagtgtttcagccgtgtaaggtctgatgctcctgtggccgccggctatctcctgcagatgtgtaaacaggcccttaaattctgccgtgtgcatcgatatgcgacgagtaatgcgcttaatgacctggccattgatgatgtggggaaaaagcaggagaaacgcgacagggagcactccagacaggagttatccgacatatggcgggaaagtaccgggttgaagtttaaaccttactacgctgcgctcctgcatctgctggtggcatttggatgccgaactcaggagctacgtttgtccaggcactctgaatgggatttgaaggactggatatggactgtgccaaaggagcacagcaaaggcggcaataagatactacggccaattcccgtagttctgcgcccgttcatcaaagaactgatagagcaaaacagggacacaggtttactgctgggcagtatcaagaaacctgaagctgtgagccagtggggccggggtatctacaagcgcctgggtcatgttgagccctggacacttcacgacctgcgccggacgttctccaccacgctaaataacatggggatcgcgcctcatgtcgttgagcaactgctggggcacacgctgggcggtgttatggccgtttataaccgtagccagtatttacctgaaaaactggatgcgctgaataaatggatggagcgactagaagttatctctgccgaacatcccaatgtaactattttgaaggtggcaaaatga

SEQ ID NO: 181761 - DNA, 711 bp, Klebsiella oxytoca
atgaaattacccgagcgcatgtattacccccttcctgaagctgccgaaaagctaggttgtacaataaaggatatctatcattttgcatacatcggggttattgacgtttctgtttttatcccttcatacaaaaacgataaattgttaattatgctcccttctgaattgataaatgaaattgataacgattttggcggtgttttagggactgataagtggagcatttttgacatagaattcaggcaagaaaatgaaatgacggggtattacgcaaaatcaataagcgggttcttttacgtctggagagattcttttgctttggctgaatttaccagtggtgttgatttgataaaaacagctagcctaacaactaagcctgaagctgatggcggggaagttgagatagcaagtatgcagggaggaattgaactggatgcccgttatctgtgtattatggctagagacttagagaaaataaaagaggttggctctttaccgattaaaaaaatagacaccccaaaaactattgctaagaaaggtgaacttattgtagctctgataaagatgaatcctgagctatcggatattgatttagataaaacgcctgtggcaaagctaattatgattatagaggctgccgccgcttctaaaggtgttgagttgcctcctactgataaaaatacctgggctaagtacctcggcaggaagtga

SEQ ID NO: 181762 - DNA, 201 bp, Klebsiella oxytoca
atgaaccaaacaaaccaacttggcgaacgaatgatccgtgaggctgagtgtcgccagttaaccggcatttgtcgcactacccgctacatgatggaaaaggaaggcaagtttccggcccgccgtaagctgggcggacgtgccgtaggctggcttttgtccgaagtatccgcctggcaacaaagccgcagtaaagcggaataa

SEQ ID NO: 181763 - DNA, 1308 bp, Klebsiella oxytoca
atggcacataaaacaaaggcggccccacatggccgccagagtcatcacactaaacgccatcagattaccaggcctgccgctggtggtcaaaacctgagagagttgcataatcgcaactcggtactgatgaacttttccaaagcactttctagtgcttcggtagaaggtaatggtacatacgggaaaaactcgtatgttaaagggcagatttctaccctttatagccagcgcaattttatacaggattttgcgctcgccagaattggcgggctcaaactaaaccatgagttatccgttacccaaaacttgggtaacgctccggtaaaggtgggttttccccacctttggggtaaaccgcttaaaggctgtgctccccggaacgggggatctcgaacatcgaaggttgtcgccagaaaaggcgtaaaccccagagtgcaaaattgcactctgcttgtaaatcaatatcttaaacacactactaaaagcggggaggctcgttacccagatattgggtatcaacaccgatgcgaagaaaatcgcatctcattactaatgaacttttccaaagcactaaaaagtgctttggaacaaaatcaacaagttaaccttttgataataaagcaaagctcaaaagtgagctccggccaaacgccttttctggcgtctggttactcctgttccttggccttcttgcgttggcggcgtttgatttcgcctttggctgcagttacgagaaaaccagcggtgctttctccttcttgcttcaaactttcaatatcttccatcacatcatgggggattcgaactgtagtcatttgtgactttgcgttctttgcacctgttgccattactaaaactccttgtgttaggtgtatttcagtatacgcaaaaaaaataaaaggaaaaggcttgaagtgtatttcactttgggctagcttgaatatcgaaggtgaaatacaccttgtaaatgcgaagcccggcagtgctaggaacactaaccgggcctctaaccacaaaccgttagttggagtaacagttatggctggatcacagcatacccaaactcgcccggaattcacatggttattcctggcagtcccgaaacatctcccacatggaaaacctgtagtgctgcgtactacagccgcaactgaagaagaagcccgcgcagagttctgcggttggaatatggtcttcgccgcaaaaattcggtctcaaatgcggtgccatataaccttttatgatgatgttaaccgcactggtctgacacttgaggttgaggctgtcgagggggtgttcaatgcctaa

SEQ ID NO: 181764 - DNA, 189 bp, Klebsiella oxytoca
atgcctaattcaaaatggtcagaaatagacattgaagacgaactgcgccgccttgaggtaatgctgtgtacgactctatatatgaatctcgatgatgaagagggttacagcattgcgattggtttgatctctatgtcgttgtctcgcgttcgtgaactgaaagcagtcagtgaggtgagccatgcgtga

SEQ ID NO: 181765 - DNA, 312 bp, Klebsiella oxytoca
atgcgtgatatctaccaggagcttgttagacacgccccggatttcaaaaagcataatgacgatgatttggttgatgccgttgatatctacgcttctgccgcacgtagtatctgttctgcgctcactctgataggcaacctcactcatgatgctattgagagcgagggttatgacaatgaagacgctatgcgcgatctactgcttgttggcgatacccttcgcaatctgccaagaatagcggccgctttggagcaatgttccgataccgctcattacgcgctgaaacaacgtagaggggagacaattcaatga

SEQ ID NO: 181766 - DNA, 369 bp, Klebsiella oxytoca
atgatcagcaatatcaaatttaacgagctggaaaagcgcgttgatctgctggtggaaaaggtgttgacccttgagctgcagatcaaatcactcaccgatagccaagggggagaaattcccccgggtatggcacccttgtctactctagccgctgaattcggtatctccaccaaaaaggctgaagaactggcgaagaacaccggcgtgatgatggtgaagctaaaaggtggtgggtttgttacacctgaagagaaattcagggaggcggcccggttggttctgcgtagtgctaaacgtaaatacggatctgcatactggtatcacccgttgttaggcaaattccagatgagtggaggggtgccgaaatga

SEQ ID NO: 181767 - DNA, 1821 bp, Klebsiella oxytoca
atgaagaacgcaccgaacgtaaaggctctgccgaaagacaagtttacagaggcgattattttcgcaggtgccgacgcgtggagccacgcaaaaggctgggaagagggattgggtaagcagattgccgaagataccacacctcctgtttatttaggccctcggcaactggaggagctggataatctgcgcattattgatgatggacgcagagcggcgcgggtatatctggctggggaaattgagccgctgatgattaacgctattggcgctaagctggcgctggcaggtgtaaaggatgccaaattatttaaaggtattcccgatctccagccggaggactggcacgattatctgaaccggcttcgggagcaatctagcgaatcagaaaataatatccaccaattgcctttgacgaagagagcgcagcttcagaaatctattgaggttagtccggctcttaaccagatgggggccagccagcgcggagaggtacttcttgcgcattacgatggtgagttagctattcacgctgactctgacacggttcaccactataacggagtgatctggaatccaatccaggataaagagctacaacgggaaatggctcaaatttatattgatgctgaggtggcttattcgcagaacgccatcaaatcggcagtggaaaccatgaagctgagtctcccggtcatgggagttacggcccgtaacctcattggcttcagcaatggagtgtttgatacccgaacggggcaattcaggcagcacagcaaaacagactggttgctgatcgcaagcgaattaccattcagcccaccagaagaaggtgagacgctggccagccacgcgccgaacttctggaaatggctccgccgttccgtggctaacaatgaccgcaagacagatcgtgtactggctgcgttgtttatggtgctggccaatcgttacgactggcagctttttcttgaggtaacggggccgggtggtagcggtaaaagcgttatggcggaaatctgcacgatgctggcgggtaaggccaatactgtatcagccagtatgaaagcgctggaggatgcgagagatagggcgctggtggttggttactcgctgatcataatgcctgatatgacgcgatatgctggcgacggtgcagggataaaggccattacaggtggcgataaggtgtcgatcgacccgaagcataaagcgccatactcgacacgcatacaggcggtagtactggccgtcaataacaacgctatgacattcagcgaccgcagtggagggatatcccgtcgccgggtgatattcaacttttccgaggttgtgccggaagatgagcgggatacgatgctggccgagaagatagagggagagcttgccgtaataattcgtcacctgctgacccgctttgccagacaggatgaagcaaaacggctattgcacgagcagcagaaatccgaagaggcactggctatcaagcgagagggggattcgctggtggacttctgcggctatctgatggcgtcagttgtttgtgatggcatgtttattggtaacgccgagattgtaccattcagcccgcgccgttatctgtatcacgcctacatggcatacatgcgggccaatggactgaataagccagtgtcgctaatgcggttcggaacggatatgcctggtgcaatggctgagtatggcaagaggtatgaaaaacggaaaaccaagcacggtatcaggtcaaacgttactctgcatgacgattcagaagactggatgccatcatgcaacagcaactcagaaaacggtgaggtagagtaa

SEQ ID NO: 181768 - DNA, 261 bp, Klebsiella oxytoca
atgccgatcaccattcaggaaatcaaagaacaccatgatcagttcgggcttcacgacatgagcgcaacgcctactgatgagtatcggcaggccctcaaagatggcgctctattctggattgaccatcatgattttgttcgcagcacgctatcagaagagatatttgccactaatcgtgagcagttggatgccttgattgagcacttacaggaatatagaaaccagatgccaacaccgccgggttggatgagcgagaaataa

SEQ ID NO: 181769 - DNA, 1161 bp, Klebsiella oxytoca
atgaaaaaactactcgaattacgccagcagaaagccgcactcaaaacccagatgcgttccatgctggataaagccgacagcgaaaagcgaagcctgaacgatgaagagggcaagcagttcgacgaactccgcgctcaggctgatgcgcttgaagttgaaattatccgccttgaggccgtcgccgacgatcagcgcaatctgcctggcacttccgttgaaggtaaaggcgtgagcaacgatgagctgcgccactacatcatgaccggcgacacccgctcactcaccacgctggtgcaggctgacggcggttataccgttattcctgagctggacaaagagatcatgcgccagttgcaggatgacagcgtgatgcgctccatcgccacggtgaagaccaccaaaaccaacgaatatcaaaaactggtatctgtgggcggcgcgacggtaaatcgcggtactgaaggtgaagcacgaaccgagaccagtacgccgaagatggagcgcgttgatatcaaactcaacccgatctacgcctacccgaaaaccactcaggagattctcgacttctcagaggtggatattctgggctggttgtcttctgaaatctccgacactttcagcgctaccgaagaaaatgattttgttaacggcgacggtacgaagaaatctaaaggcttcctggcttatcctcgtgcggccaccagcgataaaacccgcccgttcggtacgctggagaaaatggaaacggctgctgttacctctgatggcctgatcgacctgctgtacaagctgaaagccaaataccgcaaaaacgccgtgtgggtgatgaactccaataccgctgccacgcttcagaagctgaagaacggtaacggggattacatctggcgcgatcgtctggttgccggttctcccgataccctgctgggccgtccggttcagtaccttgaaaccatgcctgatgctgatgccggagaagcgttcctcgcggttggcgacttcaagcgcggttacttcatcgtggatcacactactggtgtgcgtacccgccctgacaacatcaccgagccgggcttctataaggttcacaccgataaatatctgggcggtggcgtggtggactccaacgcgatcaagattctggagcttgcaggttcctga

SEQ ID NO: 181770 - DNA, 561 bp, Klebsiella oxytoca
atgaaaacaatagattttgaaatccgcacctctgaactgaccgctactgataagaagctggtgggctatgccgtgcgctggaacagtctctcagaaattatctgggatgaattccgggaacagttcgcgccgggagcgtttaaagacagcctggcatccggtagcgatgtgcgggcgttgtatgagcataactatacccaactgctggggcgtaccaaatccggcacgctggtgctgtccgaagacgataccgggctgcgctttgagctgacgccgccgaatactcagcttggtaatgatgtgctggcgctggtggaacgtggcgatctttcaggtatgagctttggtttccgtgcgctgaaagagtcctgggatattgcgcaatccccgtacctgcgaactgtgaccgctgctgaactacgggaaatcaccgttacttccatgcctgcttaccctgaatccggcgttgaaatcgcgcatcgttctctttttgctcaacatccagaattacgccgtgctggtgataatcgtcggcgctgggctgacttggcggggctgtga

SEQ ID NO: 181771 - DNA, 1236 bp, Klebsiella oxytoca
atgtggaatatctggccttttggccgcaagtctgagccagccgaacaacgcagcatgaccattgatgagtttctggcgatggcagggattccaaataccggatcaggtgaatatgtgtctgcgggtactgcggaatctctgccggcggtgatgaacgccgtgtcagttattagtgaggctgtggcaaccatgccctgctacctgtaccgggttcgtaatgataacgggcgtgaggcgcgggaatggctgagtaatcatccggtagattttctgctgaacgagcagcctaacgtttgccagacgccttatcagttcaagcgcacgatgatgcgccactgtctgctgaatggtaacgcctacgcggtgatccagtggggccgcgacggccagccacaatccctgcatccgtatgcgccgggggccgttgtgcctgagcgtatcggcgaacataagtacaaatacaccatcactgagccgtttaccggggctgttcgtacctatttgcaggaagagattctccacctgcgttattccaccgatgacggttttctggggcgctcgccgatcaccatttgccgggaggcgctggggttaggtctggcccaacagcgccatggtgccagcattatgaaagatggcatgatggcggcgggcgtcattaccgctaaagaatggctggatggcgttaaaggcaaaagtgcacttgaggcgctggagcgctacaaaggcgcaaggaatgcagggaaaacgccgatcctcgaaggggggatggactacaaacagcttggcatgagcaatcaggatgccgagtggctggcctcccgccgtttcaccatcgaagatatagcccgcatgttcaacgtgtcgccaatcttcctgcaggaatacagcaacagcacctacagcaacttcagcgaggcaagccgggcatttctcaccatgactatgcggccgtggctcgccaactttgagcagcaaattaaatccgcgttgctggtggcctctcctgtaccgggcattcgatatcaggtggaatttgattccgccgatcttctccgtgccactccaactgaacgctatgcaacttatgagcgcggtatcaagaacgggattatgaatccgaatgaggcccgcgaacgggaagggatgccgccgcgtgatggtggcgacgaatacagccaggcatggaaacaggaagtgaaagtgagcaagggcaataaggacggtgacgaatga

SEQ ID NO: 181772 - DNA, 339 bp, Klebsiella oxytoca
atgagagcaggaggactgagaaaccgcgtcacgatccgcaccttcacttcatcgagaacaccttccgggcaggttattcagaaatgggaagacggggaaaccatctgggctgaagtaaaggggatcagcggtcgtgaactggtggccgctggcgctgagattgccgaagccactgttcgtgtatgggttcgctttcgccgggatattaccgccgcaaaccgcctgaaagtgctgaccggcccgctggctggcgcaacgctcaacatcatcgggccacctatccccgattctggcatgacccgccttgaaattctctgcaaacaggggactgagaaatga

SEQ ID NO: 181773 - DNA, 294 bp, Klebsiella oxytoca
atgacaactgaaatcaccctggctgaagcaaagctgcattgtcgtgttgatggtactgatgaagatgcgctgattcaggcgtacgtcgatgcggcgctggaggtctgccagaagcatatcggtaaaaggttcgatagtgggctggagttcactccggcgatcaagattggttgcctgatgtacgtctctcagttgtacgagtaccgcacgatgattagcgatgtggaggcgaaagaggttccccttgctatctccgcactgtggtctgtctatcgtgatgtgggagtgtactga

SEQ ID NO: 181774 - DNA, 444 bp, Klebsiella oxytoca
atgccgtggcaaccgttacgccgttgcactgagccgggatgcaacaagcgcgtgaagtctggtaaatgcgatgagcacaagcgggaagtgtggcgggcgcaggatgccagacgcggccaccgtcgcgcccgtggttactctgctgcatgggagaagtaccgctctcagtatctgaaacgctatccactgtgcgttgagtgccagaagttgggcctctatgttcccgcaaagattgtcgatcacatcatccctatcaatggtggtgatgatgttctgttctggcctgagtggaatcaccagccgttatgccagacgcatcataaccagaagaccacgcagcaagaccccatcaccaaagccaaccgcaaagcggggatgtacagcgaacaggaagagcgggcagcacagcgcaataactggatgtatgaggttgatcatgaatga

SEQ ID NO: 181775 - DNA, 153 bp, Klebsiella oxytoca
atgaatgagaaagacgtagtgaatctgtatcagtcgctggcccgatgccgtgatggcttcatgcagacccgcaccagacgcgatgagagccagccagtgaggcgcaggagtgagcgtgaacgggaggtgatggaatgcttccgcaaccgctga

SEQ ID NO: 181776 - DNA, 357 bp, Klebsiella oxytoca
atggcgagaccacctaaaccacccgcttaccttgatgaaattgcggggcaacagtggaagacaaaagctaagcagatggctgaacgcggggatttaacccctgccgactggaacaaccttgagctgtattgcgtcaactattccatgtaccggaaagccgttgcagatattgccctgcgcgggttttcagttgaaggctcacgcggtgccaccaccagtaacccggcgctgaaagccaaatccgacgctgagaaaattatcatcaaaatgtcgtctctgctgggctttgatccggtaagccgtcgccgtaacccgcctgaaactgaagaggaagacgaacttgaccgcatggaatga

SEQ ID NO: 181777 - DNA, 1662 bp, Klebsiella oxytoca
ttgaccgcatggaatgattacgccatcgccataaaatcgggcgaaattccggcctgtaagcgggtaaaacaggccgtcgaaaggtacttttcagacctgaatgacccccgttacgcgttcgatacagcgaccgttgagcggtttattgcgttctcccggctatgcccacacgtcaaaggcccgctgcggggcaagcctattgagctggagccgtggcagcagttcgcctttgctaacctgctgggctttaaggtcagtgctacggggcgcaggaagtacagcagtgcttttatcgaggtgccgcgcaagaatgctaaatccaccgtagccgccatgctggctaactggtttctggtcatggaacagggccagcaggacatctacacggcggcggtaagccgggatcaggcccgtattgtgttcgatgatgcccgccagatgtgtctgctgtcaaagccgctgaaaaagcgcgtgaatattcaggctcataaattgattttcccgaaaaataacagcctgttaaagccgctggcggcgaaagcggccaccattgaggggactaaccccagcctggcgattgtcgatgagtaccaccttcaccctgataatggtgtttattccgcccttgagctgggcatgggcgcacgtcctgaagcggttttattcgccatcaccacagccgggagtaacgttgtctccgcctgcaagcagcattatgactattgctgtcagattctggccggggaagagagcaacgattcgctgtttgttctgatttacgagctggacgacgaaagcgaggttgatcagcctgaaatgtggatcaaggctaacccgaatctggatatctccgttgatgcggcgaaactggaggccactatccagaaggcgcggggtatcccgtcgcaatgggtggaaatgctgaccaaacgtttcaatatctggtgtcagggttccacgccgtggatgggtgcaggagcatgggaagcctgcaaactcgactacgaagaaagcgagctggccgggatggagtgctatgcaggtctggacttgtcctcaaccagtgatatcaccagtgtaaattacgcttttccgttcgacagggagatcaggttacttacaaggcattatctgccggaagcgacacttaataatgtttccaacaaaaaccgcgccatataccgccagtgggtgaaagcgggctggattcgaaccactcccggcgactgtatcgactatgaccgcatccgcgacgatattctgcgtgatgccgaaacattcaatatccggctggtgggcttcgatacgtggaacgccacgcatttgcgtacccagctacagggggcgggccttgacgtagagccgttccagcaaacctatctcaaattcagcccggtagcgaaatcctttgaggtttttgttaatcgcagggtggtacgccatcgcggcgatccggtactggcctgggcgattggtaacgtggtgatggagaccgacgctaacgccaatattaagcccaacaagaagaaatcctctaacaagattgatccggcagtggctgcgctaatggcatttggcacattccaggcggaacacgaggattttgcattcgatatgagtgaaacccataaacagcggctcgctgcttttgacggcatctga

SEQ ID NO: 181778 - DNA, 3408 bp, Klebsiella oxytoca
atggctacattacgcgagctgataatcaaagtttcagcaaactcgcaatcattccagacagaaatatcacgcgcttcccggctgggatcagactactacaaaacgatgcaacgaggtgggcggcaggctgcgacttcggcgcgtgagacgaggcaggctctggccgaagtctccgctcagttgtcggaaacgaagaatgccgcgatgggaatggctggcgcgtttgccggggcattcgctacagggcatctgatatcgcttgctgatgaatggagttccgtcaatgcccgcctgaaacaggcatccacatcgaccgatgatttcactcactcacaacgtttgctgatggatatcagccagaaaaccggtacagctttcagcgataacgcaggtttatttgcccgttcggcggcatccatgcgtgagtttggctattcctctggcgatgtactgaaagtcaccgaggctatcagcaccggccttaaattatccggggccagcacgtcagaggccagttcggttatcacgcagttcagccaggcgcttgcgcagggggtattgcgcggggaggaattcaactccgttaacgaaaacggtgatcggatcatccgtgccttggccgcaggtatgggcgttgcccgcaaagacctcaaggcgatggctgataatggactactgacaatagataaagtggttccggctattaccgctcagttacgggtgatgcagactgaatttgattcaatgcccaaaacggtatcagcctcgactcaaaaggttgaaaatgcctttatggcctgggtgggcggcacaaatgatgcatacggtgcctccgccgcccttgctggtgggcttgattcactggctgagaacattgataccgtagcaatggcagcgggagcgttaacggctgtgggcgtgacccgttttctgggtaactggacgctacaactaaaatcacagaccgaagaacttgtgagggccagaggggcggagattgccagcaccgctgctaaaatcgaaggggcgaatgcttctcttgttcagattgaagcggaaaaatcggtgcttctgtctaatcagcgctcactcgtggctcaacttgaactggcgcagactgaaaaacaacgcgcatcaatcaggacgctgcttgccagaaactcaatggagatggtcaaagcgaataaagcggaaaccgcaacggtcaatgagctgtcaatagccaatcagcggcttaatgcgctcacctcagtaacgagaaccgcatgggctggcgtatcctccctctttggcggtattccggggattctgatgctgggtgccggtgcatggtatacgtggtatcagaatcaggagcaggctcgacagtcggctatacagtatgcctccacccttgatgaggtggtggaaaaagcgaaagccatgagcgaaattcaaatcagaggctctattgccgattctggtgaatccattgacgcgctcaaagataagctggaggacttgagggacgcacaggcagaagccgcccggaaagttcaggaatacacaattctggcccatcaaatgggggtagagaacgatcagaataatggtcacgtaagaaatgcagctaaatatcagcgtgaatacaataaattatcgcgtgatatagctgatactacaattcagctaaataacgccgttgatgcgcagaataaactacaaaaagagcttgaggaaaaggtaaacgcttcagcggctgcatttaataaaattaaaagttcaattatgagtacgctgggcttcggggataaaatggcctcgcttttttcgatgaccatccagtttatggacgagatgaaggcgaaatcagcagacaatcagccgcaaacacctcaaataaataaggcttacgatacctttataaaacaacaaaaagaaagcattgctctatcccaaaaagagggcgtggagagagccaagctgaaagccctacaggatgccataaagcagggtgcggtaaggactgataatcagggtaaaattttgccgggacaggacgcgcagatcgcggctattcagggaaatgcagccactgattttaatcttaatgaatcgcataaaaagccacgcggtaaatctgatatcgaaaaaacagaagatgtgtatacccgcttgcttaaacagcagcgtgagcaaatatctcttgccggacaaaataacgaactggcaaaaatgaaatatcaggttgttcagggagagcttgcatctctcgataacgctaaaaaagcaattttgctacaaaatgcggcccttattgaccagaaaaatatagaggaaaaacttcaggcattcagaaacggtctggctgatagcaatgctgctgcgcgtgaccgggggaatattgatttcctcggcgctggtatgggtagcaaagcccgtgaccgtatgaaagaaatggccgatatccgcgctgatttccgcaaacggcaggatgagttagatcgcgatttcagcagtaaacagctatctaaagacctttatgaacagcaaacagaagcgctgaaagccgcccttgctgaacggctggcgatacaggatgactaccagaaacaatccgacgctcaacaatcagactggagagcaggaattagcgattctctgatgaattatgcggatcaggcaaaagacctgagttcgatgtcagcaacggctaccagcgaaattctgaacaatgccaccaactcgatctccaccaatatgacaaacgttctgacgggagcaaccagctttaaagacggtatgtcgaacatcttcacatctctcggcgaaagtgtcattcagtcgctgattcagatggcgacgcaggcgctgatcaccaaagccattctggcttcagtgggcgggggagctggtgggatgttcgggagtttatttggaggcgcgagtggtgcagccagcagcggaacggccattcaaagtgcgggcgcaaatttctcttttaacgcgctgggcggcgtttacgattcaccgtcgctttctgcatacagcggtggtgtatacagcactccgcagtattttgcttttgcgaaaggcgcgggcgtgttcggtgaagccgggccggaagccattatgccgttgacccgtggcgctgatggttcgctgggggttcgcgcgattggtcgtcagtcaccggcggtacaggatgccgccagacagatagaggcacagccacgtattgcgatcagtatcagtgcgcctaacacctttaccgggaagcctgacgacgccaccctgctggcctttgatcaacgtaacgctgcgcttaagcggcaactcatcaatgagctaaccgctgaagtacacaacccgcaaaagcaattcggacgcgccatttattccaatctacagcctaaaaaaccacgataa

SEQ ID NO: 181779 - DNA, 741 bp, Klebsiella oxytoca
atgaaaacaactttaggcaaggcggcattactggcgttaagcatgatgcccgtgacggttttcgcttcccactggagctatgaaggcgaaggttcgccggaacactggggggcgctcaatgaggagtacaaaacctgtcaaaatggtatgaatcaatcccctatcaacatcgataccacgtttaagacacacctttcaccgctggatacgcactacatcgatggccccattacgctcatcaacaatggtcacactatccaggcggggttaaagaccacaacagcggataccgttacgattgacggtacgccatttacccttcagcagttccattttcatgccccgagcgaaaacaccgttcacggtaagcactatgcgatggagatgcatctggtacataaaagcgctcaaggcgccgttgccgtcgtggcggtgatgttcgaccagggcgcggaaaatagcgaactgaacaaactatgggccaccatgcccgagaaagccgatcagacggctaaaatcgtcacccaaatggatctcaacgcccttcttcccgcagacaagacatactggcgtttcagcggctccctgaccacgccgccttgctccgagggggtaacctggattgtgcttaaacatcccctgacactttcatcagcgcagctggcaaaatttagccacgctatgcatcacgataacaatcgtccggtacagccgctgaatggtcgcgtggtcatagaataa

SEQ ID NO: 181780 - DNA, 1878 bp, Klebsiella oxytoca
atggactcactggcggcaggggtctctaaaaaatacaacatccgggtttatacggtacgccagcgttacagttcgtacagccgtgcggtaagggagtctggcacatcgttgcgtgtcagtgcagatgatggcaccacgctaacctttgacagctatatgaactggctaccgtataagcttggtactggtggtattacttacacaaaaattgctgaattcgtcattacgcgcagggcaggcgcggacggtgcagcaacagacttcagcgcgagtgcaaatagccagggtgacggctcgtatcgaattgtttctgatggtcctgcgtttactgaagtggaaactatttgctatagccaggtatccagcacctacccggaattctcaaataagtttctgaagttcactgtgcgcacaaaaatcttttccagtgggttggtgaaaattgacgccgtgacggctgtggatgtggtcattcccgctgatgtattgttcggtattcgcctgcgaatcaacctgacatcgacggcaacgaaagccgtgaaatcaaaccacaatattctctggtcagataactcaacaaaacagagcgtgtctctggtctacgctaacggcgacgcccgccgcgacagcacggaaaccatgccggtctacaacgtcacgtccggcacgaccggcaatacctcctatgcccgacaggacggcggcgcggtttctccgtataccactacaggcgcggtaccccagggctgggcctggtctgccggattcactgtcaacccgaaggaggcggcaacatcaaacgacgacctggcaaatcgcgttcagaatccgccagtgggatttgtggctcgtaacacaaccacgcagtacgcccgcacccgtgcactgatgaaccacatcggggatatcgtcgagggatacaccgactggtgggataatgaggccaccgccacggatacgggcaacggcgtcataaacaccctgggcggtaaaattgtcgccatgctgagaagcggcaagggggattttaactccgtgtacgcgctctttgaggcacatgctgatgcgcattacggtggcgtgacgaatatcaacatgggaagcggtgcagacctgaaagggctacagtttatttcccgcactatcacgccggtggtgtggtggctgtataaactggcggtgaaaaacggcgatacggcaaaacaggcagcgctgaaaacggccatcggaaacctggcgaatacggcaaaaatccagtacggcggcacccagaacggcaacagcaatttttatgcggctgctttccgtttgtgggcgatggcctccgcggttgggctggatacagacggcagctataagaccaatatggaccgcatcgacacgctatacagtgatgctaccgcgaccggatttgctaacgtgaaaaatatcatcacggataacaaaaatgagtcgatatcagcggcgcggtacctgcactatcaggtgtacgcgctgaataactacctgctgggatgcagagcggctgagcgatcgcctgtcgttgacatgacaacaacgctgcttaacgctatttccggatcgggagggctgagagaattcgattattgcatagcagaatcacgaagaggattgtttactacaccagcttttataacctaccccctagttttcaatggtgacctgtctactgtagaggcggcacatagaatgctggatgagtttagtcagtacgctaacggttggaatggtctagagtatcgtttgtgggacctggattatcaggttatccgctcaactagtttctcagaaactgggttcatggtgaatatccttacggacacgtggatggaatggtattttatgggtttgaaatag

SEQ ID NO: 181781 - DNA, 1086 bp, Klebsiella oxytoca
atggaaagcaatctcgctcttgggtcggaacataggaaaaattgtttcgatatcatgcgccactcagctgcatatttggtaatggttagccaccattttgctttaaatggattttcagagcctaaaatatttggttcgacaaagttgggaacgctggctgttattatatttttttcaatatctggatatcttatagcaagtagttttataaattccaaaaattccttatcttattttaagaagagagttttaagaatcttccctggtttaataatttgttctttaataatgacggttttcatatttcctttttttggtgaaatcaacactccttcagaatggtttatgagtttaacgtcattaaaatctttcctgttctttagtctgttcggttcacctggctctggagagttggttaatggattttcaaatagctatattttttataattctgccaatggaagtttatggtctttaaagtttgaatttctcgactacattgcgataatggtacttttcggattcataaaaaaaccattaatagcctctattatatttataacgctttcattctcaattctattcattaatagcaaactgcatttctctaatcaccatcttaatcttttatctgattactatatacatcgcgcagctgcatactcaatcccgttttcaattggagcgtttttatttacaacaaaaaaatggtgggccaatgataaacgcatacgaattacagctgttattttttcaattattacactgcttgcatataatgacagttctgaaattagccttgttgttcttacaatgattccaatattgattataatcatagggacatcattccatgacacaataataaaaggcaggtttgatatctcatatggggtatatatatacgcattcccaatacaacagatttttagcaactatattccaaatcaattttttgcatcactggccatatctacattttgcaccacaataatagctattgcctcatggttttttgttgaaaagagattccttaagcggagtaagaaatccatgatagttatgtctagtgtatctaataagtaa

SEQ ID NO: 181782 - DNA, 1266 bp, Klebsiella oxytoca
atgagtaaagaatcatacccaacgggcgttgagaaccacggaaaatcactccgtatatggttcatttttaaaggtaagcgtgtcagggaaaatctcggtgtccctgacaccgctaaaaacagaaaggtggcaggtgatctacgaacggcggtttgtttcgccatacgtatgggaaactttgattatgcatcgcagtttcccaactcacctaacctgaaaactttcggcattggcaagaaagatatcaccgtgaaatttctgtctgaaaagtggcttgagcttaaacggatggagatctgcgccaatgccataaaccggtatgaatcggtagtcagaggaatgctcccgaggattggcactaataagctggtttccagtgtgacaagggaagatctgctctatgtcaggaaagatatgctggcgggatcaggtgatagaggtttgagcgtggtcaccgtgaactactatatgaccactatggcgggaatgtttcagtttgctgctgacaatggttatgtgagtgaaaacccgtttaacggtatcaaaccgctaaagagggcccgggtagaaccagatccgctcacacgtgatgaattcgttcgcttcatagatgcctgcaagcatcagcaaacgaaaaacctgtggtctatcgcggtatacacaggattacgtcacggtgagctggtctcccttgcatgggaggatatagatctgaaagccggaacgatgaccatacgccggaattatacgaaactcggtgatttcactctaccaaaaaccgaagccggtacagacagggttgtccacctgatcaagcccgccatcgaggcactgagggatcaggcagaaatgacccggttaggcaggcagtatcatattgaggtacagctgagggagtatggcagaaaggctattcacgactgcacatttgtttttaaccctcagctggttaaaaaaagtggcaacgtgggctatctctacaaagccgattcagttggtgactcatgggatgcggcgcttaaacggtcaggtttaagacaccgcaaggcgtatcagtcgagacacacttacgcctgctggtcattgtcggccggagccaacccgagtttcattgccagccagatggggcacgccagcgcccagatggttttcaatgtttacggtgcctggatggccgacagcagcagcgaccagattgccatgttgaaccagaaattatcggactttgccccatccatgccccaaagcatggctataggaatatga

SEQ ID NO: 181783 - DNA, 243 bp, Klebsiella oxytoca
atgcaaacaattatccagattgagccaaacgaatgggtttcagaggacttgctgatggcggtcacagggctgaagcggggaactattacccgcgctcgaaaagcctcctggctgcttgggcgggagtataagcacgtttcccctgaaggcgagccaaagccaactagcgagtgcatgtacaaccgcaaagcggtagacgcatggattcaggcgcaaaaaccattgggtgatcgggcgctatga

SEQ ID NO: 181784 - DNA, 219 bp, Klebsiella oxytoca
atgagcgcagaaatcatcgatcaggccaacgagctggctgagcgccggctggaactgaccatccagaacatgcggatcaaccataacgcggtttcagctactcactgccgcgactgcggggaagagatacccgagcggcgccgggaactggtggcgggatgtcagcgctgtgctgattgccaggaagagtttgaagaacgtggtaagcaccagaggtga

SEQ ID NO: 181785 - DNA, 1116 bp, Klebsiella oxytoca
atgagcgcaaaaattatccagtcaccgggtaaatatattcagggggcaggacttttaaattctgtcgctgcctatgtcaaacacctgaacgcgaaatttttagtgcttggcgatgcctttgttatgggattgacgcaggaaaagcttagcgccagctttaaagaggccaatatcacctgtcaattttctacctttagcggcgaatgctcccgcaataccatcgcggccattcaggcagaagccgaggagaatcagtgcacggcaattattggtattggcggcgggaaaaccatcgatgcggcaaaagcggtagcctggtacatgaacttgccgctggtcattatcccgacgattgcgtctaccgatgcgccttgcagctcctggtccgtgctctataccgatgacggcgagttcgacgcttatctcgacctgcctttcaacccaacgctggtgctggtcgatacgcagatcgttgccaacgctcccgtgcggctactggcggcaggtatcggtgatgcgctggcgacctggttcgaagcccgcgcctgcataaaaagctcggccgcgacgatggcaggcggacttcccaccgtcgccgcaaccggtatcgcccggctatgttatgaaacactgattgccgatgccagaaaagccatccttgccgtcgagcgccatgtggtgaccgaagccgttgagcgcattgtcgaagcgaacacctatctgagcggcgtaggttttgaaagcggcggcctggcggctgcccacgctatccacaacggctttaccgtactggaagagacgcattcgatgtatcacggtgaaaaagtggcattcggcacgctcacccagctgatgctggaaaatgcgccgactgaagaactcgataccgttatccagctgtgcatcgacgtcggcctgccggtgacgctcaggcagctaaacgtgacggatgatatcgaaaataaaatgcgcaaagtcgccgggctggcctgcgtggagggagaaacgatacacaatatgccgtttgcggtgactgaggagagggtttatgcagctttactcgccgccgatagctatggatccgcatttatcaatgcccaaaaaacagcacgataa

SEQ ID NO: 181786 - DNA, 666 bp, Klebsiella oxytoca
atgaaaatctatgttgatactgccgatctcaatgaaataaaactgctggaagaaaatctaccgctggccggtgtaaccatgaatccgagcatcaccgcgaaatccggcattgcgctatcggttcttattccgcaaattcgcgctatgctgggaaaagacaggatgatcttcgctcaggtcattgcctccgactgcgcgggcatggtggaagaagcttgtcggctgagtgcaatggatgaaaatatcgttattaaaattcccgtcacgtcggaaggtttgaaggccatcaaaaagctgaaatcccatcaggtcagaacgctgggaaccgccgtgtataccaccacccagggtttgctggctgcgctggccggtgcggaatttgttgccccctatttcaaccgcattgaggcgctgtccggcaacggtcttgagacagtcagcgccctggttaagatccttgctttgcatgccccccactgcaaagtgtttggtgccagctacaaaaacaatcagcagttcctcgactgcctgctggcgggctgcgaatgcatcacgctgcctaccgacctggcaaaaaaccttctgcaaaaccctgccgtcgatgccgctgtggcccagtttcagagtgactggcaatccgcttacggaagccttgccatcaaataa

SEQ ID NO: 181787 - DNA, 1317 bp, Klebsiella oxytoca
atgaaaaaaacaggattgttcatttctcctgatggtaataatcaattcaagatcttctgcatcatctcgatgctgtttctggtccttggtttcagcaccggtatgatcgatatcctgaataaacattttcaaaatacgctcgagatcaccaaagcaaaatcggcgctaatccaatttgctaactatattagctattttttcgtcgctatcccggccgggatcctggcgcagcgctatggatataaatcggggattattataggcttagtgctgattatgtgcggtaccagtacgtttatgctcgcaacggtgcacggcgaatattttttctttcttattggtatttttattctcgccgccggactgacctttatcgaaaccatcgccaacccatacgtcattgtcctcgggaataaagacggcggtgcggcaaggctgaatatttcacagtctattgcgggtctcggcctgatctttggcccgctgatcggcggccattttgtcctctctgccacgggtgaggtgtctaaaaccaacgatggactcttcgtcccgtatctggggattttccttgcggtgacgctgattctgctggtcttcttcagaaccaaagtgcctgaggtgacgccggaagcagatgaaagaatcggcgcgaccgagaagcccttctggcagctaccgcattttgttttcgccgtcattgcccagttcttatacgttgccgggcaaacgggtatcttcagcttcttcatcaactacgttgtcgaacactcgccagccatgacgctcggtcttgccagcctgctgccatcaacatggacctttagcacggggagcttctaccaaattaccgaacgcggtgcgtcacaaatactggccttcggcggttttgggctctttatgattggtcgcctgaccggaggaatgctgctgagcaaaattaaaactcaggtggttctctccacctttgcgttaatcaactcagtgttgatggttattattatttattcagatggttatctggcaacaatctctttagttctgagcttttattttatgtcgattatgttcccggctattttctctctgggtatcgcgggacttggcggacaaaccaaaaaagcctcatcgattattgtcatgtccatagttggcggagccgtaatgcccatacttatgggcgctatcgccgaccattacgatatggcaacgggttttatcatgccgctaatctgctttgcgttcattctattttacgccttagcctggaccaaattatatcgtggacagaatagcgaaatcgcgcccagctattaa

SEQ ID NO: 181788 - DNA, 912 bp, Klebsiella oxytoca
atgcctcatgctaatccttcatgtctgctggcctgcgaaatcctctgggactgcgttgaagatcaccctcctcagcagggaggcgctacccttaatgtagcttatcatctgcaaagattaggttgcagaacgatcccggtatccagcgtcggtagcgacaggctcggcaatcagtcactcagcattattaaaaatgagtggtgctgcgatattagcgaaatcaaggtgcttaaagatgtgggaacgggcgttgttgatgtcaaaatcgacgctgcaggcgatgcaacttataacatccatacccctgcagcctgggattatattagcatcagccacagcgccaaaaatcttgcctgcagcgcctttgtttacgggtccgtggctttgcgcagcgcattcaaccagcgcgctttcgctgactttttacagatatatcaggggctaaagtgtttcgacgttaacctgcgcgaagggcaaaataatatccagattgtaggcaattttttacagcacgctgattttattaagttaaatgaaagtgaactggagcaggttgccgctcattttcatattaccagtgaaaatattgaagaacggatctttgccctgaccagcattattggtcacaagattatttgtatcacccgaggcgataaatctccggtgctttactgggaaggtaatatttaccacgggcaagtcatccgtgtagacgttaaaaatactatcggcgccggtgatgccttctttgcagccatgatcaacgcgttaattaaccctgacttcgaccccacgacagcgctatataaagcctcggcgttagggtcatgggtggcgacgaaagcaggcgcccagccggaatatgacaacaatataatggataaactttttaactaccaggcggtgctgtga

SEQ ID NO: 181789 - DNA, 507 bp, Klebsiella oxytoca
atgttgaccatcccactgatcgaagccaccgcagaaagcctggccccttacgcaaaactcatcggtttaccagcaaacagatccccttctgtagatcgtaccgatatcacttactttcacgatatttgcgatgcaaatgacttcaccaatataccggtagccagcttcctgaaagcgaaaccgcacccttttgtgctgtccaatattgaacgtcacatgcagaccgaagaggccgtgatccccttaaccggtgagagcgtgattgttctcgggccagtgggtgagtttgatatcaataaactggttgctgtccatcttgatggttctttcgggatcatcatgcgccgcaacgcctggcattttgcaccgtttccattagatgaggaaaatgccacctatatgctgctatccggccgccacactcctgacgatattgaagtgctggatattgatacggtgattgtgccccaggtgaagaaggaggagcgctcaaatgcctcatgctaa

SEQ ID NO: 181790 - DNA, 1005 bp, Klebsiella oxytoca
atggcaagcatcgcagatatcgctaaaaaacttaatttatccaactctactgtttcgagagcattacgcgattcggggctcgtgacgaaggaaacccgagagaaggtgttacttgcagcacaagaagtagggtatgaggtgaacgcaatagccagaaagctgcgtagcggtgagtcgaaaaccattggcgtgatcgtatccgatattaccaatttatttcacggtgaaatcatcaccgccattcagaaagttgcgatcgataatggctataccgttatttttggtacctcttcagaagatgaaactaccgaaaaagagcttatcgacctgctaaaaagtaatatgcttcaggggcttattattgttccgacacatcagtcaataaataacattagaccgctggagcatctgccgattgtcgaggttgaccgcctgtccgggcttgattccagcgatcaggtgctaattagcaactatgaaagcatgaagcttgctaccaactatcttatcagccaggggcacaaaaatattctctactgtactggtgatttagccattaccacatttgatgaacgcctgaacgggtttcaaagcgcaatagcggaagcagaatcagatattgctcacgaagttttgctggtgaaagatacgggcaagctgcaggccaggaccagcagtgaagttattaacaatctgaccgggaaaaagcggccttcagccattattgcggcaaatgactttattggtgaaggagttatttctgcgatttataaatgtggtctggcggtgccggatgacatctcttttttgatgttcgacgatccgcggtgggcaagcttcttcccgacgccgttaacggtgattaagcagcctgcatatcagctgggcttaacggcggctgagttgcttatttccagaattgagaacaaagaaaagggaagcaaaagagttaagcgcctcaccgctgacctgatcgtcagacagtcggtcgcgaaaatagggtag

SEQ ID NO: 181791 - DNA, 1197 bp, Klebsiella oxytoca
atgcagcgcaccggtttgaataacgcccgggtcaggcaggccaacaaatcaatttttctctcccacctctggcgggagaaacagctcagtaaatcccagctttcccagctcaccgggctctctattccggcggtgagcaacattcttgccgaactgcttagcgagggattgatcggccattccacggaaaaaatgagcaagcgcggcgtgaacagcggaagctaccagatccccgaacacggtgcctggacgctatgcatgaatatcacgccgaccagcattgagtatcagcttgccgatgcccgactgctggcggttgacggtcaccagcatttgcccatcgatgcccccacgccgcaggcccttctggaggccatcgtggaatgctggcgacgtatacaccgccgctacccgcagcacagcatcaatctcgcgcttggcgttcatgggcaggttgatccggtaaccggggtgtcacaaaccatgccccaggcgcgctggaaaacgccgattgaaataaagtatctgctggaggaacagctcggcgtgcaggtgcgggtggataatgactgcgtgatgctggcgctggcggagaagtggcagcatcagggtatacagccggatttttgcgtgattaacgtcgattacggtatcggctcgtcatttgtgattaacgatcagatttatcgaggaagcctctacggcagcgggcagataggacacacgattgtgaatcctgacggcagggcctgcgactgcgggagatacggttgcctcgaaaccgtagcgtccctcagcgcgttgaaaaagcaggcgcggatgtggcttaaaacgcagccggaagcgcagcgctctcccgagcaattaaccacggcatcgctcattgaagcctgggaacagggagacgtgcatattcgcgcatgggttgatagcgcggccaacgccattggcttaagcctttataatttcttaaatattttgaatattaatcagatctggctatacggacgcagctgcgcctttggcgaacaatggctggaaagtatcgttaaacaaaccggctttaatccctttgaccacggcgatacgccgcgagcgcacgccactcaaatcggctttggcaaactgacccgcgcccagcagctgatggggatcggttatctgtacgtggaggaacagctgcaaacgctgcgttaa

SEQ ID NO: 181792 - DNA, 306 bp, Klebsiella oxytoca
gtggatatcgaaggccacgcgcacttcttcgccgtcgacctggatcaactcctcagagaaataatcgttattgaacagacgaagccagccacgctgcgcggtacgcctcatttcaggcatgaacgcttcccgaagttcgacgtcggtcagatactcggtttcatcaccttcgagctcaagaacggcccggcggtaggctgctggcgtcagatgcttaccgttgcgcctgggcagttcgctgtgttcgtgggtattgttgtagacgtccacttcctcagcgatggcgtcaagcagctgctgccatga

SEQ ID NO: 181793 - DNA, 264 bp, Klebsiella oxytoca
atgagtacattagagagcgcaaaaaaaagccagaaagaatctgactggcacagggccgatatcgttgcagctcttcataagcaaggatggtcgttgcgtcgtctgtccctgcatcatggttacaaaagcgccggggctttgaagaatgccctagatcgcccatggccaaaaggccaaaaaatcatcgctgatgctatcgggatctctcccgatgagatatggcccactcgttatcataaagcattttcaggtgaatggaattaa

SEQ ID NO: 181794 - DNA, 726 bp, Klebsiella oxytoca
atgacggataaacctgaaaacaacctaaagagtgaaataggtaagcgtataagagctcaaagagaaggtttaaaactgtccaggcagcttgtggccgaacagttgggcgttgcgttatcaaccttgcaagcatgggagaacgaggatagagagccaagtgcaacacatatcttaaagctttctgaatgcttaaaggtatctgtggaatggttgattactggtgacgaaaagaacgatgccttacaactccctgcgccaataaacggttcaacagccgttgatgtgcaagggaaccatgtcgatctggaagagtttgtttttgttcctcgatacaacgtatcagcttctgccgggtatggggcgtggaacgatgatgaaagtccaatgtttacagttagttttcgccgctattgggtcataaaccatctgaaagctgacccacgaaagctttccgtcattagtgtaatcggcgattccatgatgggcgtcctgaacgacaaagatatcattctcgtaaaccatgatgatagggacccaagagaaggcatttatgttatccgcctagatagccagctgctggtgaaaagggtacagcgcttgcctggctctcagttgcgcataagcagcactaaccctgcgttcgagccttttgttattgatctggataacatacccagtgattttgatgttgtcggaaaggttgtttggtatgggcgggttatttaa

SEQ ID NO: 181795 - DNA, 3630 bp, Klebsiella oxytoca
atgaagacacggcagtatgcgcaaaaatcaatcttcgatctggaagcaatcttcgagcagtccagcaacaatgttagcgaacttgaacagttgttgagcgagctgacctttcgcaacactgccagggcgcggacgctgacggctaaaatcgagcaatctctatttgcacttagcggccacagcgtggtcgccatgtcggcttccagcccatcaacacgccatcccgattcggtgtccattcaatcttctcgagttgtgccccacaattcgcctgctgcggaagagcaactgcaactgaaggccatcccagactctgccatacgagagcaattcgacaaagaccaaatcgaccttggtccgatcccgtctttttctccatcaggtaaggcgaatgatgcgcgagcaatactggcagcatggacagccctcgaagcactgtcgcctcaaggttataaacgcccagaggatatggcaaccggcgaccgctctagggttgctctattggagcgaggtgttccatggggaccaaatgcccgcagcaagcccagttataagctttatttcgaggtcatcctcggctccatcgctctcgacaaggcgacggacgagctggtcaaggtttttggcgaggatgaggagcgttcacgcccggacggtaagaaagcggccatcggctcgatcctgatcgacaaagaaggctttgtgcttgagaacaaaggcgttgccgtgtccagttttgcctgggcactcaagccggctctcgatctgaagcttgggagtttagggaattggccgaatgttgagccgcgcattatcgagcatctggatcgaatggttcgccaccacaacaaagatggagaacccataccgatcgatctgaatgttgttcataatgcttataaatggcttgtatcgcagttcagtgtacccgagcatttggttgagccccccacattcgcgattaaggtgtttcatcatttcaaggctaaggcgccgcctgaaccttcgttactgaattccttctatcttgaagatctcggtgaagcaaccaaattgctcgagacgggcaaagccggaaccggtttgcgccgctacatgggaattggcagacctgaccagaaaattgacgtgctatcgcccatttccgcagttgagccgctcgtcgcaccgtcgctcatgccgcaggctcgttggccttcgaaaggcggccatccactggtgctgcttcaacaggctgctgtgaatgcggcgcgtgctgagctgaatgatgctccaggtatcatcggcgtcaatgggcctccgggaaccggaaagaccactcttctccgggatatcgtcgttggatgcattctcgatcgggccacggcgatgtccggcttcaacaaaccgcaggatgccttttccacaacaggcgagaagctggcattcggttccaatgcattcctgcacttctacaagttacatgcatccttgaagggccatgagatcgtcgtagcctcctccaataacaaagcagtcgaaaacgtcagtaaagagcttcctctcaaggaagccaatggtcgccatgaacagatcgcctacttccggtccatcagcgacctgattgcgaatcccaaacgcgccggctatttcgaagccgaggccgaggggggcatcccctccgacactgtcgaaacctgggggttgatcgccgcagctctcggcaagagcagcaaccgcggcgcgtttcagcaaggtttctggtggaatgaagacggtggtttccttacctacctgaaagcagctcgcggcataaatgtcatgcgtgagatcaaggacgagcgaactggcgaaaccatcgatcgcgtgatgcccagcgtggttgtcaatgagcggcccagcaccaacgaagcggatgctgctgcggcctggcagaaagcgcgaaccgcctttcttaaacttaaggagacgatagacgccgaaatcgccagcatcgaagagatgcgacgggatatccaggcgctcaagggagcgatcaccgaacttcaaagggctgaacagcgtcgaccgagtctgaatgaagccgtcgaagaagcacacaagactgctgaatcctgccaacgagagcatgagaaggcaaaatcgcagatcgagcaggacaagatcatgctcgacagccatcttgcttgccgtccaggtttcttctcccgtttgtttgcgactgcggcctggaagtcgtggagatcgacactgcagaagctctcggcgaccttgcagcaatcagtcatacgggcgcaggggacggacggtgccctagagcttgcaagggctgagtggagcaatactgagtcccagttacagcaactcgaccaggaaatttccagcaaatgtcaggctgtctcgaaattgaaggcaaccgaggcacaggcacgaaaccgtatgggagacagggtcgttgatgagaggttcttcgagcgcgagcacgagtctatccacctcactgcaccatggcttcccgatgaggttcatcgcctgcgggaggatcttttcgccgctgccctgactgtgcataaaacgttcatcgatgcttcggccagccgcttgcaacacaatcttgggttattgatgtcaggcatggtagctggtgccttccagtcttccgctcaccgtgaacttctccccgacctttggtcaagccttttcgtggttgtgccgaccgtgtccacgacattcgcctctgttcggacgatgttcggggatctgccaccagagagcattggttggcttctggtagatgaagcgggccaagccgttcctcaggcagcagttggagctatcatgcgggcaaagcgctccatcgtggtaggtgacccgttgcaaatcccacctgtagtttcacttcctgaaaagctgaacgccgaaatctgcaagttctttgacattgaccaagtcgaatggtctgcccccgcagcatctacgcagacccttgctgatcaggcatcgcgcttcaaatccactttcgtcatggacgtaggtgatcgagaagtcgggctgccattgctcgttcacaggcgttgccagaacccaatgtttgatgtttctaactccatcgcctatgccgggcagatggtccatgctgtcgggcctaaaaaacccggatctatcggctcggctttggggagatctcactgggtggatatcaatggcgatgctgagacgaagtggtgtcccgacgagggcgaagcggttgtgcgaatgctcaaagagctggcagcatcgggcattacaaatccggacgtatttatcatcacaccattcaagatcatagagcagaacatgcgtcggcgtctcgacagtgaaactgatctgcttcgaacgttcggcgtaaagctggatgaatggtgccgtgatcgtgtaggcacaatccacacgttccagggtcgagaggcggacacggtaatcctgttgctgggtgcgccgaaagcgagtcagcaaagggcacgtcagtgggcggcaagcccaccaaacataatcaatgtagccgtctcacgcgccaagcaaaacctgtatgtggtcggctcggctgctgcatggacaggggcgggaactagccttcaggtcctgcatcggcaattggcgaaatcagcctaa

SEQ ID NO: 181796 - DNA, 468 bp, Klebsiella oxytoca
atgttagtccgtggagacacggttttcgtccgctttttagctcaaaatgatgatggtaattcttttgaagtgcagacaccaacgaggcccgaagagagaattcgcactgggggtggtttgactgtcggatacaagctgccagtaaaccagaagctccttttttcggtcgctgagacgttagcccaagaaaatcatcttcaacctgagaaaaaagtagaccgctttcagaataattgcatctccatgttttccattactatagatcaaggcaaaactatacaagatgaagtcaacgaggaatgggtcactcgcttctttgaactctacgatgctcatggaatttcgacgaatattgtcgaacctagcatggtcgatatttattctgacctatgtgttgaggatggcgaagacgtttatctgagtgatggtatgtacatgcgcccagacgggacaacttacgaacgttga

SEQ ID NO: 181797 - DNA, 666 bp, Klebsiella oxytoca
atgagaaccgacaacttaagaatgattgagagtggggaatatgttttcgatatgttattggatagtggtgaattatactatacaagtcacacttttgacacgaaggaagatgcaaatagctggatggaagagtggcaaacttgggcaaatagtgtatcgagtggaaaagtaagtagtatttattatattttacaagtacctgatacttgggccggttcttcagataaaaataatccttattcggggctttatgtgaaaataggacgttccaataatgtgctaaaaagattatctaacttacaaacaggtacatttggtcaattaatattacacgctttggaacctggcggatcagaaaaagaaaattatctacatgaaaaatttagcaacgaaagacgtcaaggcgaatggtttatatgtactaaagaacttactaagcatatatttacaacatggtttagaaataagatgctcccaccagaacatcaaatgaaactaatgcaactcgcagaaagaattggtatttattcgcacatacatagtctaatgggggggaagcccgatttagtaaacccatcaattagtgaaccttgggaatgcgaaaaatatgttttcgttgatttggtttatagctctttagcaaaacaagttaataataaaaaataa

SEQ ID NO: 181798 - DNA, 198 bp, Klebsiella oxytoca
atgtcatacattcgagtagagaaagatggcctgcagtatgaaggtgagtatttctgtgaagagaatatggttacagtctttggggtgagaggaggacagtccagcgtggttcttaatgggatgacagaaatcgctgctgctcgtactgcgttgcgaaatcttattagagaaaatcagattgatcccctaactgattaa

SEQ ID NO: 181799 - DNA, 630 bp, Klebsiella oxytoca
atgacagaagactccaaacgcggtagcgcattaatctgcgctttaaaatctgacgaggtagtcgagctgagcaaggaatacgctgagcttagcattgacgctttgattgaatcaaaaacgcttgaatctatcccttttgttagcactgtggttggagtatacaaagttgccagttctgtcaggagtcagctatttactgaaaagatttttcgtttcctcactcacttctcagacctacccgatgctgaacggattaaaatgactgaaaggttgaatgaaaacgataagtttgctggccaggcaggtgcaagactgattgaaatcatcgaccggatggaaagcgaaagcaagcctgaagttgcggcagaatttctcaagtcattcgcacgagaagagatagattttaatgttcttcggcgtttgctcgttgctcttgaacgtattccctcatttgatatcagtgaactggcggcttttgttgccatcgaccctgaccaaccagtggaaatggatgaggcctttttagatagtctagttaatgctgggttgggaaagaacaatggggcatggaaaagtgtaattgttcctacggagttatgcataacttttgtgcgcgcaggaaggttataa

SEQ ID NO: 181800 - DNA, 123 bp, Klebsiella oxytoca
atgaatacaggagacgatgatacaactgactttcgcttctcgttcatatcgaaccttaggcttcgtaagcttgttcgcttagtgccagaagcggactttctgttattatgctgcgacaactag

SEQ ID NO: 181801 - DNA, 690 bp, Klebsiella oxytoca
atgatcatggcttatgtagtttgtgatcaagatcctcagtctgatataaacaaaattctttcagagcattcagttgatgaacatcactcatgcgcaagaatggatcaatctgaatctttaagagatttgaggtgtaaacttatttcttacttgaactcaaattgtcgatggggatcatttattatgccaagtgagtatcgccattgttgttattcggatgtgtcatttttattaagcttattgattaagaactttccagatgggaaagggaatgtttttttcgatgaaggtatcataaactctacagaagctctcagtctatgttctgatgaagtaaaagttataacatgctcatctcatgaagtttgtgggatacaacttgctgatttggtggcatcttttagtggtgttaggtttagagaaacaataactggaaaagcaaaaatcttaacttacggttacgactgcggctatgagcccccaatagaagcccctcttggatttgagctttttgctacgcttcgacagtctatgctcagggaaaatgaacctctcggggatgagatgcctgagtttgccacatttaaaactattaacaaagggttggttttgtcgaaaaacttaacaactgaatttagtcagttggcattaaaaacctttggggaagtgtacttaggttgcatccattaa

SEQ ID NO: 181802 - DNA, 855 bp, Klebsiella oxytoca
atgaaggtcctaattgattatttgcaactaggaacaaatggaatagttttaactgttttggggtggctttatcttgcttatgtaaaaaatataaaagcagaaataaagttaaaagatgaacaaatcaaagtttcagaaaagaacttggttttttggaaagataaagctaccgaattagagaaaaagtctcctgagttttttgagggagtattggctaatagaataaaactaagagagcaagaattattaaggttaaatgaagatacgataaagaacaagagcgaaattgaagagaaaaacagacaattagacaaactaaattcagagcttgaaaaagcaaaatattttagcagagcactaacctactatgacttagatattgatgatgaagttataatcccagaatcagaagttgaattgatagatttaggtgaggtttttgttgactctggctctctaatgattacagatccgtgctatattgatacggaatggaaaaatattgaatacgttagagaaggttcatatatcgacacccaatctggagatatatttaaattcgggcatgattttaatagatttgatgaaattctgtcaccatacaacaaagatataaatcagctaataaaagacgggcgtctatctttaataaaagaaaatcgtcaactatcgtattcttatgcaggtgcagcatatgccactcttacaaatgcaggttttgacattctcccatttgataatgggaatttaggtgctgccctatgtataaaaactgtttttggtgatggtgcatatagggtaatgggagaacaatataaaggaagaattataagaatatatattgacctacaataa

SEQ ID NO: 181803 - DNA, 768 bp, Klebsiella oxytoca
atgacttacacagaaaaggatccaaacggtaaaaaaggcactatggatcctttgttggataatcaaaaaggaaccactttcgcggaaaggttgcgtatagcgataggcgataagagcattcgacagtttgcgatagattgcggcatcagttacggagctatgcataagtacttcacagggacgactcagcctacacttgataatttggttattttgtccaagaccgcaggcgtaggcattgaatggcttgctaccgggcaaaacagccctgttctgacaggaacggaactacaaacggttccagcagctagcggagtcctggatgttcatggaaatgatgttgacttaggcgagtttgtgtttgtcccgcgctacaacgtagctgcagctgctggatatggtgcttggaatgatgatgaaacgccgatgttcacagtgtcttttcgaagatattggatcgtaaaccatttaaaagcagacccaacgaaactatctgtaatcagcgttgtaggtgattcgatggaaggagtacttaatgacaaggatattatacttgtaaatcatggtgataaggagccgagagaaggcatttatgtgctgcgccttgatggtcagcttatagtaaaaagagtccaacgcttaccaggctctgagcttttcgtgactagcactaatcctgcatacaagccattcacgataaatttaaataacatcccttcagattttgacgttgtgggaaaagttgtttggtacgggcgagttgtttaa

SEQ ID NO: 181804 - DNA, 288 bp, Klebsiella oxytoca
gtgacaatcagcgctgacctgctatcgcctcagcggccgatcgtggttatcggcgccgcttttggcgacattattctccatctcgatgcgctgccgcaaagcggtagcgatgtctccgcccgcgacggcggacggcagattggcggctgcgcgttcaacgtcgcccgcgcgctctcgcgcctcgaactgtttcccattaacgccataccggtgtggggaggtgatcgtttatgcatggatggatcgtcgccgcgaaaacagcgagaagccttacgggacaaggcttag

SEQ ID NO: 181805 - DNA, 1584 bp, Klebsiella oxytoca
gtgaccaccaaccctacaccgacaaactggttacctttggttgtcttatgctgcgcacagtttctggcttccgccgataacgtgacgttaagtatcgccacgcaggcgctaatgaacgatctgcacgccacgcttgggcaggtcagtacagcgaataccatgtatccgttggttgcgggcacgtttatggtggcaggcggaatgctggggtgtatctggggttggcggatgctgtttcgcatcggctgcctgatttttatcctcgccgaagcctgcgcctttttttcgccatcgatcgcgctctttacctggggcgcgcgtctgaccgccgggataggcggtagcctgatgatccccgccgtttttggcctgatctctgccctgtatcagcagcgacgacgggttgccgcctttggcgcgctgggcgcctccagcggcatttcattcgcctgtggtccaattgtatgcggatatttgctggaccacgtcggctggcgcatcgcgtttgcctcgcttggcctgctggcgctgcttatcctgctctgctccgtcatcatcccggcatcagaaaacaaacgcgccgctatcgccttcgataccctgggctttctgttaggcaccctggggctgttcctgacgattttcggtattctgcgcatcccggtctgggggctggttatgcccttcgacccggcagtgagcgttctcggcctgagccccgcccctttcgttattctctgcggcctgatggtgctgatgatgatgctgcgctgggaacgtcattttgaagccaccaccggccacgctctgctccccgcggttttcctgaaaacccgcctggtgcgccacgggctctatctcaccggttggatattttttgcctacagttcggctatttttaccgtggtgagttttgcgcagattgttaaaagcgtatcggcgatggaaacagggctgctgatactcccttttgcgatatgtctcgccgcctgttcgctgggcctgccgctgtttattcagcagcgaaaccctcgccgccagtgccagatggggctgacggcgggaatcgccggcgctctggtcgccgccgcggcgctgcacgtaacggggtttacccctgtactgatggcgtcagggctttgtttaatcggcgcggggatgggcaccatcgcggccaatgccccgatactggtcaccactggcgcagggaatcggcacgccgaacagtccggcggcgttcaggccgcctcgcgcgatatcgggcaggcattaggaatggcgttaatcagtaccgtcatgctcacggtgttgaccttcctgatgaaatatcaggtacagcacgacccggcaatgggcctggccgcccgacaggccatcggccatctcacgtttatcccctggacgagcgatcggactttccatcagctgatccagacacaaaacctggcgcccgccgatctctctggccttcttcagcattatcaacagagccggatgctgagcgcgcgttacgggctgctggcgatggcgatcgtgacgtctctactgctgatccgccttcgccatctgccgaagtcatcgtag

SEQ ID NO: 181806 - DNA, 249 bp, Klebsiella oxytoca
atgagttttcttctgacgccgggaatatcgctgacggagtgctcattgctgtatttgtctatcgtcatgaaaaatacgcaaacttttgacgtccgctttaaattctgggcagaaaaggtgaatgtcagagcgcaacgatacatcgtcagcattgtcattgaaattgaaaaactccatggcatgttacaacaggccgggaaacatatcttattcaacggctgtcggtattttcattttaccagtggttaa

SEQ ID NO: 181807 - DNA, 306 bp, Klebsiella oxytoca
atgctgctggcaactctctggaacaccggcgcgcgcatcaacgaggagctggcgctggcgctgacccggggggatttttcgctggcgccgccgtatccgttcgtgcagctggccacgctcaagcagcgcaccgagaaagcggccagaacgggaggtcgagcgtcgggcggtagtcaggttcatcgcctggttccgctttctgatcatcagtatgtcagtcagctgcagatgatggtggccactctgaaaattccgctggaaagacgaaacaagcgcaccggtagaatggaggatgagcgtatctag

SEQ ID NO: 181808 - DNA, 708 bp, Klebsiella oxytoca
atggctgactggtttattgcgactgagggcgtgaaggtggtgaaggacagcgccagtctgtggccgcagatcgttacggcggtttcatctgccggtgcggcattcggtggcgtgtggtacggacagaaactgataactcaacgggagaaggacgctgcagcagcgaagctggccagtgaacgcctcttcattgccaccgaactggtatttctgcttgagcgatttgcacagcgttgtctgcccgttgcgttagatcagggggatcgagatgaggatgccagatataaagctaattattttattcctgaactgagctacgcttcggtttccggagactggcgctctttgcctgcagatctcttatatcagctacaacaacttgaggtcctcagggaagagtcagtctcgatagtaaatactgcatttattgaaagttccccttatgacaacgacggcattattgagctgaataatcaggccagccgtctgggcatcagggccattcacctgtcccgccagctcagaagactgtgctcaatgcctactgaccgcctagaagatcgtaaatggtcattgtggccacagttatgtattgcggctggtcagagtattgagcgaggcctcagatatgcgcaaagcaatgctaaacttcaggttgctttagctcagatacctcctccccacgatttgaatggatattcacaatga

SEQ ID NO: 181809 - DNA, 360 bp, Klebsiella oxytoca
atgggacgttcaataccagtgaagataggtaagaaggaatttaaaaccaaaaaagccgccgtggactatttcatggatcagcgtgaagcagtcaaagcagtgggcccgctgaaagagggagagttgtttgatggattgcgcgttctttatctgcgttactgcgaaatcacagactatcccctgggcaaccgggagatttatgcattcagcgtaaattatgaaactcgtcataccgaccagaactacggtacgtatttgtgctattgggtacatttttcaccgaaagatacggatggattgtccttttcggttaaacaagcagtagatgcgatcgcccgcgctgcggctgaacaaccctga

SEQ ID NO: 181810 - DNA, 1089 bp, Klebsiella oxytoca
atgctcagccagcttaacctgcgttttcacaaaaagctgatcgaggcgctgaaagtgcgcgccggtcgcgaaaatacttcggtcaacgccctggccgaacgcttcctcgatgacggcctgaaaacggtcgcgcccggcgacgggtattttcagctggtcgccgatcctgaggctacggtccggcagctgtaccggcatatcattcttggccagaccttaggcacgtcagcgctctcccgcgacgaactgcactttgtcctggttcacgccagggaggccttcctgcgcaggcataacaggcttgccaccctcccggctctggacacgctgctggacatcaccggcgacctgctggcctggcaggtggagcacgatcgccctgtggacggtcactacctgaaggggattttccgcctggccgggaaaaactggacggaagagtttgacgccttccgggcagagctgcgccccgttgtggaccagatgtatgccgaacacctcctgcgtccgctggagagcgactgcttcaacctcgccgatattcccgacagtgctctggctgggattttcaccctgccgcggctgaaaaccgttttcccgctgatgctgcgcgggctggactggagcggggagaaggcccgagatctggctcaggagctgcgcccggtgatcccggccgtcacgcaaaccattgaggccggtacgctgcgcctggagatccgcatcgacggccagcaccccggcgcgcgcccgggcgcctggtatgagacaccgcggctgcacctgctgatcaccggccaggacttcgtggtgccgtacggctgggaagcgttctccgaattgctgggcctgttcacgctgtacgcccgccatccggaagccctggcgcacggccaccagggcgagcgcgtgatgttttccccgcccggacatgtcacgccggagggattcttcgggatcgacgggcttcggatatttctcccggcagaggcctttgagtcgctggtcagtgaactcacaacgaaatgtgctgaaggtacgttggcggaggcccttaccgggatgcgctgcctgtacggagatctgtag

SEQ ID NO: 181811 - DNA, 2268 bp, Klebsiella oxytoca
atgaaaatacgaagacagttgtggaaccgagaagggcttgatgcggcagtcgaatctgcggctgatgaccgttacggattcaaaaccattgctgaaaatattgcccaaagcgtcctttccctcccgctggacacttcgaacgtcattggaattgaaggggcatggggatcgggtaaaactagcttgctgaatctgatattaaaaagccttaatcagacaaaggatggccacacgcatgtgctgcatatttccccctggctgagcggcagcagcccggttgaagcgctctttcttcctgtggccacggttatccagcaggaaatggaaaaacgccatcctccgaagggtctcaaaaaactctggcgtaaatatctgctgtcgccggaagcgcagcaagtgattgaatatgcacagaatacgtcgtcacgagtcctaccgctggtagagtatatcgggcagttttcccgtattgttaacggaatagctggcgggataaaagtctttaccgggacgcgtttcgcagtaaatcaaaaaacaaccactaaactgcgggcggaaattgcacaacaactggtcagtctagatcagaaattcattgtcgttatggatgacctagatcgtcttgaaccgtcccagattgcagaagtgttcaggctggtacgcgctgtggccgatcttccacgctttacgcatattctttgttatgacaggaacatcatcacgcatgctgttgagcatgcactgaatgtcgaggacgggaaccgttatctgcagaagattattcagctcagttttaagatcccacgacccgaaactttcgatctccgctatgaatttggtaagcgggctgccgatttatatgagcaaataaatcatcaacggcctgatgctgcaatgttagatgatcttgccaaggtgtccgatacatatggtgcagcattatccactccccgtgagatacatcaggctatgaactccctcattttcctttatccaggaatgcgggattttgtgtattttcctgatttgtgcctgcttcagcttataagggtgactaatccagccctgtatgactggaccgagcattatcttacagagcgggtagtggtagagacaggtcagggggcacttgctgacggagaaaaagaactgtttcagcaggagcttgtcaccctactgaagagatttcgggcgtccggcgcaagctcatttttgacgctcgcacactggataccggggatcaacgggcatgatgatgaacatctgaatctctttgagccggtcagtgaggattttcgtcataaccagacgaccggtaagcgactcagcagcgtgacgcactggcgatattattttgctttttctgcgcctcagaatgtattgccgtctgagtttttcgatcgactttttgtgctggccgctctaccagaaaaggagtcgcaactgtctgaacagctattgtcgaaaataagcagtgaaggcagcatgaccggtacctggttcgaacatattctgagcaggctgactccgggcctgataagagaacatactttcgaagagtgtgcagggcttgttaagtttttcttcgatcacacggatgaggtcagcactcgcttccgaacccgtaacccatggttttcgctgcgtgaaatgggcattaatcaggttgtaaggcacttgctgaagcatatgctgaaactcgacgaagccagaacggctgcgttactggagacgttcgtcagcagtggaacctcgccattctggacagcagattttatgcgggatcttatctgggaacacggtctggctcagaacagggtttccagtccttctgaggctctgctgagtcgtgagattaccgaacagctccgcgacagatttgctgcccgtatggatcaggaagaaatccggggtcagttgctttcacgtcagtcactcctgggatatctgtatgcatggaaagagatgagttcgctggaaacggtcaaagactgggtacaagaggtttcttcgactgatcatgggcttatcgatttattaatgagcttacgaactaacgtattcagttcagataaaggcgcatacaggcgaattgatcatgatcaggttaaggacttttttgatgactgggatggagtcagacagcgtgtcaaacaggtgttagaggataaagtgttagatcctgaactgctgaaacttaaaagtgacatggaagtaaattgggttgaccctttccaaacggacatccctgccttaaagtcggactga

SEQ ID NO: 181812 - DNA, 2679 bp, Klebsiella oxytoca
atggtaggatctcgctggtataaatttgattttcataaccatactccggcttcacatgattacagaatgcttgatatcactccaagagaatggcttcttgcttacatgcggcagcaggttgattgtgttgtcatcagcgaccataacagtggtgcctggatcgacatcctgaaagatgagctggctaaaatgttacaggatgcgagtaccggcgagctgcctgaattccgaccgctgacactttttcctggggtggagctgacagcaaccggcaatgtccacattttggcagttcttcacacgcacagcaccactgccgatgtggaaaggcttctggcccagtgcaataacaactgccccattccacgcaatgcccaaaatcaccaactggtcctccaactgggaccagccggtatcattaacaatattcgccgtaatcctgaggctgtctgtattcttgcccatatagatgcggttaaaggcattcttcaaagcctgaccaatcagggtgaattgactgccgcttttcaggaaaaaccccatgcggttgagatcaggaatcaggtggaaaatattaccgatggaacccatcggcggcttattgatggtttgccgtggctacggggctcagacgctcatcatcccgaacaggccggtgcacgcacctgctggttaaaaatgtcgtcccctgattttgacgggctccgtcatgccctacttgatccggataactgtgttcttttcgatcagcttcccccggaggaacccgcttcgtatttacgtagtctgaagctcagaacccgttactgccagcctgcagatcaggacgcagcatcagtagaattcagtcctttttataacgctgtaattggctccaggggcagtggtaagtccacgctcatcgaaagtattcgtcttgcgatgcgcaagaccgggggactcactgcgtcccagaaccggaatctgagccagttcagtgagtcgggtatgacagaagattccttcatcgaatgtgtgtttcataaagagggtaccgatttcagacttagctggcgaccgggtggtaaccatgaattacacatcttcagtgacggcgagtggatacctgatagctactggtcggccgaccgtttcccgctctcgatctacagtcaaaaaatgctttacgagctggcttcagacaccggtgcattcctgcgcgtctgtgacgagagtccgttggtcgataaacgggcctggaaggaacgatggaatgagctggaacgggaatatctgaacgaacaaataaccctgcgtggcctccgggcaagacaggtgacagccgactctctgcagggagaattatctgatgcactgcgtgccatcaaccagctgcagtcaagcgcctactatcccgtctgcagcctgctggctctggccaaaagtgagctttctgctgcaacctacccactggagctctacgagcagcatattacagccattcagtctctggcagcagaaccgcagcagatacctgccattccacaggatccgtccggcccactgacggaattcatggcacgcctgtcgtctgtacaacagcattacgaccagcgacttaatgcactcctggcagaatgtgctgcagagctcacaggcatcaggcaggaacaggcgttcacagctctaggagccgcagtcagtagccaggaggctgcagtggaagctgaggctgttgccctccgggcccagggactaaatcccgatgtcctcaacgaactgatggcgcgttgtgaagcactgcaacatgagctgagaaattatgacggccttgacggaatgattaccggctcgcaggcgcggtctgagctgttgctgtctgatatgcgtgctcaccgaatgactctgacacataaccggaaagtatttctgtcttccctgtcacttaccgatctggacatcaagatccttcccctttgtgccccacatgaagagatcgtgtctggttatcagacggtgactggcatcagtaattttgccgaacgtatctacgatcacagtgatgggaatggcttactgcatgcctttgtcagccagcgtccgttcagcccccagcctgcggcaacagagcaaaaatacagggcgctggacgaattgaaagcgttgcaccaggaaatccgtcagaataactcaggggccggatcctcgcttcatggtactttccggaatcgcctcagaggtctgaatgaccagcagatggatgcactgcaatgctggtatcccgatgatggcattcacatccggtatcgggcacccggaggacaaatggaggatatttcgtccgcttctccgggacagaaaggggcgagcatgctgcagttccttttatcttatggcactgatccacttctgctggaccaacctgaggatgacctggactgtttgatgctgagcatgagcgtaatacccgcgattatgtctaacaagaagcgccggcagcttattattgtgtcgcattctgcccctatcgtggttaacggagatgcagaatacgttatcagtatgcagcatgatcgtaccggcctgtatccgggactctgcggcgcgcttcaggaagccccgatgaaggctctgatatgcaggcaaatggagggaggcgaaaaagcgtttcgttcgcgatatgagcgtattctgagctga

SEQ ID NO: 181813 - DNA, 624 bp, Klebsiella oxytoca
atgagcaaactgccttcccccgacatggtccgtcgcattgaggacgccgctgcggcactcatcgcggccggcaccccgaacccgaccaacgtccaggtgcgcgaccacctcggcggcggctccctggccaccatttccccggtgatgcgcgcgttccgcgcccggcagcgcgaacaggcccgggaagaaaccctcccgttaccgccggagctgcagcagctgctgactggtcagctttccctgctgtggcaggcggccgtgcagcaggcggacgccggggcgcaggccgcgcgcgagcaggccgacgccgacattgaacaggccgacatcgagcgcgacgccgcgctggcgaaagtcgccgaactggaaagcgagctggcggtgctgcgggaggttcaggccgaacgtggccgtctgctgcagcaggagcagacgctgcaggaacagatgatatcgctgcgcgaggaggtggtacgcctgcaaacccggagtgaacacctgaatgaacagctgcaggagagccgggaggaagtgaaaaccctgcgggccagtgaaaaggcgctgcagaaagaactgctgatgcaggcccgggctgagccgaaaggcgggaaggtgacaaaatga

SEQ ID NO: 181814 - DNA, 504 bp, Klebsiella oxytoca
atgacaccagaaatcagacgccgtatccacgctttccgcaacgccctggtgcttgcggccgacacccgctccaatgaatgcttccggatggaccgatggaaggagctgaatgccttcccacacggctgctgcgatctggccagcaactttctggcgcagtatcttcaggacggtgatccgtccctgaagccggtgattatccatatggagacgactgaggatttccgggaagagaacctgtcgacagtaaaatcccacgtcatcgtggaggtgaccggctggtttgtcgaccttaccctgaaccagtttgcggaatatcaggaccgggtggtgattgatgacagaaccggcacggtgggctccctgctcaaagatatccaggccagtggcggaacagtcacgaagcgctgtattcagctggatgcggggccggacgaagacggtcatgaactctatgtctggcttcgggacactgcagacaaccttctgacgtcagtgaaatga

SEQ ID NO: 181815 - DNA, 1137 bp, Klebsiella oxytoca
atgagaaggtctgaccaaaatgttcctccggaagggcacggtaagtcatccccctttatggaagaggttagggcggtagcaaaagacatttacagcagcccggctaacaggaaactggcaaaagatttgattattgaggccattaagggagtacccctcctgggaggctctgtttcggccacagaaaagtttattcggggtatcgccgggatagaacgggagcaaaggcttgaacgtcttgagacgtttcttctgggacttaatcgtgattatgatgaaacagtggaatttcgtgaggcggatctgttaccggtcataagaaaactggcaacagatgatgaaaaatcaaagaccgaatattatacacgcctgtcggtgacgctgggccgaactccactcagcgaaatgccagatgacaagcgataccattttattcgccttgtcagcacgctgaccagctatcagatcaggtttgcccgggaacttaaaattcgtcagaccgtacctgtgcgtgacagtgcctcctcagaagaggccgagcaggctctgacgagccaggacagtggcatagctattcaggcggtgcacgccttacagaacgcaggactggtaaaagaaagagcagcaccggatacatggaaaggttcaccgtcaacacctctgtacgaaacgacctctgactttgacactctgatgagtctggtgtttcacccggatgattttgcgccagagttggtcgggttaacgcgcaaagagataagcgatatcatcattgtagggacatacggttttattgataacctgtattctacctatttacctgatgctcttcaccgggcgggtataaatgcaaaaatagtcaacagtaacaacgatcatctgatgacagactgggctccgctttatcttcatacaggacaatatacccatggtaatgatgaatatgtagaagttaatcttacccgggaaggtacacgtccccgacttaatgagacagtgaaatactacacctgtcggtttgataaaaaaacctacgtgcagcccaggagcagaagctcaggtgacgcgaaaaaattctgtaaggaaatggacagggtagtcagttgtgtaaagacacaactaaaagaactgaaataa

SEQ ID NO: 181816 - DNA, 762 bp, Klebsiella oxytoca
atggccagaccagtagatgtagaacgccgaaataaaataatcaatgtggtattaactaacggcagagcaaccattagtgaactggcaaaaatgttcaacgtaactcctgaaacgatccgaaaggatgtgacagagttgcatgagaaaaatatccttcagcgaggccacgggattgtcctcccggcaagcaattacactgaaaatccattgccgttcaagattagttcacatgccgaagaaaaatccagaattgctaattgtgccgtttccctgattagagaaaacaatgttattttcatcgactccggaacaactttactgcaacttgctaatgtgctgaatatgtatgaaaacctgaccataattacaaattcgatgatggctgcacaggcactttcaaacagtaaaaatcagttactggttaccggcggtgaattaagacctaaaagttattcatatgtcggagcctggacgatgagggcattacgtcagagcaatattgatatcgcattcatgggctgtgatggattccatcataatggtcctactgtaggttcatacagagagcttgaagctaaagaaatagtacttgaacaagccagtaagtcgattcttcttgcagatacctcaaaaatttcattacagggattatattgttattgttcttacagtgaactggatacattaatctttgagagggaattgacaccggatgaaaggaaatgtattccggaatcagtcaatattttgaaaccattctga

SEQ ID NO: 181817 - DNA, 645 bp, Klebsiella oxytoca
atgactgaaattatatgtaaagctgtactttttgaccttgacggaacgctggttgattcgggtaaatgtatagaagaattgtggcgtgaatgggctgaaaagcatcatttagatataaactatgttcattccataatacatggcagaacaatagaggaagcgctttcaaaaatatcaccgcattttagtaatgaaaaatgtgttgaagaagttaaatctctcgcgattgaaaaactgagtaaaatggctccggtatcaggtgcggttagttttttatcctcattgcctcatgatttgtttgctgttgttacatccggagcgaaaaaggtggcattgccaagcatgtatggtgcaggcattccggtcccggaatgcataattacagccgaagacgtccagaaaagtaagccatcaccggaaccctatctgctggctgctgagcgactcaataagcatccgggagattgtgtcgtttttgaggatgcagatgccggtattacctctgctcttgctgcgggcatgcgggtcgtcgttgtaggttcatcactcgatctaaaatatgaatatcagaagcttcttcgggtagataattttaataatattaaagtatcatttgacggtgacaaaatcataatttcattatga

SEQ ID NO: 181818 - DNA, 735 bp, Klebsiella oxytoca
atgcatcttaccccatggctaaaaacaaaaaaagttgagctgacttccagactaatgattggaactgaacagtacgacacggccgatatgatccgggatgtgacgatggctgccggtgctgaactactcattgctacaatcaaccccaaagatcggagtgctggcgtagctattgctgatgtcgctaaagcatttgaagagaaacaatataaatttgtccctgtttcaacaacatcatttgtaaatactgctcaggatgctgtagatacagcgatgaaactgcgtgacatgttcgatattgaatttgttaagcttgatgttcgtaacgatcctcgtcaacgctgggcaaataattttgatgtcataactgctgcagacattctgctaaaagaaggttttgatgttatgcctatgattacaccagatccctttgcagccttaaaactacaagatatgggatgttgcgctttacgtttgtccgctggagagcttgggaccgggcgtggtatttacaattttgaagccatggagaatgtccgaagtatggtggaaattccctgtgtcggcgaaacaggcattctggatgtcacagaagtaactcagttgtttgacctgggcatggacgctgttcttgtgaattcggctattgcacaggccagtgatcctgttgcgatggccgcggccatgcgcctggccaccgaaagtgcactgtattacaagaaagctaaaggttaa

SEQ ID NO: 181819 - DNA, 726 bp, Klebsiella oxytoca
atggagtcactcagagataaacgtcaaatcaatgtaattagtcctcatggacagaaaaaaatatctaattcatcagtttttattgtgggatgtggcggtctgggttgtcctgtgtctttatacctgacagcatcaggagtcggagaaatatcaatcattgatgacgatgttattagtgtttcaaatcttcacagacaaatattgtttgatgaaagagacgttgggaaaccaaaagttatggtggctgctgaaaagctcaggaaaattaactctgctgccagacttaatgtttatcgggatcgtatctctaaacataacgctgagaaatacttaaaaggtcatgatcttgtcatccttggatgtgataattttctcacccgttatatagtgaatgatgcatgctgtagactaaatatcccttttatcaatgcctccgtacagggtgatgagggttctttatcttattttgatattgagcatggatgttacaggtgtatcttccctgaaataccgcctgatttagttttgcctactccagaagaagcaggagttctggggcctgtggttggtgttatcggaactacagcggcaactttggctgtgcgcattctcaccggtaattacgaacattatcttaatactatttataacttcgactcaacaaccttacaaatgaatacttactcttttaccaaagaatcgtgttgtccaggttgtaaaaattaa

SEQ ID NO: 181820 - DNA, 261 bp, Klebsiella oxytoca
atggaaaaaataacagttcagatatcaatacctaaggctattggtgactcaaaaacggtatcagtacctcgtaacaacacgcttattgaagcgcttttaacaatgaatcaacctattgtaatggataaaataatgaagagcagcactgaatttaatcagttcgttcttatctatcacaacaaggctagagtgaaaaataccgattttattcttactaatgattgtaatatagacataattatcccgatggcgggaggataa

SEQ ID NO: 181821 - DNA, 447 bp, Klebsiella oxytoca
atgaaaattgcaatcgtaattgcttcaaatggtttactcgccagcgaattggtcaaagtagcagaacgtactgttgggcagttagaaaatgtcagggccatagaatttcacgatagcgaaagcattgaggaactcgtaaatcgttacaggcaagcaagcaaggaactaaatactaccaatggcattgtttttttaataaatgacagattgagttgtcaccattacgttgcaagtcaacttgtccatgaactccaaaatggctgcgtcattgcaggagttaatcttcctatgttaatttcattatttctgtatgaatctaatgaaactgaaatagccccttttgcttccaaagcgaaactatatggtatagccggtattcagctaactgaaaaaagcgatattgataaggcgattaatgataaaaacaaaagcaatgaattcttttag

SEQ ID NO: 181822 - DNA, 489 bp, Klebsiella oxytoca
atggctgcactaaaatcagatgtgaaagccttcatcattcaaatgcttgcatgctttgatagcccttcgcaggtggtggaggctgtccagaaagaatttggtatcaaaataacccgccagcaggctgaatcccatgacccaacgaaggtcagcggcaagacgctggcgaaaaaatgggtcgacatgttcaacaccacccgtgaccgcttcctcaatgaaatttccgatataccgatcgccaacaaggcctatcgcctgcgcgtcctgcagcgaatgtccacggacgccgaaaaaatgaaaaacatgggcatgacggcgcaattgctggagcaggctgccaaagaggttggggatgtctacaccaacaaacagaaggttgagcaaagcgttgttgccacccataacgttatgccggtcccgtcctgcgataacgttgaagactgggaaaaaacggcgcagaagcagcagggcgaggtattgggtggatga

SEQ ID NO: 181823 - DNA, 480 bp, Klebsiella oxytoca
gtggcaaagaagtccagaggatgcgtaaaaagcggttcagtttgcggctacaaacggaaagatggttatatcagagtgaaagttgatggcgcgttggtaatggcgcatcgggtagtctggaagatgtataacggtgatgagcccacctttatcgaccacataaatggcgatcgctcagataaccgactcgaaaatcttcgggctgtaacgagctctgataataagagcaatgagtcgctcagggtcgattccacgtcaggctttattggcgtgacctggtacaccccaaccatctcgaccaaaacggcaaaatgggtggctaaaattgccaaagagggcaatgagaagcatattggctactacatcgaactcaaagacgccgtccttgcctacaatgcggagtgtttgaaattgcatggtgattacggattacgaaaagtagaacacaacctgaataagctccgagagttgggtctttga

SEQ ID NO: 181824 - DNA, 183 bp, Klebsiella oxytoca
atgagcggtgtttatttcgaatcaaagcgacttggcgatatctcgtgcacgcacgttaagatcggcggcatcgaagcgatgatgaagcaggtaggtgatcggaaagtcatcaagtcacaaggtcgcggcaatgtccgccaagtaaaagctatcgtcagagctttacacaaaaccacccaataa

SEQ ID NO: 181825 - DNA, 363 bp, Klebsiella oxytoca
atgtcatcggtagctaattggtcatacaccgcgacggcgacaatctggcggcgcatacgcgatgccgacggtagtgataccgacggcggaggtcagccgtacggatgggaagcgccgatcgccattctctgcgactaccagggtggactctctgcgaaaatcggtgaccttggccgggaaatcgtggtcaaaaacacgatatggaccgagtacgcaacggcgcgggagggagattacatcctgattggcgcttcgaccgatgcagcaccgccggatgaggctgatgagattcggcagatcgtccagttcgcagataccttcgagcgactggctgacgatttcgcactgattacgggagtctga

SEQ ID NO: 181826 - DNA, 426 bp, Klebsiella oxytoca
atgggcgttaaagttcggggagtctccagggtcagcaataacatcaatcggctgattgataatatcgaaaagcgaaaaaccatgcgggcgctctactctgctctgtttgagattgggctggagtccgcggtgctgattcctatcgataccagcactctggttaactctcagtttagagaggttgttatcaagggcaacagactaaccgggagaattggttattctgcaaattatgcggcgtacgtgcatgaggccaaaggtattcatcttggaaaaaacaccccgcgccctgtaagaaaaggcgaatcgcccggctcccgtggaaatatatgggatacatcaggcgagccaaaattccttgagaaaggtgctgaaaacgccagagacagagttgacgcagttatacgcagggagatggagctatga

SEQ ID NO: 181827 - DNA, 393 bp, Klebsiella oxytoca
atgacacctcctatgcacaggcgggttcgaaatgtctttgttgagtcaggattgactgccggatacatcgttcagtcactgtcatggaatgataccggcaaggcatctgaccgctttattgtgttccgaccaaatggtggcacgccagtagatcgtgatatggccgctgattactacgtcatggtggacgtgataagcaagggaaaggcatctgctgactatgcgcagtcagagaacgacgctcaggccatcatcgattacgtgcagcaaaacccgatgacgcacacctgccttgggcagatatccaacatgggcggaattccttcgcctgttatcacagccgaggggcgtatggtgtggcgcctgcagttcgcctgcctctttggcggataa

SEQ ID NO: 181828 - DNA, 753 bp, Klebsiella oxytoca
atgcaaggctgctccgacaacggacaactaattggtcgcgctaaggcgctggaactggcttacggctgtgccgaccagtttccggcggaaggcgactggaaactgatggggttgccaacatcggcaacgtgggaccttagcccggaggctctgacctctgatgcagataacggcggattcagttcaaacctgattgccagtctggacccgacctactccatcgaaggggaggttcgcgttaaagaccgcactgatgagtttggcattcagcagttcgtgaaatacatcgtcgatgaggttcgtgcccgccgccagccaggtgtatggatgcgtttccactggggagattattaccacatcggctatatggtcccatcaggagccagtgacggcggtggtgtgaaagaaatcgtgacctacagctttgagttcaaactggctgacggtcagactttccagatcaccgaagctgatggtgacattctggttaccggtgtaagtgttgcgccgacgaccagttctattgctgctggctccagcactacattcgcggtgaatgttgcaccggaagatgctgataacaaactgttcacagccagctcatccgtgccgacacgtgcaaccgtcgccatcactggtaatacggtaaccgtgtcagcgccgtcaggtgcaacggcgggaacagcaacaattactgtgaagacggttgatggtgaattcgtggctacccacgtggttactgtcacggcgtaa

SEQ ID NO: 181829 - DNA, 678 bp, Klebsiella oxytoca
atggttccgctaaaagagctgggagaatgcctggtaaccgtcggggaccgggattattttttccggccatcattcatggctatgtcgcgcatcggcgagccagcagaaatagttcagacgttctatgacctttgcaacgatgaaataacacctctcattcagagggttgtcgaagcgtacggcagagtgcctgaatggctggctaaacacctttctgctttacatcttgataagaaatctctactggccgcccacacggtcctcaccgcttgctgcaatgatgacataggtgatctggttggctggatgaagcccggcaaaaccaaaagaagggcgtttgtgtggcataagggcgtcatgaatccgcaggatatggtcatccttgcacaaagtctgatgatgcacggcattatcggaaaggccaaagtacgcaaacttcagcgccatgagacaaatgaaaaaaccagtgagttcagagctgccgattacgttatcgctgcacgcaaccacttcgggatcagcagagaggaagctgaaaatctgacgatgaccgaattcagcctaatgctcatcgccaaatacccggatcagaaagggtataccagggaagaatacgatcatgcagctgatgactactttgcgcgccgtaagcgcagacaggctaaagccaacaaataa

SEQ ID NO: 181830 - DNA, 756 bp, Klebsiella oxytoca
atgtctaatatcatccctatgaattacgatgaccgttcattcccttttacggcagattgctggttcaacgccacagttgctgcaaagcatcacggcaagcttccgaaggactggctaaagactgaggcgacaaaaatttacatcgccgaattggctgaagagcttggaattgctggctccagcgtaaaagaggatttttctccccttttagtcagagtggagaaagggcgaaacggcgggacctggcttcatccggagttagcggtggaattcgcccgctggctgtctgtcaaattcgcccgcgcctgtgaccgacacattaaaaatctgctactgagtaaaaacttccagctcactgaagatcaaattgtcggcctgatggtctgtcagcaacccacctcttgggaaaaacgatttaaagacccgttctaccaggcgctgtcgaaaatgtccggccttccttactttggtcatgtcggtggttgcccggcgctgttcggtcagatcaccgctcgatgggtgtacggtgtcgcacttcccgattatgtctatcaggcagcaaaacaagcagcgggcgacagcagagagaagattcaccagcacctcaagcctgatgcgctggataaggtcgagcagcaattgatcgccgttaccaatatcgcgaattgcagcattgaccagaaggacttcgaagcccgctgcatggctgcatttcccgttaaggggcagatgaagctgctgtatgcggcggcttga

SEQ ID NO: 181831 - DNA, 255 bp, Klebsiella oxytoca
atgaataaccgaatcgttgagtgcgcctccagagcggggcgcgacttctcggagttcatgaaaggcgagaagaacatgatggaggcgctgcggtctgcggaggaattcaccgagcagttacgcattcacggctgcgttaatcaccacttcgtcaatttcatgatgatgaaagcgatcatgaaggtgttcgacgacttgcgccgagaggagttgcgcgaagaacgacgacgcaaacgcgaagagaagaagaaataa

SEQ ID NO: 181832 - DNA, 321 bp, Klebsiella oxytoca
atgtggaaaaaaacaatatctgtgatcgttgttatccttatcgctttttcaatttttgtatacacaagcatttcgttttttgctgtgcagccaattggcgcgatccctgaaggtgcaacgtttataatgtggaagaaggggaaaatgagtacattcgaaagccctgatggattatgcatcaaagtaaccggcggggtaagccttatgtgtcgtagtatgatgcttagaacagctatggatgatagggctgtgctctttaaaatgccatacattaagtctatatacttaaagtcgactggtggtaaagagtttgacagatag

SEQ ID NO: 181833 - DNA, 435 bp, Klebsiella oxytoca
atgtctggatttgatgtacctggttccccagaagattattttcacactacaactaacaccgatggttctcctaaatacacggcaaaccgtgcagcaataagagcttatgcacaagctagtatggatagactttcagatttatcaaaacaaggtgaaaacgtctacgccgcctctctggatgataccgacaagctcacagcgttccttcatggcatacctgaagaggcaaaaatcgccatttacaatacgctttcgcaagaactcgaagcaattacgagcgcaaaaaacgatgaaatcgcaaagattaatgctgaaactgaaaggttgaatgctactgtcgctcaaaaagaaatggaccttgcaaatattggctctgtcataggtgccatagtcgtcgttttggtattatttgttttgttcatcaacttgaaatag

SEQ ID NO: 181834 - DNA, 174 bp, Klebsiella oxytoca
atgaacggtcgttccattaacgctgaactggtccaaatagtgcaagtggcattatctgagccatcgccagtatccggttaccgcgacgacgccgaacgccttgccgaccagcaggcagagcagtttaagaaggtcgtattcgatacgcttaaagatatctacagcaaggaataa

SEQ ID NO: 181835 - DNA, 981 bp, Klebsiella oxytoca
atgacaagtttagcaattgcagatcgtgcaatcaacgttcctttttacggcgactctctgtttgtggttgagcacaacggcgagccgtacaccccgatgaagcctatcatcgatggcatggggatggattgggcttcgcagttcactaagttaaaacaacgctttaagacctccattgtgaaaatcacaatgcagctaccaggagacaaccagcgccgagatattatttgcttggcactccgcaagcttgcgggttggctacagaccatcagcgccaacaaggttcgccctgaaatccgcgaaaaggtaattcagtaccaggaagaatgtgacgatgttctttacgagtactggacgaaaggcgaggttaagaacccgcgcaaggctaaaaaatcactacccggcaaaatcactttcgagcagcaggaagccattaagcaactggtaatgactcgcggcatggcgctgccgaaagagaatcaggccaaagcgatgatcaccatgtggtcttcactgaaatctcactttggttgcagttacaaagaaatcagcgacgcccagtttaccgaggcgctttctatcgctgcgcgtgtgcctcttgagggtgaatttcttggcaagcaggaaacactgccagcgccgaagtttgacgtaaacattccgcttcaatggtggatcgataacaacccgttggttcgcagtggcaacctgtcatttgggaagtctctaactgccccgtcctttgacgtgacgatggagatgctttgtggtgacaactcgacatctgcggccattcgcctgattaacgttctggaagaggccggctttgatgtgtcagcgccgaaagccgaaattgtggcgatgcgcaaacatctgggtaatgtcgagtacggcatgaaggctatcgcagacgcttgccgccgggcggggaataaaactatctcgttccgtggcggaaaggctgaatacgtaattggttag

SEQ ID NO: 181836 - DNA, 3720 bp, Klebsiella oxytoca
atggctggaacctttgatgctggcagcgttgtctatgaagtggacatggatacttcgcgcttactggctgctcgccgggaagttgatgcggcgctgaacggtcttaatgggagcatgggccgccttgaagccagcgttaaccgcactgaacgctccattggttctatggagcggacaatgtccagtctctctggcgttgctaaaggtttgcttgccgcgctttctgtgcaacaggttgcgagttacgccgatgcctggactgaactgaataacaaggttgctaactcggttcgtactggagagacgcaggctgaagttatgcagcgcatttttgatgtttcgcaggcaacccagtcatccctgaacggtacggcaaccctttatgcaaggcttgagcgaggaaccagaacatacaacaccagcgcagaagatttaacccgccttaccaccattatcaaccagggatttgcggtatccggtgcaaccgcccaggaagctgagaacgcaatcattcagctatcacagggtatcgcttccggcgttctgcgcggcgaggagtttaactcagtgtcagagcagggcagccgcctcatggtcgctctggctgattctatgggtgtttctatcggtcagttaagggctatggccgctcaggggcaactgacaacagacgttgtagttaaggggcttctgtcacaaggggatgcaatcggcaaagaatttgccaacaccaccgtctcaatcgccaagggattgcaggttgccggtaacaacgtaacgaagttctttggcgaaaactcgacggttaaatcattcgcagcagggttccgagactctgttattacaataagcgaaaaccttgagacgctgagcggcgcccttatcattgtagctggcataatgggaagccgttatgttggcgcgctggcaatgtctaccgccgcgaaagtcaaggacactgcagcgtcaatagcccaaagcaaagcatccgccgtggccgccaaagacgcagaaatggaagctgccgctaaattgcgcctagccgaagtggagaaggcgtcgacaataactgcactccgccttgcggagggccgtctgaaaacaataagaacaactaacgcatctgtggcggctgaagttcaattggcggaggctcaaaccgctcaaatacgcacccagatttcacaaattgagtctgaaaaggcgctggaagcccaaaggctgaaagcacaaataacagagcagggtcgtatcgctacagctacccgaatggctcagctacaacaagcgtcaacggtgcttaatcaaagactagcctccgcggaagccgcaacagcgcaagcaagagcttctgctatagctcaggctgaagcacaagtcagcgcttcaagattggccgcagcggacgcgactgctgctgaaaccgctgctaatggcagatatatcgcctcacaggaggcatcggctgtagcatcaagggcggcatctgtggctggtggggtattaaagggcgctcttgggttgattggtgggccagctggcgcggcgatgttagcagcggctgcaattttctacttttggcagaaagcccagcaggcaagagaggaagcccttcgttttgctgatagtctggatcgcgttaactcctcaatgaaggcaatgaacaacacccagttaaggggaacaattgccgacgctaacgaatcaatcagggctcaaaaggatgagttatctgaccttcaggctgaggtggatgcacttaatgcgcgctatcgtagctttacccctgaagcgaaagctgtagctgagtcgatgggacagggggctgatttcacgcgccaacaggcagaggtttcagatcagcttgcccagaaatcacgcgaccttgcgaacgcccaagaaaagttagccaggactcaggacacggcagccgaagcgagcagaacgctaacaaacaatatgctcacctcaatgggtgtgcatgatggtctgattgaaaagggttctacccttgagcgagtgcagggggcggtagctaaagcattcggattgaccgccgacgaaataaatcgcgccaatcaggcgggtcaaaacttcaaccccaaagcgttgcaaatatcacctcctacagcagaaggtgataaaaacatccttaaccttaaagagcaaaatgaattgcttaaaattcgggatgagcgaaccagggcggtgagaaaagccgaaatggagcaggctaaggtcactaaaaacaagaaccagatcgaagagcaaggcaggcttgctggtgaaaactatgaccttcagaaagcagaagaagcccgtcaggaggctcagaggaagggggagcagcaggataagcgatcggcttcatctgctgaatcagtggcccagaaactcaccaatctgcgccagcaatcagagcttgcagccagttcaacgcaagagttaagccgagacagcgcgatattgcgtgcgcagcagtcactcggtagcgctgccacccaggcgcagatccaggaggcaggacaatacgccgctaaagcatgggatgccgccgccgcagctcgaggcgtaacggaagcacttaaagccatgccggagcaggcggagaataaatcctacgctgactccatgcagaacctgaaagccgcgctgaatgccgggaagattgaccttcaggagtacaacgcagccactgagcagatggagcagcagcaccaggttaatctggcgaaaattcgagccgggcaggttgttaacccaacgcagcaggccgccgccgaggttgatccggttcagcaattggctaatcagcacgctcaggaactggccctcatccagcagtttgagcagcaaggagttttggctcatcagaacgcgctggccctcaaaaacgcagccgacacgcagtatgagcagcaaagagttgcggcccagtgggcgttgtttacgcagcaaagcgtgggttatgaggcactcggcgctgcagttgatgcttttggcaaccaggcatcaaacgcattaacgggtgtgattactggcagcatgtctgcttctgacgcactacagtcaatcggcaataccatcctgaacgacgtcatcaacacgttcgttcagatgggtatccaacaagccaaatccgccatcatgggtgcaacagctcagaatgcggcgatagctaccacgaccgcggcgcaggtaggtggccttgccactaccactgcggcgagcacagcctctgctggcacgacaatggcggcgtggcttcctgctgctctggttgcgtctgtgggctcgtttggtgctgctgctatcattggtggggctgcactggttggggcgttcgcgttgtctaagacgctcgctggcggaaggaaaaacggcggtcctgtatcggccggctcgatgtaccaggtaggtgaaggcggtatgcctgaaatatacaaggccagtaacggcagccagtacatgatccccggcgataacggttctgtcatcagcaataaggatttgcgcggttctggcggcggcggggcgctgcaggtgaccaataacgtctataactacgccagcggcgtgcaggttgacactcgcagcactcagaacggtagcgagttgctgattgagacgtttgttactgatctgcagaacggtgggcccatgtccggacagatggaatcgacctatggcctccgccggcaagcatcaggcgactactaa

SEQ ID NO: 181837 - DNA, 213 bp, Klebsiella oxytoca
atgtcagagaaattcagagtcaaactctcctgccctgattgcggcagtgagcaattcatatttagcgccgaaccgcacaccatagacaatgtcgagtcctgtgcttcctgcggaagggctatcagcaaaaacgatgtctttcgctacagcaaagagttcctggttgatacgctcagagacaggttgaagggaaccaaatttaagctcaagtaa

SEQ ID NO: 181838 - DNA, 477 bp, Klebsiella oxytoca
gtggcaacagtttcatacccggatatgctgccgcttcctcagcgcgcagatcagaacatgacgcaggatacggcgtggcagacgacgcagccggcagtcgggcctgtcatcttcacgccgctaaccaccgaccttaaatcgacctggtctctgcagtggaaattcacgctgcagcaggccgagcggtttaaatcgtggctccgctcaccgacgtactgcgaccgtggccgcaactggttccagatgcgcattgacctcggcgatacgcagggcgtgcagctacagaccctgcatttcatcaacatgccggtacagaccagtaaaaacggcaatatcgtcatctggaccgctagcgtcatttgcaacggtctagaggacatcactgaggactacgacgactggatcgtcgaggcgccagagaactacggctactggctggattatctggtcactgccgttatgccgagggccgattaa

SEQ ID NO: 181839 - DNA, 576 bp, Klebsiella oxytoca
atgttttcaaaacaggaggtagtatggtatataagactgagccagttagagattaaatatgatgataatggccatccttcttggtgttcttttccatcgcataagaatgttcaggttcgtggagcttgcgatgtgccacctcatctgcctggacttgtaatacttgtccatggtgttaactccacaggtgaatggtatcaaaaagcagagtctgcattatgtgcaggattgaataaacgccttggacttgaaggcactaattttgagttaaaggctaacatatatagtggggatgacaagatagaattagatgagaaaggcgccgaaaaaagaactccaatgtctccattagtagaaaggaaattagttactgacaatggccggtcacctgtaattcgattttattggggctattcatcaccattaggtgacgaagataagtttgttattcctttggtaagtattaagggtgatgactatcatcagatgaagcgagatggcgtcccattgtatgatattttgaaaaaaaggtccttatatatggggcggcggtccttttcaaaatggcacgaataa

SEQ ID NO: 181840 - DNA, 1446 bp, Klebsiella oxytoca
atgaaaaggtttttatacatcctgggagcgggtctctgtgtcctggttgttttgttggcgctgttgtttattctggcccagacaactcatcttttttttgaatggacgggggaacgcgtattctggatttcgctgttgggtgcggtttttctgaccagtctgttgagcgtgctgattttttttcttatccctttccaaaaaaacgacaccccgctgactccgcagtacagtcgcccggcaggcgagggggctggtacacaggaacgagatatctccctttcttcgctaaaaaagcacctccgccgccgctacaacctcttctggcgcagtaaggtccgcctgctgctggtctgtggcgaacccgaacatatcgccgccatcgcccccggccttgccgaaaaacagtggcttgaaggccaccgcacggtgctgatttacggcggcagcctgtcatcggcgccggacaccgggcgcctgaccgccctgcgtaagctgcgccgcagccgtccgctggacggcatcgtgctggcgctggatgagagacagaccaccgccggtacgctggataaccatcttcgcgccctggagcaggtcggggaggcgctgcgctggcagccgccggtgtacctgtggcaggtgactgacagcgactggtcgcaggatgcgcgcgtcacccagacggtaggggcgcttttcccggcccgcgccacgccggcgggggtggagcgccagctccgcgctatcctgccatccctgcgcgaaaggggaatgcagcagctgtgcgccgggccgtcgcacgatttcctgttacgtttcggccggcagctggagaaacagggaatagcccactggaaaacgctgctgacgccgtggctgacggagcacctgaagcgtgttccgctgcgcggcctgatgttcagcccgtcgctggcccctgaggataatgccgcgggccatgaacaccgctggtccgctccggcgatctggcagggcgtgacggcggactgcgctcaggcgcggggcgtgcgggtagggatgccgtggcagcgaacgccgggcgtcaccctgctgacgctgattgccctgtggggggcgggcagcgtggtctcctttgccgttaaccgccaccatatcgtcagcgcggcggcgcgggcgcagcagctggtgaatcatcccgcggttaacgacccgcagctgatggcgctgcaggccctgcgtaacgatatcgggcgtctgcagacgcaacaggcgaatggcgctccctggtaccagcgcttcgggctggaccacaatgcgccgctctccgccgccctgatgccctggtacggccgggccagtaaccgcctgatacgcgatgcggccatgcaggcgctgacgcagaaactgaccgtcctggcgaacctgccgccgcgcagcccgcagcccgcagcgcgccacgtcagctaa

SEQ ID NO: 181841 - DNA, 1533 bp, Klebsiella oxytoca
atgcattcatacgaggaccggattcgggccgtcgaactctattaccggtacggaaagaaagcctccgttgtcgtcatggagctgggatatccttccacaaaacagctgggccgttgggttcggatttatgaagagaagggcgatttacccagggaattaaagccaagagaacgctattcacggacacagaaaattgctgctgttgagcattatcttactcacggtggttgcctgtcgtacactcgccgagccatcggctaccccagtaacgaaattctaaagcgctggattgaagagttttacccaaatgcgcgtcccctggtcattcgctcaggcacaagcaaatgcttcagcccggaagagaggtctcaggccgtccgggagctctgtaaccgacgtggaaccgcgcgtaaagttgcacaaagcataggcgtcagcgtcccggtcctgtacaaatggaagaaagaccttatcagtgacgaggcttatcaatccatgcgcaaacgaaaggcagcccctcaggataaaaatcaggatgctttactcggtgaaatccagcgtctcaggaagcaggttcatcagctgcagctcgaacgtgacatactgacaaaggcgaatgaactgataaaaaaagatctgggcgtcagctttctgaaactgaaaaacagggagaaaaccctgatagttgatgcccttaagaaaaagtaccccgttgctgagttgctaagcgttctgcaacttgcccgcagctgttatttttaccacaaagccagcaaacgtctgtacgataagtatgcggaaatacgcgtgatcatggccgatatctttgaggagaattaccgctgttacggctaccggcgccttcacgcgatgcttcgcagtaacaacagagttatttctgaaaaggttgtccgcagactgatggcagaagagcagctcgttgttaagcgcaccaggcgacgacgatataactcttactgtggcgaaatcggtccggcaccggaaaatttactcgcccgggattttagttcctgcaggccaaatgagaagtggctgaccgatattacggagttccagcttccggctggaaaagtctatctgtcgccggttatcgactgctttgatggccaggttgtaagctggtcgataggaacacgcccggacgcgacgctggtgaatacgatgctcgatgacgcactcgatacgctcagcgaacatgataaaccggtgatacacagcgatcgtggtggccattaccggtggccgggctggcttgagcgtatcaacacctccggacttataaggtccatgtcgcgcaaaggatgctcgtcggataatgctgcgtgtgaaggcttcttcgggcgtatcaaaaacgaaatgttctatggcagagactgggcgggtatcacgctggaaaaatttatctgcttcctggacaggtacatacgctggtataatgagaaacgtatcaagctatcattaggtgcaatgagtcctgtgaagtaccggcagcatcttgggatcacaacataa

SEQ ID NO: 181842 - DNA, 1341 bp, Klebsiella oxytoca; identical to SEQ ID NO: 84378

SEQ ID NO: 181843 - DNA, 411 bp, Klebsiella oxytoca; identical to SEQ ID NO: 99291

SEQ ID NO: 181844 - DNA, 1131 bp, Klebsiella oxytoca; identical to SEQ ID NO: 99292

SEQ ID NO: 181845 - DNA, 270 bp, Klebsiella oxytoca; identical to SEQ ID NO: 99293

SEQ ID NO: 181846 - DNA, 1299 bp, Klebsiella oxytoca; identical to SEQ ID NO: 99294

SEQ ID NO: 181847 - DNA, 759 bp, Klebsiella oxytoca; identical to SEQ ID NO: 99295

SEQ ID NO: 181848 - DNA, 921 bp, Klebsiella oxytoca; identical to SEQ ID NO: 99296

SEQ ID NO: 181849 - DNA, 372 bp, Klebsiella oxytoca; identical to SEQ ID NO: 99297

SEQ ID NO: 181850 - DNA, 384 bp, Klebsiella oxytoca; identical to SEQ ID NO: 121690

SEQ ID NO: 181851 - DNA, 1320 bp, Klebsiella oxytoca; identical to SEQ ID NO: 22860

SEQ ID NO: 181852 - DNA, 882 bp, Klebsiella oxytoca; identical to SEQ ID NO: 94091

SEQ ID NO: 181853 - DNA, 780 bp, Klebsiella oxytoca; identical to SEQ ID NO: 22857

SEQ ID NO: 181854 - DNA, 1026 bp, Klebsiella oxytoca; identical to SEQ ID NO: 22856

SEQ ID NO: 181855 - DNA, 3030 bp, Klebsiella oxytoca; identical to SEQ ID NO: 94088

SEQ ID NO: 181856 - DNA, 1716 bp, Klebsiella oxytoca; identical to SEQ ID NO: 94087

SEQ ID NO: 181857 - DNA, 2001 bp, Klebsiella oxytoca; identical to SEQ ID NO: 121674

SEQ ID NO: 181858 - DNA, 432 bp, Klebsiella oxytoca; identical to SEQ ID NO: 121675

SEQ ID NO: 181859 - DNA, 729 bp, Klebsiella oxytoca; identical to SEQ ID NO: 121676

SEQ ID NO: 181860 - DNA, 327 bp, Klebsiella oxytoca; identical to SEQ ID NO: 121677

SEQ ID NO: 181861 - DNA, 480 bp, Klebsiella oxytoca
atggctgcactaaaaccagaagtgaaagcctacatcattcagatgcttgcgtgctatgacacaccctcacaggtggtcgatgctgtccagaaagactttggtatcgccatcacccggcagcaggtcgaaactcacgacccgacaaaggtcagcggtaagactctcgccaaaaaatgggtcgacatgttcaacgccacccgcgaccgcttcctcaatgaaatttccgacatcccaatcgccaataaggcctaccgtttgcgcgtcctgcagcgaatgtcgacgaatgccgagaacatgaagaacatcggcatgaccgcgcagctgctggagcaggcggcgaaagaggtcggcgaagcatataccaacaggcagaaagtggagcacaccggcgcaaatggtggcccgatagaatcgaccaccctgacgaaggacgaatacaagaaagctcgacaggagatgctggaggatgacgactgttga

SEQ ID NO: 181862 - DNA, 1350 bp, Klebsiella oxytoca
atgaataaaaacctcactctggccgtcaaccacgcgctgaacgacgccaggcttgctcgcgcccgtatggggatgctgaatcccactatgggcctggacaataagcgtggctctgcgtggtgcgaatatggcttcccagagcagatcacttacgacaacctgtactcgctatatcgccgcggtggcatcgctcacggtgcggtagagaaacttgtcggtaaatgctggcagaccaacccggaaattatcgagggtgacgacgccgacgaaagcgaagaagaaaccgcatgggaaaggcaggcgaaacaggtattcactaaccggttctggcgctcgtttgctgaggcagatcgccgccgcctggtaggcaagtatgccggcattctgctgcatgttcgcgataatcaggactggaatctaccggtaacaagagggcgcgggcttgagaaaataaccgttgcctgggctggctctctcaccgtgggcgaatgggataccggccttaattcgaagacctacggtctgcccaagatgtggcagtacacggaaagtctgcctaacggtgcgagccgccgcgtcaatatccatcctgaccgggtattcatccttggtgactataccgacgatgcgatcggcttccttgaaccatcctataacgcctttgtcagccttgagaaagtggaaggtggttctggtgagtcattcctgaagaacgccgcgcgccagttagccttaagctttgacaaagagatcgacttcggcagcctcgcgtcgatgtacaacgtcagcgttgacgaattgcaggacaggtttaacgaagccgcgcgcgagatgaaccgtgggaatgacgtgctgctttccctgcaaggagcaagcgtaacctcgctggtatcgccggtttccgatccgtcaccaacctatggcgtcaacctgcaaacagccgccgctggggtagatatcccgacgcgaattcttgttggcaaccagcaggcagaacggtcgagcactgaagaccagaaatatttcaattcacgctgccagacgcgccgggtagatctctcattcgatatagaggacttctgcgacaagcttatcgacctgaagataatcgactctgtaagccagaaagctgttatttgggatgacctaaacgagcagagcggtgctgaaaaactcgctaacgccaaagtaatgggcgaggttaaccagaccatgcagggtagtggcgaaaatcctgcgtttacccgcgaagagattcgcacagccgccggttacgaaaatgacgacgaagagccgttaggagaagaggatggcagcgaagaagacgaagccaccgattctaccgcgtaa

SEQ ID NO: 181863 - DNA, 447 bp, Klebsiella oxytoca
atggcacgttatcgtcgcgttaatatcgacggtcagtctctgtacaagaccgaaacccgaactactgccgctgcgttgcttcctggtaccgccgcaaccattaactcatctggaaagtttgcgcaggccaccgcgctaaccggccgcctgtacatcatcgatgtcggttaccaccagggcctgaacatctctgaagcaatcccgtccggggactccgcagtaggcaactacgtcgaagaaggccgcgaacttgctctgcgctgcctgcccggtgcgtataagaaagacagcccgatcaagcttggcaccgctggtcaattcacccttgcgacatctgacactgactcagtgatcggctacagccaggacgaatacaccgtcgctgcaagtaccaccgattacatccgcgtgcgtatgcgcgttggtaccgttgccgctggcgcataa

SEQ ID NO: 181864 - DNA, 1077 bp, Klebsiella oxytoca
atgtatttctccaaagagacgctggcgactaactcccgccttggtggtcactggaacgagctgtgggctaaccgcaatatgtggaacctgcagaacgattccattattgcggctaaccgcgcgattatgaccccggaaatgctggcctgtaatgctgtaggtggctttactcgtgatttctgggctgagattgaccgtcaggtgctgcagctgcgcgatcaggaagtagggattgaaatcgttaacgacctggtcggcgtgcagactgtcctttctgtcggcaaaaccgcgaaactgtataacgttgtcggcgatatcgctgatgatgtttctgtcagcattgacggccaggcgccgttctccttcgaccacactgaatacgccagcgatggtgacccgatcccggtattcaccgcgggttacggtgttaactggcgccatgcagctggcatgaactcggtcggaattgacctggttctggattcgcagatggcgaagatgcgcaaattcaaccagaagcgcgttaactactacctgaacggagacgccaacattcaggtgcagtcctacccggcgcaaggtatcaagaaccaccgcaacaccaaaaagctgaaccttggatctggtgccggtggtgcaaaccttgacctgaccacagccaccatgactcagttgtttgagttcttcggtaaaggtgcgttcggcactctggcgcgcgcgaacaaagtagcagcatacgatgtgatgtgggtatctcctgaaatttgggcgaacctggcgcaaccgtatgtcgtcaacggtgtagtcagcggaaccgtcctgcaggctgtcctgccgttcgcgccggttcgtgaagtccgtcctaccttcgccctcagtggaaacgagttcatcgcatatgtgcgccgtcaggacgtcatttcaccgctggttggcatggccgttggcgttgttcctctgccgcgcccactgccgaacgttaactacaacttccagattatgtctgctgaaggtctgcaaatcaccgcagacgagcagggactgtctggcgttgtctacggcgcaaacctggcgtaa

SEQ ID NO: 181865 - DNA, 183 bp, Klebsiella oxytoca
atggctaagtaccaggttgtcaggccgtggcatggcgtaattgccggtcaggtggttgaaatggatgggttacacccatcattaaaaccgcacgtcatcctgattagcgaaggggagttaactcccgcgacgcctgagaccaaaacaggcaggaagcgcaaagcagaaagcgaagaagaatag

SEQ ID NO: 181866 - DNA, 171 bp, Klebsiella oxytoca
atggcctggatttcagttcagcagcggctgccgcgcacctttacccgggtgtgggtcatgaccgataccggcgaacaaaccacggcttacgttaacggcgcgggacagtggatgattaactgccctcgcatacaggctacaggcgcaatcgtgctgcgatggagggaatag

SEQ ID NO: 181867 - DNA, 384 bp, Klebsiella oxytoca
atgtcagacaaaaccagatgcggcgtaatcaaagaagatgccatgtatggcgatgctattgatggttctgaaaaaatccatgccggggttattcattacgatactgacatcagcgtggctgaggtgcttcttagggaagttcgcgaactgattgatgttcacgcctttgagctaactggcgatgacggggttaattatctgttcatctggataaatgactatggactgaagttcatgggcgttagcctcaaaacctacgaagaagcgaaagagcatctcatcaattatgaccgagagaaaatcactggcccttcaggccgatgtgagcaaattccgggattggtaagcgccattgctcgaaagattgagaggttctcactttga

SEQ ID NO: 181868 - DNA, 219 bp, Klebsiella oxytoca
atgaatcgcactatccattttgccggagatggcctcggccctcgcaaagtatttgtgaatggcaaccaaatcgacggggtattttttgctgatatacagcgcggaattgttcggtatcatccaaggccattcagagcccataaacgccgtaaaggtgagctatacgagcgtactctaaaggggcgcgtcgaagtcgttccatgtggggaaggcctatga

SEQ ID NO: 181869 - DNA, 384 bp, Klebsiella oxytoca
atgactcctccaatgtacatgcgcctgaaggacctgtttgttgctgagaagctgacggaggggtttaaggtgcaatggcggcaatggaaggactccggaaaggatgccgaccagttcatcgtgttccggccttccggtggtacagatatcatctacgacctcggcggcgactggtatgtgatggtcgatgttgtttcctccaaagcgaatcccgatgctgcagacgccgcggtaaacgccattgtcgaatacgtcagtgcgcaatccggtgctgatgattgcgtaggcgcgctacggattgtcggcaatgtgccggcgccgctccccaccgaagagggccggttagtaacccggctgctcgtctcatgcacatacggcgaataa

SEQ ID NO: 181870 - DNA, 765 bp, Klebsiella oxytoca
atgcaaggctgtgctaatgataccggcaagctgattggtaaggtggccgtgctacgcatggctatgggctgtgctgataccgttccggccctttccgaatggaaacgcctgggcgcgctgacaacgaaagggttcgactactccatgaataccgtcacctctgaggctgacgatacgaaaggtctgatcgagaacctggtcaacaacatggatttcaccatctccggtgaaggtgaattccgtaagcaggataaaacgactgagatcggtgccattactatctcgaaatatattttcgatgaagtgcaggccggtcgccagccgacgctgtgggtccgctttgactttactggtgaagacgcgggcacctacatcatggggtatttcaacacaacctcatggtctggtgatttcggtacctctgacatttccaccttctccggggaatggaaagtctacgatgctgacactgtcgtgttcgaagtagctggaccggcgctggcattcaccacgaacctgacagcaaccaagacagtggccgctggctcagcccttaatatgtcggtagcggtcgatggcggtacctcgccttacacctatgtgtggaagaaagacggctctgtcgtcagcgggcaaacaacggcgaccttcaacaaggccagcgctgtttccggtgatgccggagtttatacctgtgaggtcaccgattctgcatcaacgcctgtgaaaatcacgtccgttgcgtgcacggtcacgatcagctaa

SEQ ID NO: 181871 - DNA, 696 bp, Klebsiella oxytoca
atgaccccgattaaagaattaggcgaatgcgttatcggtaccggtgatcgggaattctttttccgaccgtcgtttcgcaacatggcgcgaatcggtgagccagaggagattgttcaggcgttctatgacctgtgcaacgacgagacgacatcattcgcgcagcgcgcagccgaggcttatatccgcgatgagtacagccgccttccggattgcgtgctgcgatatatccagagtggcctgctgacacgcaaagccattatggcagcgcatacggtgcttacggcgtgctgtgatgatgatattggtgagctggtcggctggatgaaacctgcgaaatcacgaaagcgtggcttcgtctggcgtcagggcagcctaccgcctgagaacatggtcatcgtcgcgcaaaacctgatgatgcacggcattgtcggcaaggcaaaggtgcgcaagctgcagcgttatgaaacaaatgaaactacctcagagtttcgcgccgctgactacatcatggcggcccgtaaccatttcggcataagccgggatgaggctgagaacctgacgatgacggaattttccctgatgctcaacgccaaatacccgaatcagaaagggtttacccgcgaagagtacgacaatgtcatggacgaagacgatcgccgctggcaggcaatgatggagaaagaaaaaccgcgataa

SEQ ID NO: 181872 - DNA, 381 bp, Klebsiella oxytoca
atgaagaaattttttgtcgcatcagcgattgcgttagcgctgtctggttgtgcctcttctggaaatcagcaactcagcaaagagtccgaaaccagcgtccagtcaaagctacaggaaggaaaaaccaccaaggcagaggttaagaacaccttcggatcgccggatgcggtttcttacaccgacggcggtaacgaaatctggaagtactccttcgctaaagtgaaagttaatggcacctcattcattccgttctacggccttttccataacggtacgaacgggacaaagaaagagcttacgatcctctttaaagatgacgttgtagcgaagtatacgatggcggaatcggcaattaatacaaagacaggctgggctgactga

SEQ ID NO: 181873 - DNA, 3717 bp, Klebsiella oxytoca
atggctggaactattaacgctggcagcattttctacgaagttgatatggatacttcgcgcttactggcagctcgccgggaagttgatgctgcactgaacgggttaagcggaaacatgggccgtcttgaagccagcgttaaccgcactgagcgctctattggctctatggagcggacaatgtccagcctttctggcgttgccaaaggtttactggctgcgctttctgtgcagcaagttgccagttacgccgacgcctggacggagttgaataacaaagtcgctaactcagtacgtacgggggagacgcaggcggatgtcatgcagcggatctttgatgtttcgcaggcaacccagtcatctctgaacggtacggcgactctttacgcccgacttgagcgcggaaccagaacatacaacaccagcgcagaagatttaacccgcctgaccaccattattaaccaagggtttgcggtttcaggtgcaactgctcaggaagcagaaaacgcgatcattcagctatcacagggtattgcttccggcgttctgcgcggcgaagagtttaactcagtgtctgagcaaggcagccgcctcatggtcgctttggctgattcgatgggggtttctattggtcagttaagggctatggccgctcaagggcaactgacaacagacgttgtagttaaaggcctcctgtctcaaggggatgcaataggtaaagaatttgccaacaccaccgtgtcgatcgctaagggattgcaggttgctggcaataacgtaactaagttctttggcgaaaattccactgttaagtcatttgctgctgggttccgagattctgttatttctgtaagtgaaaatcttgaggtactgagcggagctcttatcattgttgctggaatcatggggagtcgatatgttggcgcaataacaatggctaccgccgcaaaagtccaagacacagctgcatctatagcccagagcaaggcttctgccgttgcagccaaagatacagaaattgaggcagccgctaaattgcgtcttgctgaagttgaaaaggccgcgacaattaccgcattgaacctttctgagggacgtcttgcgacgctaagagccactaaggcctcggtggcgtctgaggttcaattagcggaggctcaggccgctcaaatacgcacccagattgcgcaaattgagtctgagaaaatgctcgaagctcaaagactgaaagcacaaataacagatcaggggcgtatcgcgacagccactcgaatggctcagctacaacaagcatcaacggtgctgaatcaaagattggcatccgctgaaaccgcaacagctcaagcaagagcttcagccatagctcaggcggaagcccaagtcagcgcttcaagattggctgctgcggatgcgacggctgcggcgactgctgctaatggaagatatatcgcctcacaggaggcgtcggttgtagcatcaagggcggcatctgtagctggagggttgctgaagggggcattgggattaattggcggcccagcaggtgcggcgatgttagctgcggctgcaattttctacttttggcagaaagcccagcaggcaagagaggaagcccttcgttttgctgatagtctggatcgcgttaactcctcaatgaaggcaatgaacaacacccagttaaggggaacaattgccgacgctaacgaatcaataagggctcaaaaggatgagttatctgaacttcaggctgaggtggatgcacttaatgcgcgctatcgtagctttacccctgaagcgaaagctgtagctgagtcgatggggcagggggctgatttcacgcgccaacaggcagaggtttcagatcaactggctaagaaatcccgcgatcttgccaatattcaggaaaaactggtaagaactcaggacactgcatcagaagcgagccgcacccttacaaacaacatgctcacatcaatgggtgtgcatgatgagcttattcaaaagggctggtcccttgagcaggcccagaacgcagttgcgaaggctttcggaaacactgctgacgaaataaaccgagcaaaccaggctggacaaaatttcaatcccaaagcgctgcaggtttctcctcctacggcagacggcgacaaggtaattctgaatcttgaggagcagaatgagcttcttaaaattcaggatgaacgccaaagagcagtaacaaaagccaagatgcaggcggcaaaggttacagataacccaaatcagatatctaaagctggagatctggcgggtgaaaactatgacctgcaaaaagcggaggaggctcgacaggaagctcaacgaaagggagagcagcaggataagcgatctgcaacctcggcggagtcagtagcgcagaaactgactaacctgaagcagcaatcggagttagcagcaggctctacgcaggaacttagccgcgagcagacaatcctcaatgcccagctttcgctcgggaaaggtgccacgcaggagcaaataactcttgctgggaaatatgctgctgaaaaatgggatacggccaatgcgataaaggcccaggctgcagcggagaagcttctccctgaagcgcgggagaacgcaagctacaagcaggacgttctggatctgaataccgcgctcgcggccaagaaaattagccaagagcagtataacgaaacctctgaacgtttagaggctgcacatcagaccaatctcgcaaaaattcgcgcgcaacaggctgtaactccgcaacagcaggccgccggtgatgtggatccggtgcagaacctggccaaccagcacgcgcaggagctggcgctgattcagcagttcgagcagcaaggggttatcgctcacactcaggccttggcactgaaaaaagccgctgacactcagtatgagcaggagcgtacaaatgctcaatgggcattgtttacgcagcagagtgtaggttatcaggctcttggcgctgcggttgacgcttttggtaatcaggcttccaatgctttaaccggcatcatcactggcagtatgtcagcctcagatgcattgcagtctatcggaaacaccattctgaatgacgtgattaacacgtttgttcagatgggtatgcagcaggccaaatcggcaatcatgggggcgacagcgcagaatgctgcgatcgcaactacgacggccgcacaggttagttcattagctacgaccactgctgccagtacatcatcggcggcggccacaactgcagcgtggacaccggcggcgctggttgcgtcgataggctccttcggcggagcggtcgctattggcctcggtgccctggtggctgcgctggctgtaggctcatcgttggccggcaagcgcaagaacggcggccctgtatctgctggctcaatgtatcaggttggtgaagacggaaaaccagagatttaccaggccagcaccggcaagcagtacatgatccccggtgataacggctctgtcatcagcaataaggatttgcagggcagtggcggcggctcgctgcaggtagtgaacaacgtctacaactacgccagcggtgtgcaggttgacactcgcagtacccagaacggtagcgagttgctgattgaaacgtttgttaccgatctgcagaatggtgggcccatgtctggacagatggaatcgacatatggcctccgtcgacaagcatcaggtgactactaa

SEQ ID NO: 181874 - DNA, 474 bp, Klebsiella oxytoca
gtggcaattcaataccctccgttcctgccgctcccacagcgcgcagaccagaacatgacgcaggatactgcgtggcagactacgcagccggctgtcgggcctgtaatcttcacgccgataacaactgatctgaaatcgacctggtctctgcaatggaaattcacgctgcagcaggccgagcgctttaagtcgtggctacgttcgccgacgtactgcgaccgtgggcgaaactggttccagatgccgatcgatctcggcgacacacaaggcgtgcagcttcaaacgctgcattttatcagcatgccggtgcagaccagcaaaaacggcagcatcgtcacctggacagcaagcgtcatttgtaacggcatcgaggacatcaccgaggactacgacgactggattgttgaggcccagcctggctatggatactggctggattatctggttaccgaagttatgccgagggccgactga

SEQ ID NO: 181875 - DNA, 654 bp, Klebsiella oxytoca
atgaatctcaacgacttccagcgtgccgccggcattacgcaacagcgggcgcagcaatggcttgaaccgctgaatgcggccatggccgaattctttatcaataccccgttgcgccaggctggctttattgcacagatcgggcatgagagccttcggtttacccgagtcgtcgaaagcctgtactaccgcgatgctgaacgtctagcaccgatttttcgttctgatttcgatcgcaataagaaccgcaagattgatccggctgagctggagtttgcccgcggctttgttggtaaaccgcaggccacagccaattttgtttatgccgaccagggcggcaacggcccggagtcctctggcgacggatggcgctatcgcggccgtggcttaattcagatcaccctcaaaaacaactatcgagcctgcgggcaggctctgggactggacctgctgaacaatcccgacctgttacttgaaccggtgaatgccgcccgttctgccgcctggtactggtatcagcacggctgtaatgcgccggcggatgcggccaacgtggtcgaagtcacgcgcaagattaaccccgcgctggtcggacttaacgaccgcgccatgctcttcgagaaagccaggagggcgttatgtccctcaaagaactga

SEQ ID NO: 181876 - DNA, 249 bp, Klebsiella oxytoca
atgtccctcaaagaactgatttctaacccgtcgggccggctcagcaccagcgacactattacgttttttacctttctggtcacgtccgcgatcgtcatttggtacggctacagcctgcagctgcaggagtggatgtttaccgcctacatcgtcgcgtgggcgggccataacatcgggtcaaaactggtggccatgaagcgcgatcagcctgccaccggtacaaacggaggttctcctgatggtcagtaa

SEQ ID NO: 181877 - DNA, 636 bp, Klebsiella oxytoca
atggtcagtaaactctggacgctggttaaaccgctgctcccctggctggttgctatagcgctgattctgtttgcggggatctggattggtattcaggtatgcgccagccagatgcgtggagatgtacagacggcgaacaacgcgacggcgaccgtccagaaggcgttcgacgattacaagattgagcgcgaaaaaacggatgccgacacggccagacagaaccagtcacagctgcaggctcaggtaaatcttgctgaacactaccgccagcaggcggacaaattgtccggggagctgctggccaaaagcaaagcgctgacgatcgcacagcaaaaactgaaggaaaaaattgatgaactcgcacgcaaagatggtgctggctggactggtatcggtcctggcgctttgtgcctgtaccagcagaacctcggctatccagccggacccggttgtagtcaatatctgtcagcagccaacagcggaaatgctggatattccagcgatgccggcagcgccggcggcggactctctccccggggaatcctcggccacagcaacgaatacggcgaatggtgtcagctcatccgcaacaaactgaacaccatccgccagctctacggtaaggagccacaatga

SEQ ID NO: 181878 - DNA, 246 bp, Klebsiella oxytoca
atgaacccagaccagctttatcagttacttctcggtcttgtcacgctgttcggcggtatctggatccgccgactgcagctcgatatccgcgatctggaagaatcggttgaccgtatcagaaccgaataccagcggcgggacgatgcctcgcgtgattacagcctggtatcggacaacatccgggacatcaagaactcactgaaccgcatcctcgacaaactggacaagaaggcagacaggacatga

SEQ ID NO: 181879 - DNA, 315 bp, Klebsiella oxytoca
atgaaggccagacaaaagcggcggcagcgtcgtatcaccacagcaaacgtgacgccgtcggtcaggctggccggcgatgacccgttaatgcttctgcagcagttgctgacggaacagcgccggccgttctccccagacatcatgccggagctggagaaaatctccggggcggtgctgcgtatcgatcggcgtattgatgctatggaaagccgggttatccgtcagggtgctatctccggcggtctgaccggggcgctgtcgggcgggctggtcgtgacgaccatttccttaatcaaggccaagatggggttctga

SEQ ID NO: 181880 - DNA, 501 bp, Klebsiella oxytoca
atggcgcatccgcccgagacaagggaaaaagtacggcggctttatattcagagccagctgtcactgcagatcgtttcttcgcaatgcggcgtcagttttgcgacggccgcccgctggaagaaagacgcgcaggacagcggcgacgactgggacaagctccgggccgcgaacgtgctggcgggtaatggcatggaggacgtcggccgggccatcctgatggggttgctggtccagtatcagaccaccattgaacagctcaacgttgattcacagctgccgccacaggcacgcgttgagctgctggccagtctcagtgatgccttcaataaagcgacggtggcgagcaagcgcgttctgccggaaacctcgcagctggccacagcgatggaggtcatcacgatgctgtccaccttcatcagtgagcactatccgaagcatatggaagcctttgtccaggtgctcgaaccctttggtaatgaggtgcaaaaacactatggctaa

SEQ ID NO: 181881 - DNA, 489 bp, Klebsiella oxytoca
atgcaggaaaagcatttcgcacttctggacgctttatgccgccacgaacttcaaaacccgcttcaaagttgtcagcccgaaagcattgatgctgataccgcccttgaatacatctggcccttacaagaccgcttcagaaaacgactccatcaactcaaaactgtccgctatcgtcgtcaatacgagcgcgaggctgataaagccattcgcgattacgtgctgaacgacgcaagctgggacgacataccactggtggttctgcgcgttctgcttgagcgttatcaacagtccatcattctttgtgtcgcaaatacgcttgataaaagccgacccctcatgcatatcccggctaacctttccccccatgcgaaaacaaaatttgcagttgctttttggttgtacttaatgaagctcccgtatgaagtgactgacgaatcagctctcgacattgattcagcatttgctggtctatctgaccggttgcactga

SEQ ID NO: 181882 - DNA, 204 bp, Klebsiella oxytoca
atggctgacaaattaatccaagttaatagccgtatcagcgtgatggccagtcaagtggcttatatcatcgcgccggaatttaaagattacatcgaagttcatttgctcgatggccgcgttgaagttatggagtgttcccgcaaccgctggaacgataaagaccgctttgaaacggctgttaacgatgcgttaaagggggaataa

SEQ ID NO: 181883 - DNA, 330 bp, Klebsiella oxytoca
atgtttatttccgccgttgtgaaaaatgtgtctcacgatcgcctgtctttcatctgcccgggctgcggttttccccatcaggtgaccattggccagggcgacggcccgcgctgggactggaaccatgattatgttcgcccgacttttaaccccagtatcctggtgacctgggaagagccgagcgataacccggcattttttgatgaccgggctaaggaccagcaccgtgtctgtcacagttttgtgcgcgatggccttatccagtatctggctgactgcacgcacgaactggccgggcagaccctacctttaccccgcattgaggactga

SEQ ID NO: 181884 - DNA, 360 bp, Klebsiella oxytoca
atgaaatttttactgagcctgcttatcgatgcgatcgtcgcggtgtcgctggcgctgggcattctgtgggccgatgaacgtctgctgaatattggctattttgccgggtggttcgtcggggttgttaaccttctggggctgatgagcccgaacggccaggcagtttttgcgcgcgaatacgaacatcgttcattgccccggcgttgttatgacgtcctgacggatgtggcgttcatcgtgtttgccatctggtctggttggttcgtgatgtgtgccgtctatgccctgcaggcagcgggtaaagcggagctgatcgctaagctggagcgcaagttagcggcaccggcggtatcggagtaa

SEQ ID NO: 181885 - DNA, 1704 bp, Klebsiella oxytoca
gtgacgcgcaaaaagaatgtcagcctgaacaaaaaggagtttgaggcccagctcaacgagctggccgcatctctgcgccggtccatcgaggcggaacaggtcggctttgacccgtctcaggatgcggtaaaccagcggcgtgatgccgtgcgggatccggttagcggcttccgttatttcgtgcagaactacttcccgcactatatccgccacaaggacgaatcggagctacataagttcctgtttcagcgtttgcctgaaatcgttgccgcgaccgtcagtcagcaggacgccatcgcggccccgcgtggtgaggccaaatcgaccatcgtcagccagctctttgtgctgtggtgcatcatcctggagctgaaaaaatacccggtcatcatcatggacagtatcgaccaggcgtatcctatgctggaagccattaaggctgagctctgctggaacccgcgtctgaagatggattttcccgaagcgtgtggggctggccgtgtctggcagatgggtaccatcctgaccgcgaccgatatcaaggtgcaggttgccggcagcggtaaaaagctgcgcggcctgcgtcatggtccgtatcgccccgatctggctgtactggatgatatcgagaacgatgagctggtccgcaacccggaccagcgcgacaagctggataactggctgaaaaagaccgtcctgccgctgggtggcgcaggagccaagtttgatgtgatctacatcgggaccattcttcactacgactcggtgctgtcacgcaccctgaaaaatcccctgtggcgcaagaagcgatttaaagcccttatcacctggccgtcagatatgaccctgtgggataagtgggaagaagtcctgcgtaacaatgacgacgatggcgagctgctggcccgggcgttctacgatgagcgcagggaagcgatggaagccggcgcagtggtctcctggtcagcgcgtccactctatgccctgatgttgatccgcgctcgtgatggccacagcacctttgacagcgaataccagaatgacccggtcagcggcgatgatgcgccgttcgctacctgcatcaacttctgggttaacaggcttaacgagtggtcgttctttggcagcatcgaccctagtctgggtaagaacggtaaatcccgcgatccgtcggcgattatggtcggcgggtttaaccggataaccggcattctcgacgtcgtcgaggcccgcattaaaaagcgtctgccgagcgtcattatcagtgacaccatcgagctgcagcgccagtacggttgcctgtgctggtctgtggaggccgtccagttccaggagttcctgcgtactgagctggtccgtcagtccgccgagctgggcattccggttccggcgatgccggtgataccgcatgccgacaaaatcctgcgtatcgagtccctgcagccgtggatgtttaacgggttgattcgcttacacccgagccaggtcaccctgattgagcagctccgacattttcccaaagccgaccacgatgatggcccggatgcgctgcatatgctctgggcgctgtgtaattccttcggtacccgggacggcttccgccaggtgccgcgccggcaggacgatgaccgcgatgacgacaacagacagacagacccgaagcgcccgcgtagccgatcgcgtttcggtaacggaggatggtaa

SEQ ID NO: 181886 - DNA, 1569 bp, Klebsiella oxytoca
atgagcaaaatcgttgaccagtggggtcgcccgtttgacaaagcggtgacaaaagcgccgcagactgcacggatgatacagttgaacagcacgtatccggcgcatccttcccgggggctgaccattcgacgcctgccccggatactacaggaagccgagcagggttacctttccgcacaggctgaccttttcgacgacatggtggaaaaagacggccatatcttttcggagatggccaaacgcaagaacgcgctgctggggctggactggagcatagagcctcgccgcaatgcgacagcggaagaaaagaacctcgcggcgatggttcaggagtggttcgatacgctggataacctggaggatatcatcctgcaggcggccgatgcgatcgggcatggcttcagctgtcaggagctggaatgggatctggaagagaatgtctggttgccatctgaggcgcatctgcgcccgcatcgctggttccaggcgcgtcccgacaggggcgacgaaatccgtctgaacgatggcagcattgatggtgcagagctggctccgttcggctggatggtgcatcagcataatgccaaaaccggctttaccggccagtccgggttgtaccgtgtgctggtctggccttacctcttcaagaacttctccctgcgcgatatggctgagtttctggagatttacggtttgccggcgcgggtcgggacgtatatggcgggggccaccgatgcagacaaagacgcgctctttgactgtctggtgcagcttggccataacgccgccggtattattccgatgggcaccacgattgatttcaaggctgccgcatccggtcagccggatccgttcgtcgcgatgattgactggtgcgagcgaacggaatctaaagtcatcctcggggccacgctcaccagccaggccgacggcaagacctccaccaatgcgctgggtaacgtccataacgacgtccgtcacgatattctggtggccgatgcccgccagctggagggcttctttcgcaacatgattgatatgctcctgcgtatcaacgggtatgaggttccccgccgtcgtctgcctaaattcgtgtttgatacccgggatatcgaagagatcgaaaccttctctgccggggtgaaaaacctggtggaatccggtgtgaaaactattccggcatcctgggtgcataagaagttgggtattcctgttccccagcaagatgaggcggtgctggaggcaccggcacagaccggttccccgtcccccgtcgcgctgagtcagcggtttcggcgcatcgccgccctgaccaccgccgcagagctgtcagacccggctcaggatgcgctggataatggccgtcctgtgccggagaagatcgccgccgccatgcaaaacctgattgcgccgctggttgcggccctgcaggacggtaaactgccggatgaggcaatggatatcatcgccggcagttaccctgacctggacgacagcgagctggtaaccctgctggagcaggcgctgtttgtctcggacgtatgggggcggctgaattccgatgcctga

SEQ ID NO: 181887 - DNA, 546 bp, Klebsiella oxytoca
atggcttataacatcgtttttgacgtcaccgactttgagcgctcgctgggcgagctgatcaacaaattcgagaaacgtgcgccgctgatgaaaatgctggccggtctgatggaagacgcggtccaggagaacttcgaggtggaaggccggccaaaatggcagcactggaaaagtaatgcctactgggcgcagcgccggggcggtaaaatactccagcgctccgggcgactggcggcgagcatcacggcttacagcgacaatgatatggcgacggtcgggaccaatgtggtctacgccggcattcaccagtccggtgggaagattaacatccccgcccgcagccagcaggcatactatcgccagaacaaggatggcacgctgaataacaagttcgcccgcaagagcaaggccaactacagtgagtggcatactattcccgcgtatgagatcaacatgcccgcacgtccgttcctgcgcctgaccgaatccgacatcagcgatatggaagaaaaagcgacggattatttcagtcagatctaccgttaa

SEQ ID NO: 181888 - DNA, 1086 bp, Klebsiella oxytoca
atgaaaactcgtatcgcgtcactctcacaggttatcaacgccgccactcgcggcgtgatccagctgttaccggccggcaccttccgtgccggcgacggtcgtccggccgaatgccctgacggctggtttattgacggcactatcgcggccgctctcatcgcagcggctgacgcccgccagaccccttatgtcatcgactacgaacatcagaccctgcgttcggcaaagaacggcctgccagctccggcttccggctggttcaaaaagctggaatggcgcgaaggggttggcctgtttgcggtggatgttgaatggactgacgccgccgctgccgctatcgatgccggcgaataccggtttatctcccccgtatttttgtacgacaccagtggtctggtcaccacgttaatcaacgcggccctgaccaatacgcccgccctggacggtatggatgaggcaatgcttgctgctgcctcactcctggccgccgcttctactgaggacacaacgatggatgaattactggaacagctccgctggttcctgggtctgcccctttcggccacgaaagaggatgtgctcgccgagctgcagaaactcatcaacaaaatcaaggcagctgacagcgaagccgctgcgggtcttgcctggattaacgggctggaagccagcgtcgccgcgctgacgtctcaggttgaaaccccggacccggctctttgggtctccgttgacatcatgaatcaggcgatcgagcaggcccgcgcctccggtgatgagcagattgctcagctgacactgcagcagtccaccgagctgattcaggtggccttgtctgatggtcgcctgctgccggcgcagaaaggctgggcggaggcgctggccaaatccagccccgacaaactccgcgagcacctggcgaaacagacccgcatcgcggcgctcactaccacccagaccggtggccgtccgccggctggcctgccgtccagaaccgtcgatgccccggaagatgagctgaatccggcggtgctcagcatgatgggtcttgatccgaacgattttaaagagggaaacagcaatgtctga

SEQ ID NO: 181889 - DNA, 396 bp, Klebsiella oxytoca
atgtctgatcgtaacactccctggcgcaatggcgaactggtcgccgcgtcggtggctgcggccacgatgatttatggcggtcatatggtcgggcttaacgccagtggtctggccgttcccgcctcggccagcacgaccctgaccatcttcggcgtctccgatgagtacgccgataacaccgccggtgcggccggagcgacgtcggtgatggtccgtcgcggtaaagcctggaagctggccaacctgtccggggatgccgtgacccaggcggatgtcggtaaatcctgctatgtcgccgacagcattaccgtggcaaaaaccagcaataccgatgcacgaccggtggccggtaccgttattgccgtcgaatctgacggcgtctgggttgaaatttaa

SEQ ID NO: 181890 - DNA, 909 bp, Klebsiella oxytoca
gtgattgttaacaagcagaacctgaaaaccatttttaccggtctcaagaagaccttccagaatgcgtttgatcagacccccaacgactggcagcagattgcgatggtcgtgccgtctggcaccaaagaagagaactacgcctggctgtcgcgtttcccgaaaatgcgtgaatggttgggtgaaaaagtagtgaaagcccttgaggcatttaactacaccatccgtaacaaggactgggaagcgactatcgaggtcgatcgcaacgatgtcgaagatgacaccatgctgggctatgcgcagcaggctcagggcgcgggccagtctgccgcagagctgccggccgatatcatcgggcgactgctgagcggcgggttcaccaacctctgttatgacggtcagtacttcttcgatacggatcacccggtcggtaaagggtcagcctccaataaagggaccaaatcgctgtcggccgcgacgttcgccgccgctcaggcctccttcggtgccgcccgtgcggcgatgcgtaacttcaaggacgacgaaggtgaaagcctgcgtatccagccagggctgctggttgtcccgccggcactggaggatatcgccaattatctgatgacggccgatcgcttcccggacaacacgccgaacatctacaaggggacagcgaaagtgctggtgtggccggggctggcaaccgacaccgagtggtacctgtttgacgtgaccaagccggtcaagccgctggtctatcaggagcgtaagaagcctgtgtttgtcgagcagaccaacctggacagcgacgacgtcttcctgatgaagaagtacaaatttggtgccgaggcccgctcaaacggcggctatggcttctggcagatgggttttggttcaaccggggtggatgcataa

SEQ ID NO: 181891 - DNA, 399 bp, Klebsiella oxytoca
atgcctgaaattacaattactgcaaagcgcgacgggttccgtcgctgtggggtggcacaccgtgacgtgccggtgacctggccggatggcagttttacggacgagcagatcgccatcctgcgtgccgagccgtcgctggttgtccaccttggaccggtcagcggcgatgacgacaagctgaaggccgcactgggtcgtgttcaggagctggaaaaggtcgttttgcagctcaaagaggactcagttggtctgatggatcagttggttgagatgaccgctgaccgcgatcgtctgcaggaagcgctgacggccgcaggcagtccgtcagacacagaggcgaaggagatcgccgctgacgatactgcagcagctgactcatcagccaaagcgaaaaagtaa

SEQ ID NO: 181892 - DNA, 429 bp, Klebsiella oxytoca
atgtacgccacccgggccgatatggtcctgcagttcggcgagggggagtgcatctccctctccgacagggatttcaccggtcagattgatgatgaagtgctgaacggtggccttcagcgggcctccgccaccatcgacagctacctgtccggccgttatccggtgccgtggccagatacgcccgggatcctcgtggataaatgctgtgacatcgccaggtacaaactgaccggggcggagacgcagaacaccgaagagatcagggagcgttatgaagatgcgattcgttatctggagcaggttgctaaggggaatatcacacttggccgtctgccagacggctcagtggctcagggcgggagtctgtcccgcttttcctctaatggccgggttttcgggcgcgatgagacgggcggaggtgcattttga

SEQ ID NO: 181893 - DNA, 651 bp, Klebsiella oxytoca
ttgattatcacgcaaatcgaatccgccattatcgacaggctcacccgggggctcggcaaactggtccgcgaggtgcattcctacagtggcgaactcgatggcgaacctgctgaggtcattcgccagttgccgggcgtctgggtcacctttggcggtattcagggcaccgaactgctgagcaccacccgtaataagtggcgtgatacgggacgatttgtggtcattgccggggcgcgtaacgtgcgtagcgacgagtcaacccgccacggtgggccggcattcggcgaggtcggcacttatcaactggtttatgccatccgccggctactggcccgccaggacttagggttaccgattgaccacctgatgcctggtaaggtgcgcaccctgtttaacacgcaggtgcagaaagcggccatgtctgtgtttgcctgtgagttcgatacccggtttgattcggaatcactggagaacgggcggtttcctctggtgccggccgacctgccgcccggtcatcctgaccagatttttggcgagtatggtggtgccagcagtgaagatgatccggcctggctgacaaccgatttgcagtatttcctgaacggccaggagccgttcgttgctgaggacattattcatcatgaaagttaa

SEQ ID NO: 181894 - DNA, 219 bp, Klebsiella oxytoca
ttgctgaggacattattcatcatgaaagttaaagcccgtgaagggatccgggtaccgcgcgaggataacgcccgccggtacatcgagcaggagcccgtcgaggttcctgaaagcacctactatcagcgccgcctgaatgatggcgacctgctgaaagtgacggatgcgaccgttgatgtgacggccgctgcagcaacgaccggcaaaggaactaaataa

SEQ ID NO: 181895 - DNA, 882 bp, Klebsiella oxytoca
atgctaaatcttgatcagcttcttaagtcagctcctgctatgcctgcaacatcagggcgctgggcatctgtttatcttgaaccaatgatcggctcaggagagcggctcacggtagcagttgccacgataacatcatctggtgatattttagttaagccggcaatcagaaaagaagttatagaagctatgtatggcttcaaagcaccagcatttatcaatgtggttgatctgattttgtcgagtttgaagttgcatctggctgctaagggggatttcgtatcatggcatcctccagttacaggcgtcactataagcgccgtaaggaatgctgcgtcatcaagccctgttggcatactccgccaagcggtatcattgtcatcgagtttgtcatcactccttgaggctgaagaagattccgatgggttgccagctaagcaatcaagaactaaagacaggtggccaattcaaatctttgatgcggttatcagcgctgacggacgcagggatatttttttcaatagaagcttcacctttagtgatggacacagaccggctaaaattttctatctaagcgatcatgcagctatcaacaccggaaaactgttaccccacaacttgaatgagcaggtcaaggatggaaaagcaaaaatatctgacttatcaatgataaaaaggcaaggcgatatttttccaagagaaactcatcaaatgattatctacaaaccggaagatgatagccctgcatacaatgataggcacatagcatcaataaatagtgcgtacctttctttacaggacttggctaacacctacgatgtatcaatcacttctgtaagcactgccgagcatgcagcaaggttaatattgcaaactgcagcataa

SEQ ID NO: 181896 - DNA, 765 bp, Klebsiella oxytoca
gtgatcagaataggaaggttactacctggcggcattgcaattgacgaagggcaacatcacccgataaagggcgttgctcttttgataaaagaaaatagcgaaccagaagagattgttgtttttgcaaaagaaatatcttctaggagcatttctatagaaataacctgcgcagccttgggaagagctctatccctgcctatacccgagccagtgctactgtttgacagctcaaacaaagcattttttggtagtgttgatgctacctatccgagtttcatgaagtatgtttctaactcttcagatcaggccgtttctgatgctttggcatcatggccgttattgaaaaaagctagctattttgatgagtggattgcgatggatgaccgtcacaacggaaacttgcttttcaatggtgatggtttcttcctgatagaccatgaatcggcaattccccaaggtcttgcccctgaccttttcgggatagattattactccaatcaattgctgcaggtagcaacttacatactcgatagaagtaatgatatagccgttcagatgatggcaaatgaggcgagagcttggaccatgtcttgcaagagtaacaccctaacgctattagatggagagatatccgaaacagttcaaggtaaagagaaaaatcaaataatgtctttcctttcatctagaattgagttactaggagacattctttatgatcaaatcaagccccaacaaacacagatgatatacgatgctaaatcttga

SEQ ID NO: 181897 - DNA, 573 bp, Klebsiella oxytoca
atgactatcacactacaggcagtaaacgagctcattcagtcgctggagtcggcgggcgagctgtcgatcaaagagcagaagtatctggaggcgctgaaggagtttcggctttgcagtgtatcacttgatgttgctgttaaggtcgcaaacgattttgacagagtaattatggaatgcagaaaaattaccggctgccctgctggcgtagacctacagggccatctgcagcagctagctgcggagaacgtggcgctgaaggctgcggcaattttgctggctgatgaagcaattcagatttatcgacgctggaatctcattcagcaacctgacggtgacatcgtcgatatgcagacgattcacgagttattgtgcgcttgtcatgaaactcccgccaccgatcgcatcgtagccgggatgaaggctgatggggtggaggagttcgctgaaagtcagaaagaatacgttcgccagcatcgcaacgaaatggaccagatgctccgcgcggcttatgcaggtagtgcagtggacgccgagagattcgcccagcagctgcgcgagggggccgacaaatga

SEQ ID NO: 181898 - DNA, 264 bp, Klebsiella oxytoca
atgagcatcgccacttatctcaataccggtttagcccttctggggtgggcatacatcatgtttaaaacaggccagtggattaccaaaaatgctctgaggcagtgggacaagcgccgaaagcagtctcgccgccagaaagctgtgaatgagttttatgacgcctttgagcttaacagcctggaacctggctctaccgttcgcctagccactaaaggcgacctgacaatcatgatgttccgcagtgagggaaaggccaatgactga

SEQ ID NO: 181899 - DNA, 489 bp, Klebsiella oxytoca
atgactaatatcaccgaactggcgcagcgtatgaaggctgcagctgtgcgagctaaggcagcaaccgaagattatgtagctcatcgcatgtccttcacggtctgccttgaagaatgcaaagaatttaacgacctgtcagatgggccagataacaccctcgcgctggtagaggcgctggagaaggcgcagcagcaaactaaaagcgactttgaaatcaaagcccgtctctgcaaagagagcaatagcctccatgacaggttgagagaagcagagaagcgcatcgccgagttggagcgcgaaaaggagcatcttcgcccggtcggtgtgatgagcgagacggcatttcaccgtcttgaaaacagcgaatgtcgctttattgcgttgtggccgcgccctggtatctttttgccacgcaagcgccccgaggatggcgtgatcgtttatgcgcgtacagctgctgccgttggcaccaaggtggaggctgagtga

SEQ ID NO: 181900 - DNA, 291 bp, Klebsiella oxytoca
atggctaaccttcagcttgcagtgaacggcgagtatttcgacgcaatgaagcgaggcgagaaaacagaagagtatcgcctggttaatccgtattgggggcgccgcatctttgggcgagattatgaccgcctgattatcacgcggggctacccgcgagcagacgaccacgaccgccgcattgatatcccgtatgacgggttcgaaatcaaaaccattactcacaaacatttcggcgataagcctgtgaaggtattcgccatcaaggtgaatttcgtaggagccaaccaatga

SEQ ID NO: 181901 - DNA, 300 bp, Klebsiella oxytoca
atgaccagcaaattaaccataacagacgagcgcctggcggaattagtggcgttcaaaccattacctggcacagatatcaactcggccacacaggatgaatggatggctatggccgcagagctacatgaacgccgcaaggccgcatctgagccggtagcgtatttagtctgtaatggccgtctctatcaggatcgtgcattcatgagtccgttgatggctgaggagtcggtgaaaaacaggaacgatggcgcagaaatcaaggcgctgtgtgtttgcgggaaagcggagtgtgcggaatga

SEQ ID NO: 181902 - DNA, 765 bp, Klebsiella oxytoca
atgaccagcaaattaaccagagagcgaattgagctaatcgccaatttccatcgcgcaatgacgttgccgccgtctcacgatgaaattgaagagttggcccgcatggcgatggtcgcaatggacagcgagccggtggcgtacaccgacgaagcagaattatgtttcgtcaatgatatggcctgcatgtggacaaaggggatggggattaacgaagtcccactctatcgccacgcgcagccagcgccggtagtacagccagtcatgttcattgatggcgacatttcaaccgaggacgccgataaactggcaaaagtcattcgggaattcaacgaagaggatgaaaggccattagcgaaaatggcgcggattattcgtgaaaatccacacccgacaaatgaatgcgacatgcctaaagcacagccagcgccggtagtgccgccaaagcagcactgggaggaattgtgccgtgagtatccggacatgagcattggagatgcgattatcagggctgcgtggtggaatcactgccgcgccgccatgctccaggctggcaactctccggtaattggcattgacctggcatcgggtccataccgcaccgttgaagttcgctacgttgcgccttctggttacgtgatggtgccgaaggagccttcagaagcgatgataaacgcttggttatctgaggtcgcgaactggcgcggtcacgttgctggttataaagccatgctcgcagccgccccgcaggaggtgaaaggtgagtaa

SEQ ID NO: 181903 - DNA, 306 bp, Klebsiella oxytoca
gtgagtaaattgagcgatgaaatcagaaccttagaacttgaccagttgcgctctcttcgcgagttcgtaggcgacctgatagccagaaaggaggatgaaccgcgcaggactgtatggcgtgtttgctcttacggtatctgcttcggtaatttcagggaagaggaatacctcaaggcagtagcgtttctggcggagaaggctgccgaaattgactcagacccgacatcggacaggcgagacaggcgcatggagattttatcccaccgagttatcgagtcagaatacgagggatggtttgatgcctaa

SEQ ID NO: 181904 - DNA, 258 bp, Klebsiella oxytoca
atgtcacagtggaacattgcagcccaaccgaaagacgagcaggacaaagtaaacgttgacattgctgcatccggcgtcgcctacaaagagcgcctgaacatgccggtagtcgccgaagtggtagccagagagcagcctgagcacttgcgcgactactttatggagcgcgtgcgctattaccgcgaacagagtattcaactcccccgcgcatccgatccgcgctacatcgaaatggccagccagaacgagaaaaaatag

SEQ ID NO: 181905 - DNA, 312 bp, Klebsiella oxytoca; identical to SEQ ID NO: 97178

SEQ ID NO: 181906 - DNA, 648 bp, Klebsiella oxytoca; identical to SEQ ID NO: 97177

SEQ ID NO: 181907 - DNA, 1434 bp, Klebsiella oxytoca; identical to SEQ ID NO: 97176

SEQ ID NO: 181908 - DNA, 1215 bp, Klebsiella oxytoca; identical to SEQ ID NO: 121818

SEQ ID NO: 181909 - DNA, 765 bp, Klebsiella oxytoca; identical to SEQ ID NO: 6031

SEQ ID NO: 181910 - DNA, 474 bp, Klebsiella oxytoca; identical to SEQ ID NO: 14829

SEQ ID NO: 181911 - DNA, 633 bp, Klebsiella oxytoca
atgagccttgcagatcgcgtaaagcaaaagagaattgagctcggtctaacgcagaccgaggcagcgttgaatgccggaataacgcagcagtcatggcagagcattgaaaagggagacaccagaaaaccgcgtaacattattggcatagctaaggcgctaaagtgcgatcctgactggctaatgaatggcggagcctttatgcctattgctgaagttagcagcaagaaggtgcctctcataagctatgtccaggcaggggctctcgcagaaaaaaatcccattgaggcatttgatgggagttttgagtacatccttacagacaacgaagtttctgattttacttttgctttacgcatcgaaggcgattcgatggagccagacttcaaggctggagatgtgatcattgtagaccccgaagttgagccaacccccggagagtttgttgtggccaagaacggtggggctcaagcgacctttaaaaaatatcggcctacttacacggatcacctgggctgccagcatttcgagcttgtgccattgaatgatgactacccgattatcagtagcgagcatcaaccactaacaatcatcggcgtgatgattgaacacagaatctatcgaagaaagcgctaa

SEQ ID NO: 181912 - DNA, 216 bp, Klebsiella oxytoca
atggaaaccatttcgcaacgcctcaaaaaaaagcgcgaagagatgaatctgtctcaggcgcaattagcaaaaaaagttggcatgagacagcagtctctgcaggcaattgaggccggggcaaccaagcgcccgcgttatttgttcgaactggcaactgcgctccattgcgaccctaagtggctgctttatggcgagatgccatctcaatctcaataa

SEQ ID NO: 181913 - DNA, 321 bp, Klebsiella oxytoca
atggagaatgcaatagcccgaaagttagagccgccaatcctcaacccaattgagattgaaggcattttgttaaaccgacttttatccattggccaaaaggtttttgcggaaatgcggggagttagcgagtcgacaataagtcgccgcaagagcgaggggtattacgccgaaatggcgaaggaaatatcagcgctgggtctgcaggttgttccgccggaggcggttgtagtttcccgccactacctgcagtcagtagaaacgctggcagatatcggtttgcgtgcggagcggtgccgcccgggtccgcttgggtgggactga

SEQ ID NO: 181914 - DNA, 966 bp, Klebsiella oxytoca
gtgagtaacgttctccgcatatccgattttagagggtctcagaagcccatggagaaacctcagccatcagggcaggggttggtattcctgcaccgcaaagtaagagagctgccgttctacaagagcgacagtgaagccgtccatttgtggatccatctcatcatggaagtgaacgcagcggaaggtatggtcaccactgagtttggtgaatatccagttggtcgtggtcaggtgattaccgggcgccataccttatcgaaagacacagggataacacctgaccgggtgaaatatcttctgaacaaattcgccaaaatgggcatgatcaccacactggcaaacaagaaattcaccctattaaccgtcaccaaatatgacgattatcagcagttttttgtgccaacagaatgccaacagagtgccaacgcaaacccagtaaccacgctgcgtacaagtgaggttgtgccaacagaatgccaacagagtgccaacgcaaacccagtaaccacgctgcgtacaagtgaggttgtgccaacagaatgccaacagagtgccacaaacaatatattaaataatatctcttctactgacgtagaagagagtgcatcagcatcgcaaaaatcagaaccgaaaaaaccgtctctcagctgtgagcaggttgttgaggtttaccaccgggttctgccagaagcacaaggcatcaggatcctcactgataagcgccgtaacctgatccgttcgttctggcagaaggccaacaaaattacacgtcagcttgatggccatagctttaccctggccgactgggagtcttacctgagctacatcgccagtaactgccggtggatgcttgagaatcgccctgatcagcgcaccgggaaaacttggcgccgcaagtcgctggaatacttcctgaacgtcgatgtctacgccaaaacgcgcgagggggcctgtgatgacctctga

SEQ ID NO: 181915 - DNA, 294 bp, Klebsiella oxytoca
atgacaggaaaagacgcaattctgaactacctgaaaacgcataaaacctgcagttctccagatgtcgccgcggcttcaggaatgacgcatacctgcatcaaccaggctgcgaatatcctggcaaaacagggcgtgctggtagctgaagctcgggtatggcggacggtttactaccggctggccactgaagaagaaattacaggcagaaagagcactaaccagattttcaacgagtgtcggcaaagcccggcgatgaagcgggtactggctgtttacgggagagcatcagcatga

SEQ ID NO: 181916 - DNA, 444 bp, Klebsiella oxytoca
atgactatcacactacaggcagtaaacgagctcatcgcctccctggagagcgcaggcgagctgtcgatcagagagcagaagttcctgaagctggcgaaagcgtaccagcagctggctgcggagaatgtggggctgattcgcagcgctgaatgcctattgcatgaagcaagtgaggtgtatcgggcgtacaacaaaacacagttgccagacggtgatctggttgacggccaatcattgcaggaagtgtgggacgccatcaacgcaacccccgccaccgacgcctacctggccgggattaaggctgatggggtggaggagttcattggtcgcctgcagcagcatgtcgatgagggtgattttgtagacgatgaagttgccgtaattgttggcgctatcgactgcggcaaggaattttgcgagcaactgcgcgagggggtcaaatga

SEQ ID NO: 181917 - DNA, 405 bp, Klebsiella oxytoca
atgagcaactttgatacttcatcgcaagttaaggctcgcaagttacatcgctgctgtgagtgtcacggcgctattaatccaggtgatacctacgagaaagcgtttattgtccaggatggcgatgtcagcaacttcaagacgtgccagaaatgcgcagaagcacgtgactggctgcttaacgaaactgattggcctgacgatatcgacggcgaagggcattcgcttttcttcacgatgcttcgtgaccacctccgtgagcaaggccgtgaaggcgaccgcaaatacgcatttcgagcgtatcggcttgtcgtcctgatgggtaagcgccgtatggcttatgccaacgcatacaacgcggagaccgtgaaaatccgcgattctcttgctcaaggagtctcagcatga

SEQ ID NO: 181918 - DNA, 510 bp, Klebsiella oxytoca
atgacaactgatatcaccaaactggcgcagaggctggccacctgcgcaaaggaagacacatatgcggttctatcgcctgctgattgcggcacgctggtagaggcgctggagaaggcgcagcagcggattactcagatggagtcccgcaccgtcaccgactggatagaacatgacgggaaatggcgaccggaatcgctgggtctggatgaacttgtatacctgaaaaccagaaaacaggagctgaaaataccgtacccggcgggaaaggttaaagggtggatgaataccggcggagacatggatgttatggcgtacaagctggcgtcgccacaagccagcaccgtcaccgtgaagctgccactgccgcgccgcaaaacatctgatgactatgtcgatgacacgttcgagccgtgcgatctggctgcggtatacaacgcatgtcgccttgaatgtgaagtgaagttcaagaacgcactgactgccgttggcatcaagtgggaggctgagtga

SEQ ID NO: 181919 - DNA, 375 bp, Klebsiella oxytoca
atgttgacgctaaaacactttatggaccgcccaacctgggcggctgcagccgggtatcagtttaattactttgactgcatggcccacacggcaaatctatacggcaatgtgtttgcagctctacgggatgtatatgttggctttccagatactgaggttagagagcttcccggcgtgattattgtgctgattgccgccatcgctggaatcattgtctggccgcttatcttttgggttgtcgcaattcaggtatggctgaagtgccgaagaatgcgccggcgttatcattttggcgacgatatgacggatgtcgcgaagaataatctcgcggtgtggatgcggaactgcgatagaaaatggggagccaaccaatga

SEQ ID NO: 181920 - DNA, 675 bp, Klebsiella oxytoca
atgaccaataaccagttaaccagagaagagaatgttcaggctgtctttgatttaaaagccggctacacattggggctcgccgatgtagagattctcaagcgagtagcccgcatggcgctggccgcaatgaacagcgagcctgagtatttgccactcgactacctacagggacatagagacggtcttgagtggtcagccagactggcggagtcaaatcaccctcagaccggagactggctttacgatgaccctatcgagctggcaaaagccattcgcaaaggtccagatatgccgccagcgcagccggtagcgggcagcgagccggatcgcaatcctgtgctggcgtatgccgacagttatcgtgatatggcgaaacaaggcatcgagtcagtcccaatatggagcgtcattaccgacctcgagcgaaacattgctccgctctatcgccacgcgcagccagcaccggcagtgccgggtaaatggattccggtaagcgagcagatgccggaagaccgcacgcaggtaatcctatgggatgctgaaattggagaagtaacaagcggtcactacagtcataaaacacatactttttatcattgcggcgatgctatcgaaaacgagataacccactggatgccgcctccatgcgccccgcaggaggtgaatcgtgaataa

SEQ ID NO: 181921 - DNA, 231 bp, Klebsiella oxytoca
gtgaataaggtcgaactgcttcagaagatatcggcactcgccactgaatgccacgcgctggcctgtgagcttgatattggtgatgagcgaaccgaaatgttcgaaatctacggcgtgctacacaacctcggtcgccgtggctacgccagccaggtagggcagagaatgaatccgcttctcgtatcctgcgatgacgacgatgatgatgattgggatgaggatgacgactga

SEQ ID NO: 181922 - DNA, 306 bp, Klebsiella oxytoca
atggctgagttacgagcaggtgggttagctttagtactggcttcggaaaaccagaatgaagttggcaaaaccgttacgttggttcgtgttgtatcaagtggggaatatcacaaattccctgacggctgcagatacaccatgatagagccggggcaacagatatgggtagtatcgggcgacgtttcgatttacacaagcaaaccgtcgggaggcatgtcaattttcccagccaaaagcctgatgcccatcgacggcgacgacttcagcaatgaagatgagcgccagaaggagcaggagcacgcctaa

SEQ ID NO: 181923 - DNA, 741 bp, Klebsiella oxytoca
atgaacaacatcattcccctgcagaattcaccagaacgcgtttcgttattgccgatcgccccgggcgttgattttgcgaccgcggtggcactccggcggatggccacctcaacaggtgccacgccggcttacctcctggcgccggaagtgagcgccctcctctggtatatgcctgaccagcgtcaccacatgttgttcgccaccatgtggaataccgggatccgtatcggtgaagcccggacgctcaccccggaatcgttcgacctggatggtctgcgcccttttgttcgggtgctgtcggaaaaagtgcgggcacgtcgtggccggccgccaaaagatgaagtgcgtctggtaccgctgacggatgccagttttgtgcgtcagatggaaagctggatggtcaccacccgcccccgccggcgtgagccgttatggcctgtcacggatgagacaatgcgcaactggctgaagcaggcagtgaaacgggctgaagctgacaacgtgcatttttcgatccccgtgaccccacatactttccggcacagctatatcatgcacatgctgtatcaccggcagcccaggaaggtcatccaggcactggccgggcataaggatccgcgctcaatggaagtctatacccgggtattcgcgctggacatggccgccactctggctgttccctttaccgctgacggtcgcgatgccgcagagatccttcgttccctgccaccgcccggatga

SEQ ID NO: 181924 - DNA, 1011 bp, Klebsiella oxytoca
atgacgagcgaaaataacagcttacctctcaatcttcaggaagtggacaagacaaccggcgaagttgttaagctggatgtcaacagtaccagtactgtgcagccggtagcgctcatgaggctcggtctcttcgttccaaccctgaaatcaacctccaggagtaaggcaaaccggaaaaacgtcacagatgccactgaggagcttgtacagctgtccattgctaaaagcgaagggtacaccgacgttaagatcaccggttcgcgtcttgatatggacacggattttaaagtctggctcgggatcattcgctccatgtcagagtatggggtaaaaagtgataccctggaactgtcgttcgttgaattcgttaagatgtgtggatttgactcccggcgctcaaacaagaaaatgcgcgatcgcatcagtaattccctgtttaaactcgcctcggttaccctgaaattccagagcgagaccaaaggatggaccacccatctggtgcagtcagcctattatgacatcaacgaggatatcgtggagatcaaggctgaacccaagctctttgagctttaccacatggacaggcgggtactgcttcggctgaaagcgattgacgccctgcagcggaaggaatcggcccaggctctgtatacctacatcgagagccttccccagaatcccgcgcctatctccatgaaacgtatgcgggacaggctgaatctcacctcaaacatctatacgcagaaccacacggtccgaaaggcgatggagcagctgcaggatatcggctatctggattacaccgagtttaaacgtggccgggcgacttacttcagtgtgcattatcgcaatcccaaactcatcagcgggacggtgaaggtaccgcgcagggaggaagaggagctggcgccggagcagaattatgacgaagtcattaaggctctgaaggctgcaggcatcgatcctcagaaacttgctgaagcgctctcggcaatgaagccggtaaattga

SEQ ID NO: 181925 - DNA, 1167 bp, Klebsiella oxytoca
atgggactgatggacacacttaaccagtgcattactgctggacatgagatgacgaaggctattgccattgcgcagtttaatgacgacagtccggaagccaggaagatcacacgccgctggagaataggtgaagcggcggatctggttggagtttcttctcaggcaatcagggatgcagagaaagccggccggttaccccacccggatatggaaacccgtggcagagttgaacagcgtgttggttataccatcgaacaaatcaatcatatgcgggatgtgtttggtacccgactgcgacgtgcagaagatgctttcccaccggtgatcggggttgccgctcataaagggggggtttacaaaacctccgtttctgttcacctggctcaggacctggccctgaaaggtttacgcgtcctgcttgtagagggtaatgatcctcagggcacagcctcgatgtatcacggatgggtgcccgatcttcatatacatgctgaagatactctcctgcctttttatcttggtgaaaaggatgatgccagttatgcgataaaacccacctgctggcctggccttgatatcattccgtcctgcctggcactgcatcgcattgaaactgagctgatgggcaaatttgatgaaggaaaactgcccacagacccgcatctgatgctccgccttgccattgaaacggtcgctcatgactatgacgtgattgtgatcgacagcgcaccgaacctcggtattggcacgattaatgtcgtatgcgctgctgatgtgctgattgttcccactccggcagagctgttcgattacacttctgcactgcagtttttcgatatgcttcgtgatttgctcaggaatgtggatcttaaaggctttgagccggatgtccgtattctgcttaccaagtacagtaataataatggttcacagtcaccgtggatggaagagcaaattcgcgatgcgtggggaagcatggttttaaaaaatgtggtacgtgaaaccgatgaagtaggtaaaggccagatccgcatgagaaccgttttcgaacaggcgattgatcaacgttcttcgaccggtgcatggcgaaacgcactttcaatctgggaacctgtttgtaatgaaatatttgatcgtctgattaaaccacgctgggagattagataa

SEQ ID NO: 181926 - DNA, 966 bp, Klebsiella oxytoca
atgaagcgtgcacccgtcattccaagacatacagcaaatactcaggcagttgaagacacgacagcgccagctgcaccaatggtggattcgttaattgcacgtgtcggggctatggctcgcggcaatgcaattacgttaccggtgtgtggtcgggaagtgaagtttaccctagaggtgctccggggtgatgttgttgaaaatgcttcccgggtatggtcaggtaacgagcgtgatcaggaactactgaccgaagatgccctggatgatctcattccttcatttttactgaccggtcagcagactccggcttttggtcgtcgggtttccgatatcattgaaattgcagatggcagccgtcgccgcaaggccgctatcctgacagaaagtgattatcgtattctggtcggtgaacttgacgatgagcagatgtcagcattgtccagactgggcaacgattatcgcccgacgagtgcttatgagcgtggtcagcgttatgcaaaccgactgcagaatgaatttgccggaaatatttctgcacttgccgatgcggaaaacatctcacgtaagattattactcgctgtatcaacacagccagactgccgaaatccgttgtcgcccttttctctcatccaggtgaattgtctgcccggtcaggtgaagcccttcagaaagcttttgcagataaagaagaattactgaagcagcaggccgtgactctccatgaacagaagaaagcgggtgtcatctttgaagcagaagaagtcataagtcttttaacatcggtactgaaaacgtctcctgcatcaagagtgaatctgagctcacgtcatcagtttgcgccgggggcaacagcattgtacaaaggcgataaaatggttctgaaccttgacaggtcccgacttccagctgagtgcattgagaagattgaagccattctaagggacctcgaaaaaccgatctcctga

SEQ ID NO: 181927 - DNA, 333 bp, Klebsiella oxytoca
atgctcacggcggggattttccctctgaccgtattctgcaagaacggtgatatcacgaatcccgagctgtctggcggtaaaatgccggacgccggaaggaatatgattcatatcggtgaggaaggtgcccagaaaacggacacatccaatttgcagggcaatgcccagacggttgtgatcacctctgctttttccgataaattccttgtctgcttcatcaaggtgaaaatatcgtgccagctgaagctcatccggttcaccggtgaatctgccatagctttcagtctgctcagtggtcagaaagtcaacgggcatatcggcctccctgcctga

SEQ ID NO: 181928 - DNA, 558 bp, Klebsiella oxytoca; identical to SEQ ID NO: 25303

SEQ ID NO: 181929 - DNA, 606 bp, Klebsiella oxytoca; identical to SEQ ID NO: 125641

SEQ ID NO: 181930 - DNA, 777 bp, Klebsiella oxytoca; identical to SEQ ID NO: 121845

SEQ ID NO: 181931 - DNA, 825 bp, Klebsiella oxytoca; identical to SEQ ID NO: 96871

SEQ ID NO: 181932 - DNA, 252 bp, Klebsiella oxytoca; identical to SEQ ID NO: 30842

SEQ ID NO: 181933 - DNA, 861 bp, Klebsiella oxytoca; identical to SEQ ID NO: 25304

SEQ ID NO: 181934 - DNA, 2511 bp, Klebsiella oxytoca; identical to SEQ ID NO: 121681

SEQ ID NO: 181935 - DNA, 1041 bp, Klebsiella oxytoca; identical to SEQ ID NO: 121680

SEQ ID NO: 181936 - DNA, 810 bp, Klebsiella oxytoca; identical to SEQ ID NO: 121679

SEQ ID NO: 181937 - DNA, 510 bp, Klebsiella oxytoca; identical to SEQ ID NO: 121678

SEQ ID NO: 181938 - DNA, 639 bp, Klebsiella oxytoca; identical to SEQ ID NO: 121656

SEQ ID NO: 181939 - DNA, 129 bp, Klebsiella oxytoca; identical to SEQ ID NO: 121658

SEQ ID NO: 181940 - DNA, 1029 bp, Klebsiella oxytoca
atgagcgcggcagcttactacaacgagatcgacccattcgcggcgcagtggctgcgtaacctcatagccgccgggcatatcgccccgggcgaagttgacgaacggagtattgaagatgtcagacctgacgacctcagaggatttacccagtgtcattttttcgccgggatcggcgtctggtctcattccctccgcctcgccggatggcctgacgatcgcccggtctggactggttcctgcccgtgccagcctttcagcgcggcaggcaaaggagatgggtttgctgacgagcggcacctttggccccactttttccatctcatcagcgagtgcagacctcagcatgtctttggcgaacaggttgcaagcggtaacgcaagcacatggttcgaccttgtacaagcagacctggaaggagtgggatacgccttcgggcttgtgccgtttacgtcagcgggcgtcggtgcgccgcacatcagagagcgggcctactgggtggccaacgccaacagcgtcatcagtgaccggcgcgggaacgtccgggcgccagggcgggatgaatattcaaacggcggcgatgatgtccggctggccgacgccggtggcgaatacaaaggatcagccagaaacaaagagggggctggagaatcttgccgggctggtaaagatggcgggctgggtaacgccaatgtcgcgcgactggaaggactcggcgggaatgactgcgcagcggaacgggaaagagcgactggaccaactgccgcgccaggcgttcacctgttgccccttgaggttaacggtttttggcgagatgcggactggctcttatgtcgagatggcaaatggcgtccagttgaacccggcacattcccgctggttgatggggctgccgcacgcatgggacgagtcgagcccggggtggcaagagtggcaagcggcaaccgtgtcggccgcctgaagggttacggcaacgctataaacgcccaggcagctgcggctttcattcgcgcttatatgggggtcgcatga

SEQ ID NO: 181941 - DNA, 660 bp, Klebsiella oxytoca
atgagcggaaaatactctcttatttatgcggacccgccatgggcttatgggaacacaatcagcaacggcgccgcagtggaccactactcgacgatgcgactcatcgacctgaagcgtttgcctgtgtgggaactggctgctgaaaacgcggtgctggcaatgtggtacaccggcacccataaccaggaggcgatcgagctggccgaagcctggggttttacggtgcgcacgatgaagggcttcacttgggtgaagttgaaccagttggcagaactgcgcattaccaaggccctaacagagggagaggtcgccgacttttacgactttctcaccctgctgaatgccgagacgcgcatgaacggtggcaaccatacccgtgccaacacggaagacgtactgatcgccacccgcggcgccggtctggaacgcaagcacgccggcattaagcaggtggtctacagcccactcggcgcgcacagcgagaagccgtgggaagttcgccaccgcctggagttgctctacggcgacgtgccgcggattgagttattcagccgcagcgcagcgccaggctggagccactggggaaaccagtgcgccaccgcttccgttgagctgatccccggctgcgccatcgatgttgttaagacggaggcagcatga

SEQ ID NO: 181942 - DNA, 159 bp, Klebsiella oxytoca
atgaaaactaaccacgacggaatcaccgttggaagtatcactctgccctattccattaatcgccggggatggatcgccccaagcggcgacgttatcaaaaacccattaaaggctcagcggctggctgagctgatgaacagtaagaaggtggtggcatga

SEQ ID NO: 181943 - DNA, 681 bp, Klebsiella oxytoca
atgacacctgaaatcatccttgcacgcaccggcattgacgttacccgcgttgaacagggcgatgaagcctggcaccgcttgcgccttggcgtcataaccgcctccgaagtgcacaacgtcatttcaaaaccgagatcgggcacaaagtggactgacatgaaaatgtcctatttccacacgctactcgcagaggtttgcaccggcgcagcgccggaagttaacgccaaggctctggcatgggggaaacagtacgaggacgacgctcgcaccctgtttgagttcaccaccgacgtgaaggtaacagagtcgccgatcctcttccgcgacgaaggcatgcgtaccgcctgctcacctgatggcctgtgcagtgatggccgcggccttgagctgaagtgccctttcacctctcgcgacttcatgaaattcaggcttggcggattcgaggctatcaagtccgcctacatggcccaggtgcaattcagcatgtgggtaacaggaaaggatgcctggtatttcgcgaattatgaccctcgcatgaagcgagaaggcattcatcacgtggttgttgagcgcgacgacaaatacatgtccgacttcaacgaaatggtgccggagttcatcgagaagatggacgaatcgctggcggagatcggcttcaccttcgggggacagtggaaatga

SEQ ID NO: 181944 - DNA, 297 bp, Klebsiella oxytoca
atggcggcttatcactttcaggaccggattgaagagcaatcctggaaccagcaataccagcagctggcgcgcgaagagaaagaatcagagctcgctgatgacatggagaaaggcctccctctccggttgctggaatcgctttgcattgacgaacttcaacgccgcggcgccagcaaacaggcgataagccgcgcattcgacgatgacgtggagttccaggaacggatggcagctaacgtccgctacatggttgaagttatctcccggcatcaactcaacatcgaagaggagcaataa

SEQ ID NO: 181945 - DNA, 1005 bp, Klebsiella oxytoca
atgagcgaaataacggatttagtcgtcatcgagaaaaagaacgcgatggcggttttcaccaataacgaccagctcgacccgcttatcgaagcgatcgaaaaagaggctcgcagtctggtgccggacgtgaccaccaaaaaaggccgtgacgccatcgcatccatggctcacaaggttgcgcgctctaaaacttacatcgacaacgcaggtaaagacctggtcgctgagttaaaggcgctgccaaagcaaatcgacgaaaaccgccgcattgtccgcgaacgtcttgatgcgctgaaagatgaagtgcgccgcccactgactgaatgggaggaagagcaggctcgaattgcagcggaaaaggccgccgaagaagagcgccagcgcattgaagccgagcaaaaagcagcgctcgaagccctcataaagcaggttgaagtggaccacgaaatggccctgctgatgaatgacgctttcgaccgcgaacaggcagagaagaaagcagaagccgaacgccagcgcattgcccgcgaagaagagattgctcgccaggcggaagagaaagccaaacgtgaagcggaggagaaacaccgcgcggaaatggaagcatcagcgcgccgcgaggctgaggaaagagcagccaaagagcgcgcagagcgtgagcgcattgaagcgcagcaacgggcagagcgcgaacagcgagaagcagctgaacgtgccgagcgtgaaaaacaggccgccgtggaagcagagcgccgcaaggctcaggaagaagccgaccgcatccgccgagaggcagagcaacgcgaacaggcccgtctggccgaagagaagcgcaaagccgatgagcaggcgcgccgggaagccgacgttaagcaccgcaaagctgtcggtactgaaatcgtcaaggctttgctggccaataccagcgtaacccgcgatcaggcgattgaagtcctgactgcgattaaagacggaaatatcccacataccgggatcagctactga

SEQ ID NO: 181946 - DNA, 972 bp, Klebsiella oxytoca
atgatggcgactggggcagaaatcgtcgggcagacctatacgatgttccaggcgagcaaagagatggtgcacccaatgctgaaagtggctggagtgatcggtggcgtggcggtggttattgatggtatatcattaattatgaagaatcatgatgttaagaatttaggggattctaaagcaggaaatcaatatctagctgccggatatgtaacattgacagcaggtggtttgggtatctatgcaggtgttgttggcaattttgcacttttcagtgaaacattaattttaggacctataggatggtgcattgctctaggaatagtggcactgattttgacatccgctgctgacagcaatgttcgctcgccgctggagcgctggttgacccatacctgttttggcgtggttgaaaagcgcggcggtaaagagaaagcctggagtgccgccagcctgagtgatttgcaggaagcgatgaaagaattacataccattgccagcggtgtttcagcgcagctggttcgcgaccggatcactgagttcttgttcaattccacgatatcgggaaccgagatggtgtccgttctggcgacccttcccgattatagccagtccggttcagactggctggttgagttagctgccattgggagtggtgggcgtgaggtgctggcgcgtaacggttccccgacaaagcttgcaggcctggccaaaccagtgcctcaggctgttgaattgactcatatcatgagcatgaatgcggtagtcgttccacctgccattaaaatgacctctgcgcctgcactggatgaaacgctagtcacggcgggtaccagtaaaatactgcagctgagtggagaatacccactaaatacccggcgcttcacgggcatggagctgaaagtcagttactggccagacaaaacgtatccagaagaaattttgcaactttcagccaccatggacagccaataa

SEQ ID NO: 181947 - DNA, 699 bp, Klebsiella oxytoca
atgaaaacggaacaaccgttatggggcaggggcgttatggtctctccccagcacttccagcagcaggccgcgtattcagcctggtctgcggaatgtatcgcccgactcgggctttctcatccctgggggatgatcgatgccacattcgaatcggatgcactgaaactgggccgcctgcaggcccgtcatctgcatatccgtttccccgacgggacattaatcgatacggataacgctgacgatttgccaccggtactggcgcttgagaatgaatcacagcacgtggtggtggtactggcccttccgctgctgcgggcgaacggcggcaactgcctgaaacccgatgaggtggctgagcgtcctgttcgctatcggcagcgctggcgggatgtccgcaacgcctttggggaagatacccgccagattgcggtgatgcgcccggagctgacgctgcgtttcgcccatcagaataacagcgattacctgacctgtccgatcgcccgcctgcagcaggattcgcagagggcgtggcaacttgatgagacgtttcttcccccgctcctggccatccagggtagccgctggctgatgacccaactggagcaactgatgacccagttgcgtagccggagtcatgcttggttttcagatccataccatgcacgagaatatgaaatcgctgaaaacctggctacctga

SEQ ID NO: 181948 - DNA, 165 bp, Klebsiella oxytoca
atgaaacaggttgacgattcaaaacggtttcctcgtttgagtgggaagagtcccgaggaaatcgtagaactattcaaaagctacaactttgtcgacgatcatggtcatctactgcatatgtgccaggacttcaaagatttggttgagctggctagcgaggcctga

SEQ ID NO: 181949 - DNA, 462 bp, Klebsiella oxytoca
atgagccgcttaaccgccattatcagcgcagtggctatctgcctgattgtttgccttgggtggctggccagtcactaccacgacaacgtcaccgagttcaaaaagcagcgagacgagaaaactaaggcgctcaatctggctaatgccaccataaccgacatgcagacccgtcagcgtgacgtagctgcgctggatgccaaatacaccggagaactggcagatgctaaagccactatcgatcagcttgagcgtgatgttgcttatggcaagcgcaggctgcagctcaacgccagatgtccctcgaacggagcggccgcagccggcggcctgggcgatgcttccggcccccgacttactgactccgctgagcgggattattggagtctccgagccggaatcgccaccatcacagggcaagtgagctacctgcaggaatacatccgcacgcagtgcctcaaataa

SEQ ID NO: 181950 - DNA, 540 bp, Klebsiella oxytoca
atggctaacctgaaaacgaagctcagcgcggccatgctggcgatgattgccgccggcgcatcagcaccagtgctcatggatcagttcctgaatgagaaagagggtaacagcctgacggcttaccgtgacggttctggcatctggactatttgccgtggcgccacgcgtgtggatggtaggcccgtcgttcaaggtatgcggctgacgcaggacaaatgcgatcaggtgaacgccatcgagcgcgataaggcgctggcgtgggtgcagaagaatgtgcacgttccgctaactgaggcgcagaaagttggtatcgccagcttttgcccgtataacatcggccctcccaaatgtttcccctcgacgttctatcgaaaactgaacgccggtgaccgcaagggggcgtgcgcggagattcgtcgttggatctttgacggtggccgcgattgccgcctgaccaaaggccagaagaacggctgctacgggcaggttgagcgccgtgaccaggaaagcgcgttgacgtgctggggaatagaccaatga

SEQ ID NO: 181951 - DNA, 249 bp, Klebsiella oxytoca
atgaaaatgcctgacaaaatcttttcggcggcctcgtactgcacgtcaggcggccttatttgcacaggtctggcgagaaccttcgactggtttcatgggctggactggaattttatagctctggcaagcggcgtgataattggcgttgcgacttacctgacaaatctctattacaaacgccgctggacgaagatgtatcagcagtcactggaccgtggatacggtggcccgcctccgcaggataattga

SEQ ID NO: 181952 - DNA, 456 bp, Klebsiella oxytoca
atgactctgccagtagacggcatcaaactccatcgcggcaacttcgcggccataggccagcagattcagccattgctggatgctggccagtgcttccgcctgcaggtgaagccatggcgcgagaagcgcagcctgtcgcagaacgcgctaagccacatgtggtatacggaaatcagcgactacctcatcacccgcggcaagacgttcgctacgcctgagtgggtcaaagacgcgatgaagcacacctatctcggctacgaaagcaaagaccgggtagacgtcgtgtccggagaggtgaccacggttcaatccctccgccatacgtccgatctggaaaccggagagatgtacatcttcctgtgcaaagtcgaagcatgggcgatgaatatcggctgccacctgaccattccgcatagctgcgagtaccagcaactgcgcgataagcaggaggcctga

SEQ ID NO: 181953 - DNA, 1314 bp, Klebsiella oxytoca
atggcatgggaaacagacctgcaggacgccagcttccggggcgtcgcgttcgatatcatcaacacccgcgacagcatgcagcgcgatatcgcccagcacgaatatccgtaccgcgacggagccaatattgatgatctcggcgctaaacctcgcagcctgcagtgtcaggcggttttcttcggtgacgactacgagagccggctgcaggcgtttatggcggccatctatacccgcggaccgggcgagctgatacacccggtgttcggggtcatgccggacatgctgtgctacgtttaccaggtgaatcacgaggccgataaccccgactactgcaccgttgatctgcagttcctgcagtcaggtctggatgtcgagttctttgtgcgagagtggccactcagccaggccgacgccatattcaaccaggctcagggtattctcgataacgccgcgacgctgctggataacgccatgaagccgctacgaacggcgcggcagtatctggcccgggccaaagcgctgggcgtgacggcgctgaatatggttgctgttctgcgcggtgatatcaccgggtttatcagcagcaccaccgattttgttaacttcccgtcggccttcatgaacgatattcagtcggcccttagcctgcagagctcagcagcgatgagctccatcagcagcgactctgccgtctatgcgtcagcaccggccgtagtcatcgcggactgggcagcggtaaaaacacaggccgatgaagtggccgcgctgccagcgggtctggtcactggcgatgtaaccgcatcagtcgagatgccggcgaacgtgaccaccagtgatatccgcgagctcatcgcaatgaccatgatcagcgtggccatcgagctggcgcagcaggcgtcagaccttcttagtgatgagaccatcacggcttcactcagtcccgctgatatcagtctgatcgccggtgatgcccgtcaggcggtacagaacgccatcgacagcgtgcgcagtacctgggcggcggagatggaaaacgtcagcagttcagagacgtcgatcgccctgcagtatcagccggtgattgatggcctgcgcgatactgcgctatccctgcagtcgatggctgtggccctgattaatgcccggccgccgatgattcagcgcacggtggccagcgccacgaacctgcacctgctggcgcacctgtggtatggcgactacagccgcgccggcgagctgaagctgctcaatccgtccctccgggaccctaacaacatcatcccgggagacgtgctgaatggctacgcagaataa

SEQ ID NO: 181954 - DNA, 2235 bp, Klebsiella oxytoca
atgcgtgacttaaagcttgccatgaccctgcttgcgcgggatcagggttctaaagccttacggcaggcgctgacagatatacaacgtcagactaacgccaacaaaaaaaccgaagatgatgcctcccgtgcccgggagcaatcctcccgtgaaggcatccgcgcatcacgcaccctccagcaggaatatcagcgggcggccagtgcccgttccacactggggattcgttctgaaaaagatattcagcgcgaaatcatgcagacgcaggccgcttataaccggttgctgcgctccggcaccatgagtgccaatgaacagactcgagcattcaggtccatgaccagccaggttgcacagttacgcactgagctaaatggcgcgggccagtctatgtcgcgtatggaacgcatgcgtaactggggcggtaacgcaactgcgattgcgggcggcgtgacggcagcggccgcagtactgcgtgagcctgttcgtaatcagatgagttatgaacagcgtctggccatgatggccaatacggcattttctgatcgagatacctccggccgtcgtgcaggtatgcagtcgatggaccagcttgttcgtcgttccgttgctgtcggcggcggcagtaaagagtctgctgctgaaacactggataccttacttgcctctggtgctgtggattatgattcggcagagaagttgctcccgacactgcaaaaatattcatctgcatcaggagctgatgctaaagaccttgcacagattgccattcgtcttaagcagtcctttggtattactgacgaacagctccccacggcattgaatatggcgattaaatccggtcagttaggttcctttgagctgaaagaccaggctaaatggcttccgcagcaacttgcagcagccaacgcgctgggcatgcgggggcttggagatctggctgttctgctcggttttaaccagacctctgcaattactgcaggctccactgatgaggctggtaacaatgctgttaaccttctgaccaaaattaacagccaggatgctgctaatgccgccgccagagtcaaatacaacggtaaaggtattgacctcccgggaacactcatcaaggcgcgtggtaaaggtatcaatgcactggatgctttcagtggtgtcgtagataaagttgtcggtaacaatcccgaatttcagaagctagagaagcaactcaatagtacgtcgaatgattcagaaaggcgggagattatggagtcccaggcgaagcttctggaaggctctgccgttggacaaattcttgcggaccgtcaggcgctgatggctctcatctcttaccgttctaatcgtaaatacgccaaagatgttattaagggggttaatgctgagcgagacctcccaacagatcgacaagccggggagcaaaactttgcattaatcgaagggactaacctttataaaactagtcagttaggtaaccaatccgactttgcacagatggatgccatcaagcctctgtctgaagtgctaggcacgttgtcaaaaaacctcaccgactatgcagctgaataccccgggttgaccactgccgttgcaggggcaacaacaggcattaaagcgctggctgctgctgcggcagccatagcgggcatccgcttccttaccggtggaggtatccccggtatgggtagaaaaggtggcagcggcggtggctctttcagtcctgcagacctccttaccggtggcggagcgtctggggccggtgtggttccggtctatgtgacaaactggaaagagataggtggcgacgaaaagaacggggtaatggatgcactcaaggatattccaggctttgttggtaagtttgctgcttactttacggcagctgtggccataaaggattcacttgatgaaaaaatggatggtctgaatcaggaagccgaagaaaaagggatgtccccaggtgagctgatgatgcaaaaaatggaagaggaaaagaaaaagcagaagccactgttcgacttcgatatttcttcatggtggtcatcccctcagaatatccgcgtccctcagagcgccaacggttacccggtacctccgttcgcgcagcagccggcgcaacaggtccccattaatatcaccacgcaactgcaggtagatggccgggtactggctgaggtggttaacgaggctaacaaccagtccgccacccgtggcccacagggaggaccgcactga

SEQ ID NO: 181955 - DNA, 402 bp, Klebsiella oxytoca
atgaaagcatcaggagaattgttattcggcattccttcaggggatggcagtgttatccattatgactacaccgtgatactgccggtgattcgtcataccgtgaatgcactacaggcgacaatggaagcacttggcgagacgaccagtgcggcggcacatatgtactatcgcgttgctgtcctggcggaagtgattcagtctctcgggagcctcagtgccgatgaaatcaccgctgaactgctgctggatgggctgactgacgatgatatggatctgcttgatgcagagcttgccgggctcaaaaaaaagcggatgcgcacgctgccggactcagcggactccgccgagccatcctcgccctcggacagtacgggatcagagaagacagcgtcaggggaatga

SEQ ID NO: 181956 - DNA, 375 bp, Klebsiella oxytoca
atggcacttgaagaatatgtgggcgcgatcgtgttgtacgtggacggccaggagattgaggttaccgatattcgtccccagacgaacaccggccgcaagctggttaagaccatgaaccgtaccggacgcgccaaaggttattcgaaaggtattgctgaacattcattgcagatcaccgtcgtactcccgaaaaacgtcgcgcagcctgactgggatgaaatggtcggtgcgaagctgactctgatggatatggacggcaacccgctgtactcctacctggactgctttaccactcagaccggcgaacagtatggcgtggacaacgaagcccgccgcgatctcaccattcagtcactgcgtaaggtacaaggctaa

SEQ ID NO: 181957 - DNA, 309 bp, Klebsiella oxytoca
gtgtccctgctggacctgaccaccatccgcaccctggattatgtgcgtaaggcatgccgcgagcgtattgcgctgcgcttcccgcgcagcaagctttccacccgcacacctccgctggtgaaaagcgagctctatgacgtactgctgaagctggaagaactggagattattgaaaacgttgaggcgaacaaggacaaactgattgttgagcgcgacagtcaggacagcaaccgccttaacgcccgtatcccggcggacgtggtaaacggcctgcatgtgtttgccggtgtcatcgacctgtatttataa

SEQ ID NO: 181958 - DNA, 156 bp, Klebsiella oxytoca
atggtcgggtccaaactgaccaccatggatatggacggcaacccgctttactcctacctggattgcttcaccacccagaccggtgaacagtacagcgtggacaacgaagcacgtcgcgatctcaccattcaatcactgcgtaaggtacaaggctaa

SEQ ID NO: 181959 - DNA, 396 bp, Klebsiella oxytoca
atgaaagcatcaggacaactgctctacggcgtaccccatggtgacgtcattcattacgactacaccgtgaccctgccggtcatgaggcataccgtcaaggcactggcttcaactatggaggctctgggggaaaccgatacgccagcggcgtatgttcactaccgagtagcattgctggcagaagttattgaatctcttggaaccttaagcaaggacgacattactgtggatttccttctggataatctcacagaagaggatctggatatccttgatgcagagctggccgggcttaaaaaaaagcggatgcttgctcagaaaagctcaccggcctccggcgagcaaccctcatcctcggacgattcggcatcagcgccgaccgcatcgaaggtatga

SEQ ID NO: 181960 - DNA, 2178 bp, Klebsiella oxytoca
atgcgctcactacagcttgccatgaccctgcttgccagagatcagggttctaaggtactgcgccaggcgttatctgatattttcaaacagattaacaccaacaaaaaggccgatgaagatgccgcccgtacccgtgagcagtcaacgcagagcggtatccgggcctcccgcacactgcagcaggaatatcagcgggcagcaagcgcccgttcgacattaggtatccgctcggagcgtgacatacagcgtgagatagctcaaacccagggggcctacaatcgcctgttacggaccggcacactcaccgcgaatgaacaaactcgtgcattccgggcgatgacgaatcaggtatctcagttgcgtaccgagctcaacggtgctggtcagtcgatgtcccgtatggaacgcgccagaatgtggggtggaaacgttacggcgatcgccgggggcgttaccgctgcggccatgattattaaagacccggttcagcggcaaatggcttatgaggcccgcaatgctgagattgctaacaccggctataacgagatccctccagaagaacgcttaaaaaaaataccagtgctaaatggagctataagaaatgctgttcgttatggcggtggaacaccagaacttactcaggaggcactgaatacgttgctttctaaggggtcggtagataaagaaactgcaatgaaaattttgccggatgttatgcgctattcgacagcatcaggcgctaatcccgaagatctggctaagattgcctccgccgctatcgctaactttggcattaagcttgaggaacttcctgctcttttcgataaactcattcgttcaggagaaaatggagggtatgaactggcggatatggccaaatcaatgccaaccacgatgaccaaagctaacgctatcggtatgtctggccttgcagacgtcgataaactcgcggcctggtatcaggcgaactctctttctgcgggagataacagccaggccgcaacaaacgtcaataacttcctcgataaaattaccagtgctgacactcagaacgcattaaaaacctataaattccgggtgaacggcaaagtgatgaactacaccgattatctggcacagcagcgtatgaacggggtcagtgtccccgatgcttttatgggtgctatttcaggcattgtgtcgcaagataagcgggtacaatctcttagagcggatgcgaagaaatataagggcacagaccgggaaaaggagattaatgcagcgctggatgtagtggtcgcctcaatcatttcgaaaatagttgcggaccaacaagcgggtatggctctaaaaactaacattttgatgagggattatattaaggagcagcagtcgggcactcgcaatgccgcaggtgctggtgcggcatcattcagtgttatttcgtctaccaatgctttcaaatcacagcagcttgaatccgaaaaagtctttgccgaacaggatgccatgaagcccctggcagatctgtatggggatttgtcaaccaagcttgtcgattatgccaaggaatacccgcaattaaccacggccttgtcaggtgctacgactggcattaaagcgatgactgcagccgcggttgcctttgcgactcttaattttcttactggcggtaaaataaccccctcgacttctccggtaccaccaggaaaactaccaacaggaggttccggctcatggggatggggggcgaaattgctcggtgcaggtatgtcagcaacagcaattgcaacattcaccacccgcgacgaagatgaagagattaccaacggtccggctaagtggtctgccttacggtctcgttacagtcaggagcgtattgataaagcgagaaagctttatcagccctggtaccagattggtaaaggctatgccagtgaaaacgaagagtggctatcccgactggataaagatgaagcgaacggaactgtgccctcatggtggactccacctacaaatatccgcgttcctgagtccgccaacggctacccggtgccaccatttgcccggccgccggcacagcagccgcccatcaatatcaccaccaaacttgaactggatggccgggttattgctgaggctgtgaatgaggttaacaaccagtccgccgctcgtggcccgcagggaggaccgcactga

SEQ ID NO: 181961 - DNA, 1314 bp, Klebsiella oxytoca
atggcatgggaaacggatctgcaggatgcctccttccggggtgtcgcgttcgatatcatcaacacccgcgacagcatgcagcgcgatatcgcccagcacgaatacccgtaccgggacggagccaatattgacgatctcggtggtaaacctcgaagcctgcagtgtcaggcggttttctttggtgacgactacgagagccgactgcaggcgtttatggcggccctctatacacgtggtccgggcgagctgatacacccggtgttcggggtcatgccggacatgctgtgctacgtttaccaggtgaatcacgaggccgagaaccccgactactgcaccgttgatctgcagttcctgcaggatggtctggatgtcgaattctttgtacgcgagtggccactcagccagtctgacgccatattcaatcaggctcaggggatcctcgataacgctgcgacgctgctggataacgccatgaagccgctacgaacggcgcggcagtatctggcccgggccaaagcgctgggcgtgactgcgctgaatatggttgcggttctgcgcggcgacatcaccggttttatcagcagcaccaccgattttgtgaattttccgtccgctttcatgaacgatattcagtcggccctcagcctgcagagctcggcggccatgagctccatcagcagcgactctgccgtctatgcgtcagcgccggccgtggtcatcgcggactgggcggcggtaaaaacacaggccgatgaagtggccgcgctgccggcgggtctggtcactggcgatgtaaccgcatcagtcgagatgccggcgaacgtgaccaccagtgatatccgcgagctcatcgcgatgaccatgatcagcgtggccatcgagctggcgcagcaggcgtcagaccttcttagtgatgagaccatcacggcttcactcagtcccgctgatatcagtctgatcgccggtgatgcccgtcaggcggtacagaacgccatcgacagcgtgcgcagtacctgggcggcagagatggagaacatcagcagttcagcgacgtcgatcgccctgcagtatcagccggtgattgatggcctgcgcgatactgctctgtccctgcagtcgatggctgtggccctgattaatgcccggccgccgatgattcagcgcaccgtggccagcgccacgaacctgcacctgctggcgcatctctggtacggcgactacacccgtgccggcgagctaaaactccttaatccgtccctccgggacccgaataacatcatcccgggagacgtgctgaatggctacgcagaataa

SEQ ID NO: 181962 - DNA, 816 bp, Klebsiella oxytoca; identical to SEQ ID NO: 6090

SEQ ID NO: 181963 - DNA, 804 bp, Klebsiella oxytoca; identical to SEQ ID NO: 6089

SEQ ID NO: 181964 - DNA, 837 bp, Klebsiella oxytoca; identical to SEQ ID NO: 22759

SEQ ID NO: 181965 - DNA, 540 bp, Klebsiella oxytoca; identical to SEQ ID NO: 19206

SEQ ID NO: 181966 - DNA, 1056 bp, Klebsiella oxytoca
atggtaaaaaatattatgcttttattattttttttctctttttcagcttgtagtaactctaactttacaccaggaaaaccgtggtatgataataacggcgaggtcatcaatgcacatggaggaggcgtgttgaaatttaaagataaatattattggtttggtgaagcaagaacagatggaagaaaaaatactgggaaggtaagcgtatattcttccgctgatttatataattggcataatgaaggaattgctttagatctttcatcaaaattagcaatgatcgctgtggaaagacctaaagttatttataataaaaaaaataaagagtttgtaatgtggttccatgaagagttgggaggtaaatataacacaggtaaagccggtatagctgttgcaaaaaaaatcacaggaccttatgttttgtataaagatttttggcctaatgcatcagtggatccaatttatgtggataaacatgatattaataataaatattatcataataatgtttttaaagctgataatgattttaaagacaatttctcccgtggacagatgtttagagatatgacactttttgttgatgatgattctactgcttatgtaatttatgagtcggaggggaattactcgatacaaattgcagaattggatgatagctataagggcgtcactgggagatattcaagagttttagtaggtttaatgaacgaagcccctacgatgtttaaatacaaaagtaaatattatatgattacatctgggctaaaagggtttagccctactgacgcacggagttcctatagtgataatatatttggaccgtgggtttctttaggtaatcctgttcgctctgatgatgttgataatattaaaaaaactttttcctctcaaggaaccttcgtaatacagaatgttggctctaataacacatatatttttatggcagatcggtggcaaagtaatagtttgaaagatagttcatatatctggttaccaattgattgggataacaatattccggtaattagatggaaggctaattggaaatattga

SEQ ID NO: 181967 - DNA, 519 bp, Klebsiella oxytoca
atgggcttttataaaacgactcaaaaggcagcgcttgatgcctggggtaatgaaattaaccagcgtatcgcgctgaaagaaaaagctgacgcattcgctaaaaaatttggcggtaagccagtcttttctggtagcgctacagactatcactttcacggtctgtcattcgatgtcgcgccacttattggacatagcagtctctggacgctttcccgttcgcagaatggttatacccgcgagccccgtggtaagacccgtattccccgcgagcgccgcgaggaacatcagcagctgctggacgcatgggatgacggtcgccccacggaaagaatctcaagggagccttactggaaagccctgggtcttgaatggggaatgttgatcctgtgtggcattacccactatcgggtcggcgacgtgatttatttcaaaaccgacgccagaccatccccggattccggtgcaatcgagattgttgaatcggaatttaacgctgctgaaaaaacactgggctcataa

SEQ ID NO: 181968 - DNA, 639 bp, Klebsiella oxytoca
atggataagaaagaaacacaatttactgtagcgactgttccggctgattactggatggatgccaaaggcgcattaatcccggtaaaactgctgaaacctatcgacctcgctcgtgatgccctggtcggcgagatcgtgaccaaggcgattgagctcaataaactgatgaaggaatttaaagaaaattcctttgctgatatagcggcattcgtagacctctcggcgaatgaatatgatgtgaaactgggcggtaaaaaaggtaatgtcacgctctttacgttcgacggtcgctataaaattcagcgggctatggctgaccgactggcttttgatgagcgcctgcaggcggctaaagagcttatcgaccagtgcctggccgactggactgaaggcgcgcggccggagctgcagattctgattaaccgggctttctcaaccgataaatcaggcgaggtttctactggcgccgttctggcactacgccgttacgagattgaggatccacgctggcataaggcaatgacagcaatcggagaatcagtacagattgtagcaaccagcgcctatatccgtatttatgagcgtattggtgataccgaccaataccgtcctattgctctggacatggcggcggtgtga

SEQ ID NO: 181969 - DNA, 192 bp, Klebsiella oxytoca
atggctgaaattgttttcacggttaaggaagtcaaaggggaagttcatttatccgcaattatatcggctgaagaaacggattcccgtttggttaaagatacgtccaatattattgcaccgttaatgctggcttgtgctagcgctgaaatcgctaagttttttcaacatttaaatgaggcccgtcatggataa

SEQ ID NO: 181970 - DNA, 234 bp, Klebsiella oxytoca
atgtgccgtttaccgattaacgatccaaaaatgatggccccgattaatcgtcttatgcgtggtggcctgcaggttctggacattaatacccgtttccgtcgccctatcgtggaggttgatcgtccgtttgaggcatggcgcggtaaggaagtggaaattactgaacgccgcgatggtaaacagactctggtcaaaatgcttatctggcgcgggatgcatgttatctggaggtag

SEQ ID NO: 181971 - DNA, 237 bp, Klebsiella oxytoca; identical to SEQ ID NO: 149252

SEQ ID NO: 181972 - DNA, 183 bp, Klebsiella oxytoca; identical to SEQ ID NO: 149253

SEQ ID NO: 181973 - DNA, 1779 bp, Klebsiella oxytoca
ttgcaacagtgccagctgcgggccgctcccgccgcgaaggacgtgctcgacgccatcgaggtgctgcgcggcatgaacagcgacaacgcccgcaaggtgcccgccgacgcgccgaccgagttcatcaagccgcgctggcagaagctggtcatgaccgacaccggcatcgaccggcgctactacgaactgtgcgcgctgtcggagatgaagaacgcgttgcgttccggcgacatctgggtgcaggggtcgcgccagttcaaggacttcgaggactacctggtgccgcccgcgaaattcgccagcctcaagcaggccagcgaattgccgctggccgtggccaccgactgcaaccggtacctgaacgaccggctgacgctgctggaaacacagcttgccaccgtcaaccgtatggcgacggccaacgagctgccggacgccatcatcaccgagtcaggcttgaagatcacgccgctcgacgcggcggtacccgacaccgcccaagcgctgatcgaccagacggcaatgatcctgccgcacgtcaagatcaccgaactgctgctggaggtggacgaatggacgggcttcactcggcatttcgcgcatctgaaatcgggcgacccggccaaagacaagaacctgttgctgaccacgatcctcgccgacgcgatcaacctgggcctgaccaagatggcggagtcttgccccggcacgacctacgccaagctggcttggctgcaagcctggcacatccgcgacgaaacctacggggcggcgctggccgatctggtcaacgcacagttccgccatcccttcgccgagcactggggcgacggcaccacctcatcgtcggacggccagaacttccgcaccggcagcaaggccgagagcaccggccacatcaacccgaaatacgggagcagcccagggcggacgttctacacccacatttctgaccagtacgcgccatttcacaccaaggtcgtgaacgtcggcgtgcgcgattcgacctacgtgctcgacggcctgctgtaccacgagtccgacttgcggatcgaggagcattacaccgacacggcgggcttcaccgatcacgtcttcgccctgatgcacctcctgggcttccgcttcgcgccgcgcatccgcgacctgggcgacaccaagctctacatcccgaagggcgacgccgcctatgacgcgctgaaacccatgatcggcggcacgctcaacatcaagcacgtccgcgcccattgggacgaaatcctgcggctggccacctcgatcaagcagggcacggtgacggcctccctgatgctccgaaagctcggcagctacccacgccagaacggcctggccgtggcgctccgcgagctgggccgcatcgagcgcacgctgttcatcctggactggctgcaaagcgtggaactgcgccgccgcgtgcatgccggcctgaacaagggcgaggcgcgcaatgcgctggccagggcagtgtttttcaaccgcctgggtgaaatccgcgaccgcagtttcgagcagcagcgctaccgggctagcggcctcaatctggtaacggctgccgtcgtgttgtggaacacggtctatctggaacgggctgcgcacgcgctgcgtggcaacggccatgccgttgatgacgcgctgttgcagtacctgtcgccgctcggttgggagcacatcaacctcaccggcgattacctctggcgcagcagcgccaagatcggcgcgggcaagttcaggccgctacgaccgctgcaaccggcttag

SEQ ID NO: 181974 - DNA, 192 bp, Klebsiella oxytoca
atggctgaaattgtttttacggttaaagaagtcaaaggagaagttcatttatccgcaataatatcggccgaaaaaacggactcccgtttagttaaagatacgtcaaatattattgcaccgttaatgctggcctgtgccagtgctgaaatagcaaagttttttcaacatttaaatgaggcaagccatgaataa

SEQ ID NO: 181975 - DNA, 639 bp, Klebsiella oxytoca
atgaataatcagcaaaagcaattcactgtgaaaaccgctcctgaagggtactggattgatgcaaaagatgcattcattccggtaaaactcctgaagcctatcgacctggccagggatacgctggtcggcgagatcgttactaaagcgattgagctgaataagctgatgaagaaatttaaagaaagttcgtttggcgatatcggggcgttcgtcgatctttccgctaacgaatatggcgttaagctgggcggtaaaaaaggtaacgtcacactctacagctttgatggtcgttatcttattcaacgtgccatggctgaccgcatcgcttttgatgagcgtctgcaggctgctaaagaactcattgatcagtgccttgctgactggacggagggcgcacggcctgagctgcaaatcctcatcaatcgcgcattctccacagataaatcaggtgcggtgtccacaggcgctgttcttgctctccgtcgatatgagattgatgatcagcgctggcacagagcgatggaagccatcggagaatccttacaggttatcgctacaagctcttatattcgtatttacgaacgtattggcgacactgaccaatatatgcccattgctctgaatatggcgacggtgtga

SEQ ID NO: 181976 - DNA, 519 bp, Klebsiella oxytoca
atgggcttttataaaacatccacaaaaacggcgcttgacgcatgggacaatgaaattaaccaacgtattgcgctgaaagaaaaagcggactcattcgctaaaatatttggcggtaagccagtcttttctggtagcgctacggactatcactttcacggtctgtcattcgatgctgcgccacttgttggacatagcagtctttggacgctttcccgctcgcagaatggttatacacgtgaaccccgaggcaagacccgcattccccgcgagcgccgcgaggagcatcagcaactgctggacgtgtgggatgacggtcgccccacggaaagaatctcaagggagccttactggaaagcgatgggccttgaatggggaatgttgatcctgtgtggtattacccatttccgggtcggggatgtgatttatttcaaaaccgaagccacaccaaccccggattccggtgcaatcgaaattgttgaatcggaatttaaagctgctgaaaaaacattgggctcataa

SEQ ID NO: 181977 - DNA, 1062 bp, Klebsiella oxytoca
atgccgtttatcacgccgacgtttgaagatatccgcagcgatattctgcgcgatattaaaaacctgaatacagacgcggatatcggcgttgacagcgacttatatatccgcgccagcgcagtcgccagcgtggccaccggtatttatcagtatcagggctggatagttcgccagatatttcccgacacggccgataccgagtttctggaatggcacgcccgtacacgcggcctgtatcgcaagtcggccaccacggccagcggcaccctgacgatcaccggcgaacccggcgcgacggcagcggccggctacagtgtgacgcgcggtagcctgacatataccaccacggccgcagtgacgcttgatagtgacggtaacggcacggtagcggcaagctattccactgccggcgctgccggtaataccacagctatcacaacaggcacgtttaccagcacgccgacagggttcgacagtaccgttattatcgggattatgtccggggggactgaccaggaatcggatactgagctgctggaccgtctgcttgacattattcgtcgcgcaccagccggcgggaataagtacgactaccgccgctgggctatgtccgtggatggcgtcacggccgcttatgtatatcctctgcggcgcgggctgggtactgttgacgtggtcattacctcggccgacggcttaccctccgctgaaattattgccgccacgcaggcatatatcgacgatgtacgtcctgtaacagcaaagaactgcctggtgctggggccaacgattaaaacggtagacctggatattcaggtttcgcttgatggggtgacaattgatgtggcgagtgaaaatattatttccgcgctgaccgactatatcaataaattacctccgggtgagccgtttattcgctctcaggccgagatgctgatttctatcgtgaccggtgtcgtggaccgcgtcatcgtctcgccgacgtcgaacgtatttcctgatgtcagtgaaaccgtcgtggaatggatccgtgtcggcagcatcgaggtatcgcagctatga

SEQ ID NO: 181978 - DNA, 357 bp, Klebsiella oxytoca
gtggacagactattagacccgacaaccggcgactatgccggcacgagcaccaacaccctggctaacgcagtgtatctgcgtctgaccatcccgctcggctcgtggtgggcgcagccggctgtcgggtcaaagctttacctgctaaggagagagaaagatgtcacccgtgtacataagctcgctcgccagtatgccgaagaggcgctggctccgctgacggccgatacggatggccgggcaaaaagtatcacagtcgaaacttttcagggggagccgggctggctccttttattgatcaccgttattcaggccgatggtattaccgtcccctttaagcattttgtgagggttatttaa

SEQ ID NO: 181979 - DNA, 237 bp, Klebsiella oxytoca
atgcacaaaagcgccttcctcggagtagatggccatctcgccgctggccacctgcaggcggtacgcgccgttctcggtggcaatgatgatggcgtgcgacgtctggccaccgatggggagcacgatacactgagtgccggcaggcgggcaactggtaaacccgaagtgctggaacagttcggcgtcctgcagctgctcgccggcaagtcctttaacctgcacctgctggatagttaa

SEQ ID NO: 181980 - DNA, 1107 bp, Klebsiella oxytoca
atgcgtcttggtctgcctgccggcatttttcctgaaggtgtggcccggggtgtgccggttcaggtgcgcgtcgggccggacgtggtgatgaccgggcgtatcgaccgagtgtcgcggaccgtcagccgggatcaggtctcgctgtccgtcaacggacgtgacggcgcggccatcctggtggactgtgcatcacctttgctcaccagccgtcaggccagcctggaggaagtcatcgcccaggtggttcgtccgctgggtattaaaaatatcgagttgcacgccgagagctccatccgtaatgacaaaatcaccaccgaaccgggcgagcgggcatgggatatcctgctgcgggcctgcgccgggcgcgggctctggccatggttccgcccggacggcacgctggtcatcggtggcccggactatacggccgcgccggtggctacgctggtgatgcgccgttccggcaaaggcaacaacctgctcagcctcaccgatgaaagcagtatggagcgcagcttttcccgtctgacggtgctggcgcagggccatgcacactcaacgaacaacaaaaaagagctggggattatcgacgtcagcagcccggcaaccctgacgacgaacacggatagtgacgactcagccacagaaaccgagctcgataccggaatcccggagactggccagcatggtctgcagtttgttgtggaagatccaaccgtcacatattaccggccgcaggtggtcgtcatgcacgatgccgatgacctggaacaggttcgctaccgcgcccgcaaaatgatggccgatgcccgactggagggttattccctgattgcccgggttcagggccatcggacaagcgacggcgtactatgggagcccggacagcgtatacacgttatcagcgagccgcacggcattgatgccatctattttctgatggggcgggagtttaccggcggacgtccgggcggaacggtgaccacgctcaggctgaaagaagacggtgtctggatacctgatgcgtggccgaagaagaaaaaggcccgcaagggacggaaaaagaaaaagcaggagacagcgataatcgatgtggaaccaggttga

SEQ ID NO: 181981 - DNA, 435 bp, Klebsiella oxytoca
atggtcgtcataggtctcgcgcatctcatcgagcgtcgatttaccgtcggccagttggtcgctggttttgagcagtggggtctcaaaattcgcgccggcggtggcggtgacgtcgtaatcctcagccttcacggtatattttttggtgttaacgagatactcgtcgcattccacctcgacaatgcggccacgtttgatatggacatacgcggcttcgtcagagtagatggccatctcgccgctggctacctgcaggcggtatgcgccgttctcggtggcgatgatgatcgaatgcgacgtctggccgccgatggggagcacgatacactgagtgccggcaggcgggcaactggtaaacccgaagtgctggaacagttcggcgtcctgcagctgctcgccggcgagccctttaagctgcacctgctgaatagttaa

SEQ ID NO: 181982 - DNA, 1101 bp, Klebsiella oxytoca
atgcgtctcggtctgcctgccggcatcttccctgaaggcgtggcccggggcgttcccgttcaggttcgcgtcgggccggatgttgtgatgtccgggcgcatagaccgggtttcccgtaccgtcagccgggatcaggtatcgctgtccgtcaccggccgtgacggtgcggccatcctggtggactgcgcatcacctttgctgaccagccgtcaggccagcctggaagaagtcatcgcccaggtcgtgcggccgctgggtatcaaaaacatcgagctgcacgccgagagctcgatccgcaatgacaaaatcaccaccgaaccgggcgagcgtgcctgggatatcctgctgcgggcctgtgccggtcgcgggctctggccgtggttccggcatgatggcacgctggtcatcggtggcccggattatacggctgcgccggtggccacacttgtaatgcgtcgttcgggcaagggcaataacctgctcagtctcaccgatgaaagcagcatggagcgcagtttctcccgtctgacggtgctggcgcaggggcatgcacactcgactaacaataagaaagagctggggatcatcgacgtcagcagcaccactccgctgacggtaacggaagatgccgacactaccgacaccgaactggacacgggccttcctgagaccggccagcatgggctgcagtttatcgttgaagatccgacggtcacgtattaccggccgcaggtggtggttatgcatgacgccgatgacctggaccaggtccgctaccgcgcccgcaagatgatggccgatgctcgcctggagggttacagcctgattgcccgggttcagggccaccgtaccagcgacggcgtcctgtgggagcccggtcagcgcatccacgttatcagcgagccgcacggcatcgatgccgtctattttctgatggggcgggagttcaccggcggccgcccgggcggcgcggtgaccacgctcaggctgaaagaagacggcgtctggatacccgacgcgtggccgaagaagaaaaaggcccgcaagggacggaaaaagaaaaaacaggagacagcgataatcgatgtggaaccaggttga

SEQ ID NO: 181983 - DNA, 639 bp, Klebsiella oxytoca
atgaccagcaaattaactagagagtggttgcaggaagcaatttctgacatccaaaccagacgcaataacggctctataagttgggatgacgagcgtgaaaatatactgaaaacgtttgaaatagctttggccgcaatgggcagcgagtcgctctacaccgttcagccgccatcctctgatctggccttacaaaacttccgcgatgctatggtgggtatcgaacatatccgccgtgcgctggaggaaacatttggcggcctgcacgggacccatagtgagcctgatatcctggtggactgcaaacagatcgttgacgctatctatgctgcttacaggtctgccggtaatgccaattccgctagtccgacgggcagagtaatcagcatcagacaaaaggcctgggatgaatttgactggtggagtgcagcgtcagctcgcttatggcttgaagcatctccacagccagctgacctccagaccagatcgctggtgatgtggattaagcgtctttcgctggcgcttcgctctgccagccctgataacaaattacccaaagcggcgatgggctatctgcaaaaaaacggtctcatcagcatcgctgattgccttcgggggaacaatgaagagcctcctgcgtaa

SEQ ID NO: 181984 - DNA, 549 bp, Klebsiella oxytoca
atgattaaaaaagataaaagccatgtaagcaaatggcactctggattaaaaggaaaactgtggagcagtagagaaatagcctatttaatcgaacatggtaacagtaaaccattaatggatttatcagcagaattagagcgcagctatcattcggtaaagggaatgcgccacaaattggggttaggcaagcgtaaaagttatcgtttctggactaagcaagaaatagatttcctcaagtgcaatgcagggaagatggtatgcagagatatcgcgaaaaatttggggcgtagtctgcaatctgtaaaaggtaaggctgaatacatgagactcagccttatatgtatcggagaaaatcacccttgcgccattcatagtgatgaggatgtattgctttgccgcgaacttcatactgccggaatgagtgtaaaacttattgctgaaaaaatggaaatatcgctgggggccgttctggctattgtatatggtcaccgcatgacgcagcaagaccggatcctgttcgagctggacagaatggacgccagaagatga

SEQ ID NO: 181985 - DNA, 1005 bp, Klebsiella oxytoca; identical to SEQ ID NO: 9478

SEQ ID NO: 181986 - DNA, 744 bp, Klebsiella oxytoca
atgcaaagcctgatgcctcctgttgatgcacctaataatgaattcagcgacggggacccctcgctggggacgttaggaaccattgtcagagcaatgttcctgaataatgtgcagggtgccattcgttctgtacagcgtgagttattgtcaattctggccgccgcaaatatcaatcctgatggcgacagtaataatcaggtattacaggccattaaaaaaatcatggtggattcaaatatgtcggtaccttacggcataccgctaccatggccaaccagtacaccgccgacaggttatttaatctgcaacggtgcgtcattcagcgcggtaacctatccgaatctggctgctgtttatactggcggctcgttacctgatttacgtggccagacaatcaaagggttaccggcctctggccgtgcgctgctcagtcttgaagctgacggcaataaagcgcatacccacggagcatcagcgacagagactgacctgggcacaaaaacaaccagtagtgataacgaacacgatcacggctggggatccgggatgcaaaaacaaggcggcagtgatcaggaagttggcagcaatggcggtactggattcggacggacctctgtgcaaccgccgcattcacacacagtttatatcggcccacatggtcacatgataaccattgaggcgtccggtaactcagaaaccacggttaaaaacatggcattccattatattgtgagggcggcataa

SEQ ID NO: 181987 - DNA, 174 bp, Klebsiella oxytoca
atgacgctgggcgataaagttcttgaatccacattcaatgaattaaaacccgcacataccctttgttatttcctctacgaatccgaaatgacctatccgctttatctggatggctcatttgcgctggatggtgaacagccaatgaccggctacgtagaaaagaccaccgattaa

SEQ ID NO: 181988 - DNA, 744 bp, Klebsiella oxytoca
atgcaaagcctgatgcctccggttgatgcacctaataatgaattcagcgacggcaacccctcgctggggacgttaggaaccattgtcagggcgcttttcctgaataatgtgcaggatgccattcgttctgtacagcgtgagttattgtcaattctggccgccgcaaatatcaatcctgatggcgacagtaataatcaggtattgcaggccattaataaaatcatggtggattcaaatatgtcggttccttacggcattccactaccatggccgaccagtacgccaccagcaggatatttaatctgcaacggtgcgtcattcagcgcggtaacctatccgaatcttgcagcagtttataccgggggcgtgttacctgatttacggggccagactattaaagggttaccggcgtcgggacgtaccctgttaagcctggaggctgacggcaacaaaacgcatacccatggtgcatcagcgtcccagactgacctgggtacaaaaacaaccagcagtgataacgagcacgatcatggctggggtgcagggatgcagaaacaaggtggcagcgaccaggaggtcggtagcaatggtggtactggattcgggcgcacctctgtgcaaccaccgcattcacatacagtttatatcggcccgcatggtcacattatcaccatcgatgcttctggtaattcagaaaccacggttaaaaacatggcatttcattatattgtgagggcggcataa

SEQ ID NO: 181989 - DNA, 174 bp, Klebsiella oxytoca
atgacgctgggcgataaagttcttgaatccacattcaatgaattaaaacccgcacataccctttgttatttcctctacgaagccgaaatgacttatccgctttatctggatggttcatttgcgctggatggcgaacagccaatgaccggctacgtagaaaaaaccaccgattaa

SEQ ID NO: 181990 - DNA, 678 bp, Klebsiella oxytoca
atgagtcatgacaaagatgttttaaatagattcctgataaatactgccaaccacacaatgaaggttcaccgcgatgatggtatttatcgtcatctggagttttcacgtaatggcagtaacagttatcggtttgatctggttacatggccaggctatctgtgcgtcaccggcgatatgggaacgtggacctttagccgcatcgcagacatgttcgagttcttcacggccagccatttcgggcggcaggaaagttttcttattaaccctggctattggtccgaaaaatttgaggctggtgcaggtcgtggtcggcgtgaatcgccttgtttcgagttcgatgcacaggcctttgatagcgggttacagcagtggcttgatgcttatctcgaagagtgtgacgacgatgatgacgctaaagaggtcagagacgctatagatgagcttaagggtaacaacttcaccacagagagcgatgcgtatcatgccctcgatagtacctatttcccgagagatgtcatcgcgttcgacatctgggatgggattgaaggtctccaggcgtatagcgtccattacctctggatctgttatgcgattgtttggggggttgagcgttatcgcaccgccaaactgacggataaggcgatgaatatctttctggctgtaaggggggatttatga

SEQ ID NO: 181991 - DNA, 159 bp, Klebsiella oxytoca
atgaacttaaaccagcagcataaagatatcgagaaacaaaagctgatgactgacgcatcgagattcagggacccggccgaacgacgtagtttttggtcagtcatcttcatcacctttatttcagcattagctatcgtcctttttaactttattttttag

SEQ ID NO: 181992 - DNA, 327 bp, Klebsiella oxytoca
atgacaacaacttggttgaatgcgatttctgcgtccggcggcctgcgtgagttcgattactgcatcgcagaatcccggcgcggcgtgttcactaccccggcgtttctcacctatatgctggcgttcgatggagacctctcaaccgttgaagctgcccacagaatgctcgacgatttcgatcagtacgcgaacggatggaacgggctggagtatcgactgtgggacctgaaatatcaggtcgttcgctcgaccagtttttctgagacggggtttatggtcaacatcctgacggatacctggatggaatggtggtttctgaataactga

SEQ ID NO: 181993 - DNA, 432 bp, Klebsiella oxytoca
ttgccctggaagaacagagcggccctcagcttcaatctcctggactttatcttcgacgcgtttcattcggcgctgacggcgtttctcaacggctacatccatcgcgctgaccggtatcgccgcgcgtttattgccgttccagatagcggtacagacataagaaccgtccatccggcgcacgatgacggactgcgggtcgtggatatcgaaggccacgcgcacatcttcgctgtctacctggatcaactcttcagagaaataatcgttattgaacagacgaagccagccacgctgcgcagtacgcaccatttcgggcatgaacgcttctcgcagttcgacgtcggtcagatactctgtttcgtcaccttcagcctcaagaacggcgcgacgatacgcagccggcgtcatgtgcttaccgttacgcttcggtag

SEQ ID NO: 181994 - DNA, 492 bp, Klebsiella oxytoca
atgagatatatagctttacttcttctggttacgagctcttgttcagttgcaaaaatggtgtccaatgctacggcagttgaaacctatcaaatgcagttagaacaaactaaaaaaatgctgaatgaggttcagcaaacgcttatagcatccgatgcagtgatcgcgatgtacaaaaatctcggatacacaacacccgaggttagagcgatgagtcgacatttgataatccttggagaagatatccagcatttgtatggtgatatctcacttaagccaaccccattttatgcatgtacttctgtaccgtcagctgcctataatttctggtcacagagactaagcagtgtttctaaagacgatcctgaagctcttaaggttgctgcaaatcactacatcaagcaggcgaatgattgtgtgtatgcaataaacaatcctccgccaaaagagattgaagaaagcgaacagcttcaaatcattgacgttacgccataa

SEQ ID NO: 181995 - DNA, 453 bp, Klebsiella oxytoca
atggccaataaaaacaagcttatttttgctgcgtttgctgttattagcttttcagtttcagctggttttaaaccggaggggaacgaaaaagaggcccttgttgaagccgtaaaggatggctatcaggtacaaagaaaccttgcttacaattaccaaataggccgaggaaatcctggtgataaagattttattccaaaggacgaaacgaaatcttgtgcctggagaaaaatattactcatagttaaccctagtaaaactgacgcatccgatacagaaaacgagcggttttcgtgccgcaatctggattttgaacaggatgaattggtctggaaaatcgtttataagtacttgcccctgattgatgaagcaaaggccaaaggggagtatatggtagtcaaagatgaacctcctgtttcgaaagacgacctacaaatcattgacgttgcgccataa

SEQ ID NO: 181996 - DNA, 864 bp, Klebsiella oxytoca
atgacccgcaaaggctacagccagacacaggtagcccgtgccattggcaaaagtgccgccaccattaatcaatacctgcagggcaaatatgctggtgatgttcctgcgattgattcgctggctcggagctttattaaccgggaagtagaaaaagagaaatcgcagcgtattaccgccagctttattccgaccatcacttcccgtaaagggatggaggttatccgcctggcccatcttgatggtgatcttaacgttatctatggcgcagccgggcttggcaaaaccatgatgctacgtgagtacgccgcacagcatcgtgatgcgttgcttattgaagcagacccgggatataccgcccgcgtggtcctggaagagctctgtggcctgctggggctcagcaagcgtggcaacatgcacgaactcagtgaagcctgtattgctgcattacgcgaatctggtcgcattctgatggtggatgaagcggagaacctgccataccgggcgcttgagactctgcgacgcatccatgacaagtctggtattggccttgttctcgcaggaatgcaccgcctgattattaacctgaagggtaagcgcggcgagtaccagcagttatatagccgtgttggcctggctttctgcatcggtgattcactgccgcaggacgatattagcgatattgcgatcagcatgctgcctgatgccagtaaggccgatgtgagcgatgccctgtttaaagccagcaatggcaatgcccgtcgtttgttcaagttagttcgcggcgttagccgccacagtgagatcagtggtaatgcagtcagcgctggcgcggtacgtaagtttgctgaaatgctgattaattag

SEQ ID NO: 181997 - DNA, 864 bp, Klebsiella oxytoca
atgacccgcaaaggctacagccagacacaggtagctcgtgccattggcaaaagtgccgccactattaaccaatacctgcagggcaaatatgccggcgatgttcctgcgattgatgcgctggcacgcagctttatcaaccgtgaagcggaaaaagaaaaatcgcaaaaaatcacggctcgctttgttccgacggtgacttcccgcaagggtatggaagttatccgatatgcacatctcgatggcgatcttaacgtaatcttcggcgcggctggccttggtaaaaccatgattctgcgcgagtacgcagcacaacatcgtgatgcgttgctcattgaggccgacccgggatataccgcccgcgtggtcctcgaggaactctgcggcctgctggggatcagcaagcgtggcaacatgcacgaacttagtgaagcctgtatcgcggctctgcgtgactccggtcgtcttcttatggtcgatgaagcggaaaacctgccataccgcgcacttgagaccctgcgccgtatccacgataagtcaggtattggcatggttttggcgggaatgccgcgtcttattatcaacctgaaaggtaaacgcggtgagtatcagcagttgtatagccgcgtaggttttgctctctgcctcggtgattccctgccgcagagcgatatcactgatattgcggtcagtatgctacctagtgcaggtaaagaagacgtcagcgaggcgctgtttaaagcaagccatggcaatgcacgccggttgttcaagctggttcgcggtgtcagtcgtcacagtgagatcagtggtaatgccgtcagtgctggcgcagtacgtaagtttgccgaaatgctgattaattag

SEQ ID NO: 181998 - DNA, 477 bp, Klebsiella oxytoca
atgtccactccagtaaaacgcggccttatcggggccatcaaagccggtcaggctcatctgggctgggatgacgcgacatatcgcgctgttctggcccgtatgtgtaacggcaaaacctcatcaaccaaatgctccctcgacgagctgcaggccgtgcgtgaatacatgcatgagcagggcttcccccgccagtcagcccgtcacggcaagcggccaaatgtggcccgttcacgcaaaacgatgctcagcaaaattgaagctttgcttgcagatgcaaaacgcccgtggaattatgccgagaaaatgtgcgatcatatgtttcaggtacagcgcgtggaatggttaacggatgaacaactaaccaaactgatgcaggcgctggccatagatgcaaaacggcgtaaaaagcgggagacaaccgatgaatctgcaacaggtaacagagctactgcccccggtagtcattcagatagctga

SEQ ID NO: 181999 - DNA, 216 bp, Klebsiella oxytoca
atgaagagcctcctgcgtaatatgaccgccggtaactttaaccggcgttatccggtgggctcccggttccggtattacatcgtccccgggatgcctgaagtggaagaagtcatcaccacctctgaagcctggcatgtacgtaacggccggctggtagtccgggtggccgggaaaatcgggggcgtgtcggtcaacaaactcgaacccattcagtga

SEQ ID NO: 182000 - DNA, 225 bp, Klebsiella oxytoca
atggctggatatctctgtgtctcagggtgcgaagttcaggaaatgggcagcaagcgtatttatcaccttaacgataactccgttgtcattgagcatcccgattaccctggcaagacccgatttcagttttatacccgtagcggtcagtcaatccgtaaaccggctgataaaaccgcaatgaaacaggcagtagaacgtcataaaaaacgctggagattagcatga

SEQ ID NO: 182001 - DNA, 219 bp, Klebsiella oxytoca
atggccaaaattgaaatatctgtaacccgaaaaggaaaaggcattgatgtccagtgccgcatgattaaagacgattctgactcagaacaggttaagaaagcagcccgggttattctggtttcacttggcggttttatccattcagttctgaggaaaatgtttggaccagttaaagatttatcgactgctccagtgaaaggcaatgattcatttcattaa

SEQ ID NO: 182002 - DNA, 234 bp, Klebsiella oxytoca
atgtgccgtttaccgattaacgatcccaaaatgatggccccgattaatcgtcttatgcgcggtggcctgcaggttctggacattaacacccgattccgccgcccgattgttgaggtagacagacctttcgaggcgtggcgcgggaaggaagtcgaaatcaccgaacgtaaagatggcaaaagctctcaggtcaaaatgcttatctggcgcgggatgcatgttatctggaggtag

SEQ ID NO: 182003 - DNA, 1572 bp, Klebsiella oxytoca
atgcaaatgattacctcacgacagaacagattattgaaatttctcctgccccgcagagaatacgttacgctgctgaaaattgctgaatatttaaatgtgtcagaaaaaacggttcagcgtgatttacgctttttagaacagtggttatctgagtggaaaatgactatcgacaaacgctcaggtaccggcgtgatgctgatcgctgataatgtcacggatctgctgcaattagaccaattactcagtaacgagggggaggacagcgatgtcatgatgaataactcccggcgcgtgaaaattgcttcgcagctcttaagtgagactccgcgggagacatcaattaataagctctctgagcgttattttatcagtagtgcatctatcgttaatgatctgaaaattattgagtcatggattgctccgctcggcttaacgctgattcgtagccagagcgggacgcatattgaaggcagcgaaaacagcgtccgccaggcgatggcgtcgttaattaatggagtgattaatcataatgagcccggctgtattatccattcccggctggactcaggaagctataaagcgctggtgcattattttggtgaggatgacgttttatttgttcagtcattattacaggaaatggagcgcaagctgtgctggtcattaggcgaaccgtattatgtgaatatttttacccatatcctcattatgatgtatcgcattacccgtgggaatgccttaccgcggcgtgagcaggggcagcagatttttgatgagacgatatttagcgttgctcagaatatgctgcgaaaaattgaacaccgtattgaccattcgctgccggaagatgaagtctggtttatttatcagtacatcatctcctctggcgttgtggtggaagagcgagatgatgtcagcatggtgcgctatatgcattctagcgatgaggcccgacaaattaccgatcgtctgattagcgctttttccaccatgattgatctcgatttaaccgccgatcgcgcgttatacgatggtctgctcattcatatcaagccgctcattaaccgccttaattttcggatttatattcgtaaccctctgcttgaggatatcaagggcgagctgacggacgtgtggccgctcacccagcgggcggtcaatcaggtttttagccgctggggcgagcgtgcggtttccgacgacgagattggctatctcaccgttcatttccaggcggcgatggaaagacaggtcgccagcaagcgagttctgctggtttgttctaccggaatcggcacatctcacctgttgaaaagtagagtgttgagagcgtttcctgactggaccatcgtcggtgtggtttcggcaagcagcctgcatacccttcagccgcaggacaagattgaactggttatttcgacgatcaatctgccggaaatagctttgccggtagtctatgttagcgcattttttaatgatgccgatatccgacgggttacggaaaaaatcgttaccgacaaattacatcgtgcggcaatatctgctgtagataatgaagttttatatccatga

SEQ ID NO: 182004 - DNA, 162 bp, Klebsiella oxytoca
atgatcctctttgcctggcacaatcaagccgtcagaaatgaaggcaaggcaaagattcatacgagtttggcgactcctattggtcatgcaatgcaagccgggtttgtgaaaatgaacccggtttttttatgcctgcaatttaggcaatggtactacatgtag

SEQ ID NO: 182005 - DNA, 123 bp, Klebsiella oxytoca
atgccccttcattcaacattaaccagcgtgacggtaggattcacgtacaccatcacgataaccctctgcaaaagcagcctgtgggcttttgtgacgcacagtccctgcctgactatcaggtaa

SEQ ID NO: 182006 - DNA, 1023 bp, Klebsiella oxytoca
atggataaacgttaccaggttttcgtaagttcaacttttaccgatttagaagaagaacggaaacacgttatacagactctgatggaaatggattgcatcccagcaggcatggagttgttcccagcaattgatgaaggtcaatgggagttcataaaaaaagtaattgatgactgtgattactatctgctgatcattggtggtcgttatggctctgtcgcagaagatggtttgagttacaccgaaaaggaattcgattacgcagtttcaaaaggcttacgcgtcgttgttttggtgcatgagaatccggaagatttacctttagccaaatctgaaaaggattctaaactcagagagaagctaactgcattcatagagaaggcctcaaccagtcgtctcaggaaaacatgggcaacagccaaagatttacctgggttggttgctttaagtatgagtaaaacgatgaaaacttatccagcaatcggatgggtaagagccaacttaacttcttccgaaactgatttacgtgcaatcgttgatttacaaaaagagaatgaattgttaaaaagcgaactggcaaaagtaacttctattcgtagccaaaaccttgacttagatctagcggatttcgacgacgttttcgattttgattgtcagtctaattttcctagggggcaatactccgctggcggtacaaaaatttggtctgttagcatgaaatggaaacatatatttcatacaatatccccatatctcgtacagtattattctgaatcaaatgtctcgtctcttatagcccaaagagctcagcaggtcgctagtaaaggaggtacatcggcaaaagtgtcctctcaagatcttaagaccataggtgtgcagttgaaagcctatggcttgataaaaatcgaatatttaaaaaccaccaatgggagcatgaacactttctggtcattaactgaagctggccagactgaaatgctgaaaatacgaacgataaaaaagcaaagccaagaaacttccgaatag

SEQ ID NO: 182007 - DNA, 150 bp, Klebsiella oxytoca
atgaacaaatcagcagcaactaaacgcaacaatagcaaaatccatgcgaggaagtttctggcgacgccagagggcaaggcctggttagaacgcaagaaagctgaagaggctgagttaaaacttgtttctgatgtaaggaaatttatctaa

SEQ ID NO: 182008 - DNA, 369 bp, Klebsiella oxytoca
atgaaaaatccacctgctacaatttcgcgggcggcgaagccctgtctgtcgcccgttgcagtctggcaaatgttacttactcgtctgcttgagcagcactatgacctaatgctaagcgacacaccttttagcgatgaaaccgttataaaggagcatatcgatgccggtatcactctggctaatgccgttaactttctggtagagaaatatgagttagttcgtatcgatcgcaatggatttacctctccggtacaagcaccatatttgactacgacagacattcttcaagctaggaaagcgtgcgggctgatgagccggtgttcttacagggaggtaagtaatattgttcttagccgatcacggctgtga

SEQ ID NO: 182009 - DNA, 357 bp, Klebsiella oxytoca
atgaacaatcactcagaatctggtgacaagccggagaatccagcctgccagcagtgggggctaaagagtacgatcacaccctgttttggagctcgtctggtgcaggaaggcaaccgggtgcattttctcgctgaccgggccggattcaaaggtactttcagcgacgatgacgcgctgcacctggatcaggtctttccgttgatactcaaacaactggagctgatgctcaccagcggagaactctcttcccggcatcagcactgcgtcacgctatatcacaacggactcacgtgcgaagccgatacccttggtagttgcggctacgtatacatcgccatttatcccactcaacgctaa

SEQ ID NO: 182010 - DNA, 444 bp, Klebsiella oxytoca
atggatacacaaaaccttgagttcgctgagcagacagcaattactgcatcaccggtttctgacgaactacgcatcggcttctggccgcagcactttggctccatcccacaatggataacccttgagccccgaatctttggctggatgggccgtctgtgtgccgattaccatggtggtatctggaacttttcgacgctcagcaacggcggtgctttcatggctcctgagtcagagcacgataagacgtgggcattgttcaacagcatgaacggcaacggcgcggaacttactggcgaagcggcagggttagtcgcctgtctgatggcttacagccaccacgcctgtcgtaccgaatgtgatgcgatgattgaacactattatcgcttacgtgacttcgcgctacaccatccagagtgcagcgccattatgcatctcatcgactga

SEQ ID NO: 182011 - DNA, 465 bp, Klebsiella oxytoca
atgaaaaagtcatcattaacaattgcattattatttccattgacagcctctgctatccctaatatgtggaccagcggctttggtcagggcataacagaatactttattaccagctctgaaaatgtcgtttttaaccttaactgcaccatgaccccggatgagcagaataccctacagcacaatgtactcatcgacctgcctgacggtactcgcgtggactcacgcgatgacaaaacaacaataacggttgtgaccgatgatcaacaattcccgttaccttcatcgctgggctggcgaaatggggataatgcctggattcagtttattgatgctatcggtaacgccgcaacgttcgatgtttacgtcaacaataacaaacttggctcctttaggccgggtctgaagaatacgcaaaaagagctatctgacctcagtgagtgccggaccacacactacagcgattag

SEQ ID NO: 182012 - DNA, 474 bp, Klebsiella oxytoca
gtgaaaaaaataaaattagtgctattaatgcctggtatctacattgggttaatcacgtcaggctttgcggaagcatccagtatttataaagggatattacctgctgtagtgaataataagagtggcaacaaattttggtgtgatgcttaccatcaagtcaggaaattgtgtaaagctactgaaattgatgcatcaggcggatttatcctggtacgttcagctccgttaaaagattgcgaagctggcatttggggatggatcaaccctggtgacaacaagagtgcgactgattacattgcaacgggttataccataacgcctgatgctacatctaaggtaacaaccagagatatgtgcagcccagacatgaaagtgacctttcgccctaatgataaaagaccccagtttgaggatatggtagggctgtataacggaaaggaagtgtttcgttataaatggcctgattcaaaataa

SEQ ID NO: 182013 - DNA, 690 bp, Klebsiella oxytoca
atgactcagactgcacgccgccatgatcggcttgctgtcaggttgtcgatgattatcggtcgcctggtggcaggcgagacgctggatatgcgcaagctagccgcagaatttggtgtgtcggtccgtaccctgcgccgggatttccgtgaacggttgatgtatctggacctggagtaccgacagggccggtgtcgtctgctttccggcaaccgccaacgggagctggcagtaatgacctttgcccgacagtcgggagttgagatcctgtttccgggactggacagtcatctggtcagttccctgcttggcggacctggtgagtccccctgtcttatctggcagaaacattcctcgttgccagtcactgacagcggagtttttacccggctggtaagtggcatctcggaatacaggaaagtgaccctgcgtggtaacggatgctgtcatgcggatatagccccctaccgtctggtgctgcatgacggcggctggtacctgacaggaacgcatcaggcccgcattatcgcgctgccgctgacagatatccgtgcggttacgctccatcccgacaattttgcccccgacacctccgtgcgcgacattctgtcccgcccggatttccttcaagctttaccttactttcaatgcatcaatgacgttatatctgccttcagtactaaaacgctttag

SEQ ID NO: 182014 - DNA, 876 bp, Klebsiella oxytoca
atgaaaaaatctgaagctcttcaggccatcgaaaggccgctggcatcgctaccccatgctatcgtcaaccctattcttgaacatattcaaactatcactcactacgaacccgtgatcgggatcatgggcaaaaccggtgcgggtaagagcagtctatgcaatgccctgttccagggggaagttacgtcggtcagcgatgtgggggcctgtacccgcgatgtgctgcgcttccggctccataatagcaaccacagtctgatgattgttgatttaccgggtgtgggggaaagtgagcaacgcgatgaagaatactccgcactgtatcgtcgtatcctgcctgaactggatttagtgctgtgggttattaaaacggatgatcgcgctctgtcggtagatgagcatttttatcgaaaagttatggtgggctaccagcgccgatttctgtttgtcttgaatcaggctgataaggctgaaccctgtcatcagtggaataccaccagcaatacaccatctccggaccaacagttgactattgaggctaagcggagcgcagtacaacaactgttcctgccgcatcatccggtctgtgtcgtgtcggctcgaaccggttgggggatggaagcgatggtgcagtgcatgatgcgcagcctgcctgacagggccaccagcccactgacgacacaactgcacagaaagctctgtactgaaccggtaaaaaagcaggccagagatagttttggttgcgcgatgggcagcgtgtttgattccgttgcatcatcgcatttacttccggcccctgtccgaaacgttataaacagtgtacgtgatgtggtcgtgtcggttgcccgcgcagtctggaactggattttcttctga

SEQ ID NO: 182015 - DNA, 1017 bp, Klebsiella oxytoca
atgacatggttaaaaaaagaccatagagcatgtcacttttttttgttccatttaactacagaattttcaggatgggcggaacgcagtagagttaaacagaataacaatgatactgctctaagcgagcctcaaagtggatggggaacacttgcgttaacgcttgatagccctttatatcagactgacgctagttttttctctccacctcaagatttacctggcgaattagaacggcagattaatgaagggctggatattgaagtagctagcgaaaaaataaaaacctcggatgatgttacagagattaacattggtttggttgataataaaattgttggcgatagtaaaagcaataacaaatttccaccggcagatttaatgtttgcagacggcgtcaccaactcaaatgttaaaaattccatcaatatacgcaacagcttctttagcgttattgaccagttacttcttagatatcattctgatcgagagatattgaagataatatcggatatcacatctttgtggggaatacaattcaaaacattcccgtcacctttttcctggcttaacagtaaaaataaagaacattgccagtggctttgggatgaaatgcataagcgctgtgttggcattccatttcaacctcgggatcatagtcaacaatggcattttattatcgcgacgttcgataactggaaagggtggtcaatagaacagctagattatttaacggagaaaaatccaaagcgtaatccagataaattattttctgatcgtcagggaacgagcacaaaagaaattaaacacaaaacggttctccttgatgagctaaaaaaagcatgggagcaaagggaaagaagagcccgaagagcaaaggatcctgttgccgccagactaactaaagcggctcaaaaaaaactagagttcattgccagcatagagaaaaccacatcaaaggacattcttaacgaactgattgacaacgcttttcatgaagcgaagcgtaaagccctgtaa

SEQ ID NO: 182016 - DNA, 207 bp, Klebsiella oxytoca
atgactacgcgtccctcacttaccgaagaccagttcgttgacatggcttttatcaccagtctgctccagatgacagacaagtggatatttaagctcattaaggacggagcctttcccaagcccataaagttggggagaagctcccgatggttaaaaagcgaagtcgaaaactggctacaggaacgaatcgaccagtcccgtaaataa

SEQ ID NO: 182017 - DNA, 594 bp, Klebsiella oxytoca
atgaaagattacaaacctcgttacgaagaactatataaatattatcaggtctggttgaccgattttacgaagctgacggtcagatcaggtatgtgccaccagaatatctaccaccatcataccctaacggttggcagccttaagtttctgggtgaggacgaggttattgctattgtcccccaatgcctgcatcggattatttatggcagagcagcagccccactgactgttaatgatgacctgagcgtcagtttatttacccaggagcatctgctggctcaccatcccatgctggaggggattttgctgtctgagtgcgtgcgtttaaaacagcgtcctctggcaaataagctcatcagtttgttccggcaattcagcggtagcgagctgcgtctgaagctggtctggctgtgctggtacgatttgatgctgggtaattgccttgatgactggaccgacaatctcaggttcaaaaaagacaaagagatagatatctgggtcaatgaccgacaggcagaaaaccttgcgctgaccagtctgatggatgagtatgtctgctttgcctggaggacaacttccgaaccactgggctaa

SEQ ID NO: 182018 - DNA, 654 bp, Klebsiella oxytoca
atgtttttatttgatgacactaagcctatgaagctcgacccaagccaggcacctttcaacgtgctttatctacaaagagttgctgaagtgctcagtcacgcactgcaggaccatccgcaaaccacagttatcagggtggatctgcacttaccggaagacggggatgtgggcgacagtattatcaacgatgctgatttaagccaggggctaatgtcccgttttatcgactcactgaaagctcaaatagtcgcttaccgacaccaaaaagccagagaaggtaaacgctgccatcgcacttcagttcgctatgtctgggtgttggagcagcctgaacttgatggcaagaagcattaccacctggctctcctcgtcaacaccgacacattcaatgctctgggaagctacgatgaacaggggaaaggtttggcatccctgattcagaacgcctggctgagtgcaatgaagaaacgagactggtctgaatatcttacgttagtccattttccggataaccctctggctttcctggatctcaataagcaggatttcagaaaaaaactggaggcactgactttccgtctgagctacatggcaaaacatcgcaccaagcgctatagcagtaccgaacgctcattcggctgcagccagggttga

SEQ ID NO: 182019 - DNA, 324 bp, Klebsiella oxytoca
atggagctttcgaaagcagcagaaaccctgaaagagctgggtcatcctacacgactgagcgtgtacagagagctggttaaagccgggcatgaaggaataccggttggtgaactgcagaagcggctcgaaatcccagcgtctacgctgagccatcatctttcctcgttgatatcagtttctctgatacggcaggaacgtcagggtagaacgctcttttgccatgctcgatatgaaaaccttgaggctctgattgccttcctgacagaagaatgctgctcagggactgacgactgcctcaccatgccccagaagacggagaaataa

SEQ ID NO: 182020 - DNA, 714 bp, Klebsiella oxytoca
atgacaggtgatcttaagaatgttgattcgggtttgttcgacacctcaatcacagaggcaagattaggtgtccctgccgttcctcatcctccgcgaatcctcatgctatacggctctgtacgtgaacgctcttacagccgactggcaacggaagaagcagcaagactgctgactgcgatgggtgcagaagtgcggatcttcaatccctctggtttgcctcttcctgatgatgcgcctgactcgcatcctaaagtcatggaactacgcgagctggttcgttggtccgaagggatggtgtggtgttcccctgaacgccatggtgcgatgaccggcataatgaaggcccagattgactggatacctctatcagaaggggccgtacgaccttctcaagggaagacgctagccgtaatgcaggtctgcggtggctctcaatctttcaatgccgttaaccagatgcggattcttggccgttggatgcggatgatcaccatcccgaatcagtcctctgtggcaaaagcctggcaggagtttgatgaagatggacgaatgaaaccatcgtcttattacgatcgcatcgtggatgtgatggaagaactggtgaaatttactctgctgacccgaggtaactcagcctatctcgttgatcgctacagcgaacgaaaagagtctgcagaagaactttcccggcgggttaatcagagcaaaatttga

SEQ ID NO: 182021 - DNA, 546 bp, Klebsiella oxytoca
atgagtgatgtaatggcattcaacaactgcatgagcgtgttctggcggcaacatgaagccgaactctctcgcttcctgacatcgaagacaggtgatagagaaaaagcagcagacctgctgcaggagctattcctgcgtgcccgcgctcattcagacagtttctgcaagatggagaatccgcgagcctggctatatcgggcggcgaggaatctactgattgatgagtaccgcaccaccagggagtttgttgagctggaagaagatgccccattaacagacgcatcccctgatgcaatctcaacgctggatatttgcctgcctgaaacattacaggctttacccgaagatgagcggtggttgattgaagagtccgaccttaaccggcgtccccagcagtctctggccgatgaactgggaatcacgcttacggcgtttaaatcccgtctgcttcgggccagaaagcacctgaaagaaacgatgacagaactttgtcagattgaggcggatgacacgtctcccgtctgctgccacaaaaaaatgaattaa

SEQ ID NO: 182022 - DNA, 363 bp, Klebsiella oxytoca
atgtcaaaaattgagatctttgaagctgcaggctgctgcgcaaccagtagcgttgtggtcagtgacgaagccgtcaaatggaacgccagcgccgaatgggcaaaaaaaaatggcgtcgatattcagcgctacagccttgcgaaaaacccgcagcagttcctgaataaccctgtcatcaaagagtttctgaacacttcgggactagagttccttccagtgaccttgctcgacggcaagctcgtaatggcaggcaaactcccgactcgtgaagatatcgcccgctgggcaggtattcagcttcctcaggactggagtgaagacagcacgcaaccacgctgctgctgcattccacgtatgccttaa

SEQ ID NO: 182023 - DNA, 537 bp, Klebsiella oxytoca
atgcacattatcaaagctgaagaacagcacattaccgcgatacgcaatatctatgctcaccatgttctgcatggtacaggtagcttcgaaaccgaacctccggatacggaggaaatgcttaaccgactgaggagcattcagtctcggggattcccatggtatgtcgccctgcagggcgatacgatcatcggctactgttatatttcccgttaccgcgaacgccatgcttatcggttcacggttgaaaattcgatatatattgatccggcttatcagcgacagggggtcggaaaagcactactcgatcatgcattaaaatgggccgaatctcagggatatcgtcagatgattgctgttgtgggtgacagcgctaacgtcgcttctgttgcgctgcatatccgcgcaggatttactgaaataggcacattaaaggacattggtttcaaacatggccgctggcttgacacggttttgctgcaaatgaaacttggtgaagggaatagtactctgccagaaaattcagatcttatgctctga

SEQ ID NO: 182024 - DNA, 426 bp, Klebsiella oxytoca
atgagcaacatcactatttatcacaacccggcctgcggcacgtcgcgtaatacgctggagatgatccgcaacagcggtaatgaaccgaccgttattctttaccttgagactccaccttcacgcgatgagctggtcaaactcattgcagatatgggcatttccgtccgggctttgctgcgtaagaacgtcgaaccgtatgaggaactgggtcttgcagatgataaatttactgacgaccagctaatcgactttatgttgcaacatccgatcctgattaaccgtccgattgtagtaacaccgttgggaacgcgcctttgccgcccttccgaagtggtactggatattcttccggatgcgcaaaaaggcgcatttgctaaggaagacggcgagaaagtcgttgatgaaacaggtaagcgattgaaataa

SEQ ID NO: 182025 - DNA, 1752 bp, Klebsiella oxytoca
atgaaattcttacagaatatcccgccttacctgttttttactggcaagggaggtgtaggaaaaacttccatttcctgcgcgacggctatccgccttgccgaacagggtaagcgggttttgctggtcagtaccgatccggcctccaatgtcggtcaggtattcgatcaggctatcggtaacacgattcgccctgtgacagcagttcctggactttccgcactggagattgacccgcaggaagccgcccagcaatatcgggccagaatcgttgatcctatcaaaggtcttctgcctgatgacgttgttaacagtatcagcgagcagctttcaggagcctgtaccactgagattgcggcgtttgatgagttcaccggcttattgacagatgcttccctgctgacccgtttcgatcacatcatttttgatacagcgccgacgggtcacacgattcgccttctccagcttcctggtgcctggagtagctttattgaaagcaatccagatggtgcttcctgtcttggcccaatggccgggctggaaaagcagcgtgagcagtatgctcatgcggtagaggcgttatccgatcctgaaagtacccgcctggttctggttgcacgactgcaaaaatctacgctgcaggaagtcgcccgcacccatgaagaactcgccgcaattggcctgaaaaaccagtacctagtgattaatggtgtgctgcctgaagccgaagctgaacatgacgccctggccgctgcgatatggcaacgggagcaggaagcactggcaaatcttcctgccggtttatctgagctaccgacagataccctattactacagccagtcaatatggttggtgtttcagcattgaagggactgctggatacccgttctgaggcattaccgctcccggtaacgaacatcctgtacacgcctgaaaacttatcactctctggcctggtcaatgatatcgctcgcagtgaacacggcctgattatgctgatgggcaaaggtggtgtagggaaaaccacgatggctgctgccatcgccgtcaggctggcagacatgggatttgacgtgcatctcaccacctctgatcctgctgcacacctgagtacaacgctgaacggcagcctcaaaaacctgcaggtcagtcgcatcaaccctcacgatgaaaccgaacgctatcgccagtatgttcttgagacgaagggaagagatctggacgaagcagggaaacggctactggaagaggatttacgctctccctgtacagaagaaattgccgtgtttcaggccttttccagggtgattcgtgaagcgggtaaacggtttgttgtcatggataccgcccctaccggacacacgctgttgctgctggatgcgaccggggcttaccaccgagagattgccaaaaaaatggggagtaaaggtcattttactaccccaatgatgcagcttcaggacccggatagaaccaaagttctgctggttacgcttcctgaaaccacaccggtgctggaagcggcaaacctgcaggctgaccttgaaagagcggggattcatccgtggggctggattatcaataacagcctttccattgcggatacgcgttctccgttgctttgccagcgcgcccggcaggaacggcctcagattgaggctgttaagaatcagcacgctgagcgtatagcgcttgttccggtgctgacgtcagagcccgccggtattgaaaagctcagagagttgatgagttaa

SEQ ID NO: 182026 - DNA, 363 bp, Klebsiella oxytoca
atgaagacgttaacggtgtttgacccggcaatgtgctgcagtaccggcgtatgtggctcagatatcgatcaggttctggttgatttttctgctgatgtgcagtggctgaaaggacgtggcgtaaaggttgaacgttacaacctggcgcagcagcccatgagctttgttcacaatgagaaagcgaaagcattcctcgaagcatctggagcagaagggcttccgctactgctgttggacgatgaaacggtgatggctgggcgatacccaaaacgcgctgagctggctcgctggttcggtattccgctggagaaggtagggttagctcccaccagttgctgtggtggtaatacttcctgttgctga

SEQ ID NO: 182027 - DNA, 663 bp, Klebsiella oxytoca
atgaaaaggttttattcgcagaagatagatagtacactatgtgtactacatactgaaaagtacctaatcatgaaagacaaaaaatttaaattcattggtttttttctgacattctttattttttcttgtgtaaataatgtagcatttgcttcaaataaaacaataagcgcacaaccaacagaaaaaaaacttatcgatgataagcaaaacattccacctgagaatatcaatccttatcttgaatcaaaagaaataattgaactaacgtctttaattaattctcagaaaaatgaaattgaagtaatgaggaataaaataaattcattagagaatagtagtggaatgaattttgccgtatggaccggtattttattagcctcagtggcagtaatactgacagtacttggtattgcaatggctgtgttttcatttttcggatataagaaaataatggatagtgttaaagaggttgcgacgaccatatctacaacagaggcagctattgtttcagaacgactcgcacctacagtaacagaagatgtgttattaaaacttatagaaggtagaagcttcgataaaataatttacgaagctgtacaaaaagtaacgtatcgagggattagattttcatcagaggacatgctggaggaggaaccaaaatga

SEQ ID NO: 182028 - DNA, 501 bp, Klebsiella oxytoca
atgattatgactaactctaacgaatggttttctctttcagatgagcaagtatccttaattaaaaaaatgcaggaagagtttccaattcctgtaggtgcaatagctaaagaattaggggtaacagttatgaaagcaactttacccgcaggaatctcaggtgaaatcaaggaagacaacggccgttttgttataagagttaatcgtcatgatgtaaaagaaagacagcgtttcaccgttgctcacgaaatagcccacttcctgttacatagagatcgtattggagatggtataacggatgatattctttatcgttccaagctttcagactatatggaggttcaagctaatagacttgcagcagatatattaatgccttggcatttaattcaactaaaattatcagaatataaggagttccgggaagaagagagatatgaaaaaatagctgacgaggcagaggtatcgactacagctattaaaattcgactcggaaaattataa

SEQ ID NO: 182029 - DNA, 1131 bp, Klebsiella oxytoca
atgtttaatcatgatgataactttcaatatgactatgctccaatattatcgcttagcccttctgaaataatggctttagaacaattgccagggaaggataaagacaatattttacccgtaataccgctaaaaggttgggccagctcacagcagcttgaaaactcgctattgagaattgaaaaatctattgacgacaggaagtgggtagcatccattgataaggattacctgttgaataataagacttttctttttactgggaaatatcccagagaggttttttatcaacttaaagagttgttacaaccaacaaatggttatgataattggtataaatttttagtaaaaactatacatgccatacccgttgtaaatttagaggaatcatcagccctcgaattgcaaataaaaaaactatattctcttgatagaggtattgtttttatttttgacttgaaaaacatgactctttcttattatcacgatgtaattcatctgatttccaagatggggatacaagacttattatttatttatgatatcggaactattaatggtgattataataattattatcaaccgatacttaacctgataaataagacaaaagaaaaaatcccttttgtgagggtggcgatatcgggaacgtcatttcctttcaattttgctggctatcatcgaggtgaaaaccctatatttgaaaggttattatttaataaattaaaacaaaacattacatcatatcccactatatattctgaccgaggtagtgcaagaattgaaaaacaaagtggaggcggtaatctacccccgccacgaattgactatgccttgaaaaacgattggcgtttcattaggcatgaattttacgacccaaaatctcctggagagggagaaaaagaagaactgtactctttatgtgctaaagaaattatggaacaagagtattggtcagaaaacttacatctttggggaactcaaatgattgaattaacatctaaaggtgacaaatttggcataaactcggcgcaaaaagcaactgcagttagaataaatttgcacctttacacccaactacattacaacgatgaattagaaagcattgatactgatgaagagtgggaggattaa

SEQ ID NO: 182030 - DNA, 711 bp, Klebsiella oxytoca
atgaagattaataatccttttgaaaaaaagttaaagagaagtgtacttgaacatctatataaaaaaggcactcttgatgaaaagaccattgttatcaatgagttaacaattgattctttttctcgaagggctgatcttgttgtcataaaaaatggaaaaatgattgcatatgagatcaaaagtgatgcagatagccttaatagattatcagggcaaatggataaatatcttgactatttcgataaggttgtagtggttactacgtcaaaacacaccccaaatatattaaattctattaatgaaaaaattgaagtttgggagatcgcagatgacaaagttattttaaagaaaagaggtaaattacaacgagtcgagagtaaggaaaaatatcttgatcttttaaaagttcatgagatgaaaaagatggcgcatctatttcagataaaattagaaggaaaaaacaaacaagaagttagaaaaagtattataaaaggattaggtggtatttcttttgaaaaattgaaggcatttacaataaatgctatatctaatcgttatgctttgacatcaaacttgtttatagagaatattctactgagaaagaaagttattcttagtgatatcgatctattaagcccatactcagctcaaaggacaaatatatatattggtcatgaggaaagtatcttaggacaattgatgaagttataa

SEQ ID NO: 182031 - DNA, 516 bp, Klebsiella oxytoca
atgagctattcaacagttattaaagtctggcccggcgaaaagcaggaagaagatgaagagcttagcaatggctggggaagcggcccagttatttgggacgacatggcaatgcgttatctcgcgctgcccaaacacgcctatatgtcaaaaattgatgacctttggcctctagctaaccgcctcgatatcccataccaccatcgcgcagtccttgcaatgacatatgaccgcatgtatgtgaaagctgagcattacaagctggctgctgactgcatccgtaaatatctaaacgactttccggtgaatgagaaatacgtaaatcactggccgcgtatcgctgaaatttttgaaagctgccccgactgtccggcgattggtctttggctaacttcagtatgcgaaaacccatttatggggttgtgggatgaagaattgcaagattacgggcagccagattggtcacgctattggagcctgtttgatgatctggaagtaggtgaaggcggtgcagcatga

SEQ ID NO: 182032 - DNA, 225 bp, Klebsiella oxytoca
atgcaggtcgaaaccaaagctctcatacatggaaatgagctgcggagcagtagaattgctgatgagaactttggctccacgctttgctgctttgaggcaacagtgagccagttccacctgatcatcccaggtgaagccacccgcggcgtaattcgtgaatccggcgacgcctggcattggttcatagggagggtcgcaataaaccacatcaccatctccggatag

SEQ ID NO: 182033 - DNA, 531 bp, Klebsiella oxytoca
atgaagcatccaaccgtttcagtaaacggcgtttccgttcgtgtcgacgaagagggacgctatagccttaatgatcttcatgcggccgccgtggcaaatggggaggctacagagtcccagcgcccgagcgtattcctcagaagcgcccaaataaaacgcttcattaaggcgcttcaatccaaagcactaaaaagtgcttcggaacaaaatcaaccgcttaaggtgataaaaggcggttctgaatcaggcgcgtggggcgtcgagctacttgctattcgatacgccgcctggattaaaccggagttcgaaattgaagtgtatgaggtatttcgaaccgttgtccgtttggggatcggcgccatgtccaggctgaataaaatcgaccatatcatcaacactgaaaccaaagcgattagtcaatgcgcaagccagatggccaggtggggagtaggtggccgcaagaaattgctccacgcagcacgcgatcgggtagctgatgaggtgcagatgtatttgcccggtatcgcatga

SEQ ID NO: 182034 - DNA, 3432 bp, Klebsiella oxytoca
gtggaagttgctgagtatgttggccagggagcgatttctaacagcatcagggaatattcattattaaccacggcgcaaagtgatgtttcggcgggtaatattttaaacggtgggtattgctggataagggattctactgatagcactctggcagacgagtacatgaatgtggctggcacgctggcagctacgggcagagctatgccgtctcaggagagtgttgacttcactttatccagcgcggggcagttaccttcagctatcatgacacgggaagagatatacgcttcggtcgagagatatggacagtggactcgtaccgatacaaacggatgggctgtcggggtcaaatccagtggtaagccagtgaacagcctggcgctgtggctgaataacctttctgaaatcagcacgctttctgtttctgtttatcaccgcactattgacggtttttcagttctgccgggcgccgctacagacaagctactgagtagccagtcggtcgcatctgaagacgtagcgataactcaagcactggcgcaagggtatcagttagtcaggctcaccgtgcctgatgtactgcttaagtctgatgaaattattctgtttgtggttaaagcgctcgatgccacaggtaatccggtctatatggggtgcggccgcgcacccgttgagtcaggtcaggtttctgatttgaataactcactgggtggatactggctggatgtggctcagacgacctggaagaccatcacctctgctgacagtctctatcgcctggcctacagggtgggatatttcagcacagcagcgaacgattatcaggctgttgtactttcccgaaacaccgtagcagaaattacgggcaacagttctaactatgcgaccagttcagcctcacctgccgggcaattctatggctgggctataggcttcaagtctgttgcagctccttttgacctcatcacgctgtaccataacaacctcgatgcggtggcatatattgattacaggattgttctgcgcgaattgacttacggtactgctgcgcagcctctcggcactatcgcaacggacagagaggtattctcatcacgtaaacttccaccgccgcaggggaatagccttttcaccgctgttgattacccagttcctgggcttgtagtacccgcaggatattttgctgcaatagaactgcacccgctgcagtggaacggcgatacggcggacatgggatgccaggctcataactatgcaggggagacattgccaaccgatatcggcagaggctattttgtcaatcgtaatgataacgtatggcgcgtaatatcagattctactaatggactcgcgtatgcgcttgctcttgccgagtggggaggaatccctcagggggttgaaaaagcacagggtgaaatctcgacgctgaattcactagttgttcagaccagccagaccgttgcggaaatgaatacctatgagatggaaacgtcttttgaaaaagcatcagacaatctccagtggtcctatgcatctatggctgaatctgctcgattctggcggtgggcggtgccagtttctgcggaagcatctgagctaaaatccatcgccatgtggcttgatggcatatctcttaataccattctgcaatgcgacgtttatttccggctggcatcaaaccagaccaatacatcggggccgggagctgtatctggtgacattcttgccttgacagcaaatgtcacgccgttgccagctaatacagcgatgacagaaatcacgctcccggtagaccgtctggcggtgccggctggttatttcccgatcgtggctgtgaccgcgtattacagtgctggcgtgagcggaaatctggggtccggctcgaaatcctacagcgccggtgataacccggctacgtacctcaagggctggtaccaacgttttgaccgcaccggttggcagactatccctgcggggacatatgccgctgtcgctgtcagtgctgtacttgtcaccgctcaggatctgcaggagaaaattgcgtctcttgaatccggttctgatgtaaccgccgactattccggggacagcatcgatcgctatgcaccgcaggtatcggctactggattaacagccatcattactggtaacgccattctccgcgggtcagcaaaacctatatcggggacgctgacatttgatgcgacaacggttggtagcacgactgtcgccagcagtcttgtgcaggcatcagcggcagcacaatggccatctaaccctaatgtctggttgggcgagaagcgcatcagcgcagtgaccgtaaccaatactgcaacgagcacaccgttaacacctgggacgcactataacgttgacagctacggcgggaagctgcgcggactgacggcaaccacctacgctgtcagtgtcgcgtttacgtatacgcgcgagcgttacgacctgatccagattgacccgacctcactggctctttcggtgaaaaaagggaccgagcgagcctttgacgttcaggaatatcgtcccgcgccagatgcaggaaaggtcgcgctttattacgtcctggtggccgggaacacgctcgaattcgacccggttcaccgttatgtggacctgggcggagagatgctggatggcagggattatggcgtactacgtcagcataaccggcgtttccttcagaaaacgctggcgcgcttgaatcgtggtcaggcgattactctggtagggcatggcgattcaatcactgcggtttcaaacatcaacagcccggcgacaacgccgaacggcgtcacgcgggacctgcagagatttttgcagggaggttatggtagcgacacgctgacgaatctttatcccgcgcaggactggggagatggaggtggtgcgatccacatcagcatcggctggaaccgtgtgctgaagaaatatttcgaagacgttttcgggtctgttgtgacttattacaacttcggaatgtcagggacaacatcggcatccggtgctggctcagaccgtctcggtgcgattaccgcgctttcaccgcacctgaccgtcgttgggttcggcatgaacgataacgcggggagcacgctgtatggaaacctgatgaccatcatcaacacgctgaaagctgcgggttctgaggttgttctgatgcctgtcccacgtacgtcaaataccgaagatggccgctatacccaggaccagacccggtatatgaaccggcaggtatacagagccgcgattgacggcggcgcagcatacgcaccggcggactggctgacggacgacaacagcaaaggcgggatgggcattgccaccacatctcttactggctcagatctgcgcaaccacccgggaggatacgaaatgagcatctacggcaaggcgctggttaacgtgttctgctaa

SEQ ID NO: 182035 - DNA, 240 bp, Klebsiella oxytoca
atgcttagacaatcagacattaaccaggcctttcgggagtcgattcttcggaactcgaaaggctatcagtatctacacacgcgagacttcatctcttctttgatgcagcgcggcattcacttctcacactctgaggctaaccgctggatagagcgctatcagtcttgctttgcagacaagacgccggaacacacagagaacaggttatggattttgcgcaacatggggagggtcatgtaa

SEQ ID NO: 182036 - DNA, 975 bp, Klebsiella oxytoca
atgtttcctttttcagtgactcaccctcgctcggtcacccagagcggacgacaaacggcgaacagcggctacgagctgattgcctttgacgcggagaagctgaacgtgtttgccgcggaggttcgctactgcgagcctcactggcatccggctccggagctgattaccgtgctggcggggcgatttaccctcgtcgtcggccagcaaagcctggagctggcgcagggagacatgctgtatatcaatgccgaagaggtccattcgctgagcgccgaggaggcgggcagccagctgctcaccgtacagttttcccccggcctgtttgatgaacttcatccctcgccgcagctggactggagtacctgcggacgaccttactctccggcagacagcgaggtacgccagcggctggcgaggctactggaacagctgatcgataaccacgcgccatttcagcgtatcgcggcgatttatctgctgctggatgcggtcgtctccgccggaaagccgacgcgacgcggcgaaagctcgctgcgcgacgaggcgatgatcaaaaaaggcattgattttatcaatcaacactttgatcagccgctgacgctgagcgaggtcgcctgccatagcgggatgagctactcctggttctcgcggctgttcaaaaaggtgagccggtataattttaaagagtatctgacgctggtgcggctaaataaagcccgcaccctgctgcgcgatacccgcaccccgatcacggagattagccacagctgcggctttcaggaacacaagtatctgatcgccgcctttaataaatactgcggcgtcacgccaaccgaataccgcaagcgcttcgtctcgcggcaaaatatgcgcgaaagcgaactggcgctgggggaggattgcctgtgcctgccgctgaatcatgcgctgctcaagcggctggcggctagtagtcgatccccatctgcgctttga

SEQ ID NO: 182037 - DNA, 1050 bp, Klebsiella oxytoca
gtggcggtgatcttcgtcagcaccgccgtaggtgaagatggcgaaaacggcgatcgtcaggatctgcatattctgccggtgcacgaacggttaattcgcgaagtggcgacggtccagccgaatatcgtggtggtgctggcgaatagcgatgcggtggtgatgccgtggctcggcgagtgcaaagcgctgctggaaacgttctttgccgggcaagggatggggcgcgcggtggcggaaatcctcttcggccagcgtaacccctgcggcaaactgacggtaacggtgcctaattccctggaggaaacgccggcctggctgcactatccgggcgaaaacctgcgtcatcattacggagaagggctttttgtcggctatcgctattatgataaacgtcgtatgacaccgcagtttccgtttggctttggcttaagctatacccggtttgcgtacgataatatcgcgctgtcagcccgccgtgcaggtgcaggcgagacgcttaccgtgtcgttcgacctgaccaactgcggagagtatgcgggcaaagagatcgtccagctgtacgttagcgcgccgaagggggagctgattcgcgaagtgcagtcattaaaagcgttcagcaaagtggcgctggccgccggagagacccgtcgcgtgagcctgcagctgcccattggcgagctggcctgttatcatccgggcctgggtgattgggtcgtgacgccgggcatctggcaggttcgcgtcggcgcctcatcccgggatctgccgttgatcgcggagattgaggtagattgtccgcagcggtacgtcccgctgcgcgatgataactctctacaacagctgatccagcagccggaggcctttgctcgcgtagtgaagctgattgccgataagagccagatgccggcggagcaggtgcgtgaaaaactgattcgcctggcgccggatctgttctgcgggctgctgattgcgctgaccgaattcctggcgctggatatcgaacgcgacgagcttaacgccgtgctggccggcgctcatcattgccaatga

SEQ ID NO: 182038 - DNA, 897 bp, Klebsiella oxytoca
atgaagaaaagttttgttttcattgtgacatttttagccgcttccgtttctttggctactcatgctcaagaggaaccaagggactttaaaggggttcttcagtgccgaacgatagaggatggctctcagcgtctttcttgttacgataattcaattccacctacacgaacgaagagtgctaaaaaatttgaaagtagagatcaatgccctgacgaaaaaacggacgaagagcgcctgacctgctatgacagatttttctcaccaacgtttaaaccagcgagttcaaccaaaaccacaccttcaagccaagaggttggtaaaaacgaggcgatcagtaaagaaaagctccttgaatgtcgctcagaaataaatggcactaaacgattagcatgttatgacaagctttttcctcaagatacaaaagaggaagttgcgtctggtgcagtagaaccagctccaaaccctggaaaatggcttactcacataacaacatctccggttgatgactcaaaaaacgtggttttaatgctgcctagcaacgattccatcagaactccgtatggcgagactgttacaccaacgatttttgtggcctgccgtgaaaagaaaactgaagtttttattaattgggatgtgtacttagggctagaagaaacgagcatgctttaccggtttgataagcaaaaagccgtggaaagaaggtggtcgatttctactgataccaaggccgttttctacagtgggcgggatattgattttgttaaagccatggtgaaagccgataagatgttcgccaggataactccttacaacgaaagccctgtgtctgcaacattcgatttggcgggactcaatagcgcactgaaaccattacagcaagcctgtggttggaaatag

SEQ ID NO: 182039 - DNA, 333 bp, Klebsiella oxytoca
atggctttggttagttgcccggaatgccggaaagaagtgagcgattcagcgttgaggtgtccatcctgcggtaaacaactaagaaaaccgcgtcgctcaatttttgggatactaataaaatggatcttcattctgtttaatatcttcatgatctacgccctttttaaaggattaggtggcaccggtgagattattaaccacgccacatcggaagcggaaagggctggggccgctttaggtgcaggtctggggatgatagctattggtactatttgggttattggcgacattgtcattggaatactggtgtttcttacaagaccaaagggatga

SEQ ID NO: 182040 - DNA, 249 bp, Klebsiella oxytoca
atgttcaagtgtcctatttgcggtgccgttgccaaaacgcgcaccagtcgcccattgagtaataccaccgttcgccattatcaccagtgccagaactttgaatgcagcattacctttaccaccctgaatagcgttgaaaaactggtaacaaagcgcggccatcgcgaaaagttgccgcctggatttatcccctcagatgcattcccatcatcccactatggtgatgcacagttaagcctcgccgtataa

SEQ ID NO: 182041 - DNA, 1155 bp, Klebsiella oxytoca
atggcactgacgacagacactatcgacaaagcaaaagcgttactggacgaaggggcgcagcgattccaggactatcagtccgaactgtcgcgcgtaccggccttcagtatactgatgggcggcaaagcactgacgcagctggatccgcgcattatttcgctggagctgaccgacaaccgcggatttgaggccgacgagctgaccattgctatcgacgacagcgacggattgatcgagctgccgccgcgtggtgctgagctatcagtatcgctagggtggcagggcgaaccactggtttacaaaggggtttacaccgttgacgaggtcgcccattcggggccgccggacaagctggagatcaccgcccgcagcgcggattttcgggacgagttcaacgtcaagcgcgaggtgtcctggcacgacgtgacggtcgagcgcatcgtgtcggccatcgccaggcgttacaaactgacgccggtgatttccgagcagctgatgagcgccgagattgaccacgccgaccagacccaggaaagcgatatgtcatttttgactaggatggccgacctgctgggagctattgccaccatcaaaaacggtagccttctgtttatcctgccgggtggtggcgtcagcgcgaacggcaaagccctgccgcagtttgcgatcacccgctcaagtggcgaccggcattccttccgcatcgccgaccgtgacgcttacaccggcgtgcaggcgtactggctggatctggagtttggcaaaaagaaaaaagtcaccgttaaagcccgcaagaaaaaaactgagaagaagccgcgcagcaacgcgagggaaggggattatatcgctggtgaagatggtaacgtttttgttttgaggacaacgtacagcagcgagatcgccgctcagcgtgcagctgcggcaaagtggcagcagctcaaacgcggcgccgccgaatttaatatgacgctggcctacggccgcgcagatctgtacccggaaatgcacggtacggtatcaggcttcaaaacggatattaacaatcaggactggataatcgcgaaggccacgcacacgattgacgacggagcatttaaaacgcagctggagcttgaagcaaaaatacctgaatggattgcagaaagtgagggttag

SEQ ID NO: 182042 - DNA, 1182 bp, Klebsiella oxytoca
atgaccgacaacttttttcacggggcgcgcgtcaaggaaaataccgacctccagaccgcgatcaatgacattgattcaacggtcattggtctggtcgcggtagctgaagacgccgaccccgccaccttcccacttaacaccccggtgcttgtgacgcgagttatcagcgtactcggcaaagcaggtaaaacaggctcgctctacaaatcgctgaaagctatttccgaccaggtcagcacccgcgtgatcgtagtgcgcgttgccgaagctgagaccggtgaaggcaagccaacgcagtcacagctgattatcggcggcacgcaggcggacggcagttacacgggtatgtttgcctttctgacggcggagcagaaaaccggctatcgtccgcgcattctcggcattccggagtacgacaccgccgaagtgaccgcacagctgcgggttatcgcgaagcaattgcgggcgttctcgtacagctactgcgacggctgcgacaccattgcggaagcgaaaacctaccgcgagacgtttgcggaacgcgaaggaatgctgatctggccgaactttatcgcctataacccgctgaccggtgtgaatgaagaattccctgccgtggcttatgcgctgggtctgcgggcgctaatcgacagcgagcagggatggcataaatcactgtcaaacgtgccggtcaaaaacgtgctggggatttcgaaggatgtgttctgggcgttgcaggcggaagattccgacgccaacgagctgaacgccaacgagatcaccacgctcattaagcgcgatggcttccgcttctggggaaaccgcaccaccgacaccgaagaattcattttcgaggtgtacacgcgaaccgcgcagattctggcagacagcatcgcggaagcgcagttcactaccgtggataccccgctgacccctgcgaacgtgaaagacgtggtgagcgggattaacgccaagcttcaggcgctggtcacggcaggtaagctgattggtgcggcctgctggtatgacgtcgttgataacccggtaacaggcattcgccagggcaaagctatcgttcgctacaactacagcccggtgccaccgctggaagatctgacgatgatccagacattcaccgatcagtattacgaatccgcttttgcatcgctgggaggtgaatag

SEQ ID NO: 182043 - DNA, 516 bp, Klebsiella oxytoca
gtggctattccgaaaaaactccggctgttcaccgtctttgtggacggcgtgaaccatatcggcaaagtccccagcgtgacgctaccgaaagtgacccgtaagaccgaagattaccagggcggcggtatggtgggcgcggtggctgtcgatctgggtctggattccggggcgctcgatgcgtcaatggttgttggcggtgtggtcgaagagttgatcctgaaatacggtggtgatatcgacgaaatgcgcctgcgctttgtcggcgagatttacagcggcggtaccagctcactgctggaggttgagatgcgcgggcgtatcaccgaaatcgatccgggtgatgccaagcagggtgatgacaccaaccacacctacgccatcaaaaacacctactacaagctgtcggtggacgataagccattgctggaaatcgacctgctgaactttatctacaagcggaacggtcagaatctctatccggatcgcattatgtcggcgctgggtctcggcagctga

SEQ ID NO: 182044 - DNA, 300 bp, Klebsiella oxytoca
atgtccattattctcagtaagccgattaagcgcggcgatcaggaaattactactatcaccatcaacgacaatatcaaacaggccggctccctgcgcggcctgcgtctggttgatgtgctgaacttcgatttcgatgcggtctctacgctgctgactcgcgtcaccacaccatcactgaccacctctgatgttggcactatggcaaccggtgactttaccgctatctgcgaagagattacgccttttttgacgaaaccggcgccgtccgtaccgaacgcggcggagacggagagcgaataa

SEQ ID NO: 182045 - DNA, 2928 bp, Klebsiella oxytoca
atggatcttagtattcgcgttgcgttcagtgccattgataaactcacccgcccggtcagtgccgccagtaaagctattggcggcctttccgactccctcaaaaaaacacagtcttccattaaagatctggaaaaaagcgcatcgtctttcgacaagctgcgctctcaggctaacgacacagccctgaagctcaggaatacccagcgcgcgtttgatggcctcaaccagaagcagcgcgaaggtgggcagcttaccgaagcgcagacagcgcggcttgaaacgctgcgcaacaagctctcgcggctgacggacacctacaacaagcagactacccaactacgtgcagccggacaggcggtgcgccagcacggcgttaacctcaccgccggtagtggcgcagtgcaatctgctatccggcgaaccgagcagtacgcactgtctcttgagcgcgaacggcagcgcctggcggcggtaacacgcgcgcagacaagctatgaaaaggcgaaggaaaccggtgcgagacttcgcggcggcggcaccattgcaattgctggcgcagctgctgccggatataccggcgggcgctttctggctcctgctgttggctttgacgaggaaatgtcgcgcgttcaggcactgacgcgacttgataaaggtgactctcaactcgcagcattgcgtgcgcaggcgaaaaagcttggcgcggaaacggcatttaccacccgcgacgcagcgagcggtcaggcgtttcttgccatggctggcttcacgccgcaatcaatccaggcggccttacccggcgtgctcaatatggcgctggccggtgggatggatctgggtgaaagtgctgatattggatcaaacatcctttctcaatttaccctcccggcaggagagatggatcgcgtcagtgacgtgctgacagcggcatttacccgcacgaatactgatttacgaagccttggcgatacaatgaaatacgccgggccagtagcatcaaagctaggtatcagcctggaagaggctgccgggatggcgggtattctggctaataacggccttcgtggtagtgatgccggtactgccatgcgttcttcactggcccgtctcgcctcccccactgcgggagcagcaaaagcactaaaacaactcggcgtatcggtatcagacgccagcggcaaaatgcgaccagtagaaactattcttcttgacctctataaggcgactaaaaaatacgggcaggttgaccaggtcggtttttttaaagatatcgcaggggaggaggcttttgttggccttcaaacactggttgctggcgctggaagtggcgagctacaaaagctcattgatgccctaaaggcagcctccggtgaggcgtctgctgttgcaaaaaaaatggctgataaccttggtggcgacctcaaaaacctcgatagcgcttgggaaggctttcgcattcaggtggaagaaaccgccgacgggccgctacgtaaattaacccaaaacctgagcgacgttattacggcggctagtgaatgggtgaaagccaacccgcgcctcgcgcaaactctcctcctcgttgtgggtggtgcgctggcgctgactgtcgctattggtgctctctcgcttgccgtcggtattctgattgggccgcttgcaaaactgcggctcggcttcacgttactgaccggtggtcgcggtattctcggcaccgtagcagcattgcgcacttttggtaccgcaaccggccccgtaatggcaaccatgaagggctggcgcgcagtactatcaggtgtgcagtccgggtttggtggcatcttagtgaaaataagcaaagtaagcgctgtccttcctgctatgcgttccgctttaatgggagcgtttctggctccgggtgctgcactggcttcttttggtaaaagttttggcatgtttttactgcggtttagtggcctcaaaatgctcggtggcgtgctgtcttttctgctcagccccattggtttgattggcgcggcctttattgcggctgggctgctcatctggcggtattgggaacctctaaaggcctttttcacgggtttgttcaccggtgttatgcaggccctttcgcctctcagggattcatttgccgcgttctcacccattctggaatccgtcggtgatggtgtgaagtctgtatggcaatggtttaccaatctgctgtcaccgattcagaccagtaaggacactctcgataaatgcgccagcgccgggagtacctttggcaatgtgcttggtggtgcgcttcaggtggtgcttatcccagccaaggccttgctggatactttggcctggattctggaaaagctgggtgtattgcctgatgaagctgagcgggcacgcaagaagatcgaagacgctcagcgtatgtcacttctacaggataaggtcgcctttcttcagggggatatgttaaaggttgctccgaaaaaaacggactctcctgttatagctgcccctcctccgtcgtcctctcccttatctggtgataccggtacacagcgacgcctgaacagcatcgctgataacactaaggcgacggccaacaatacgaagaaaatcggccccggcgacattgtctttaaaaacctgccgcgtgctttggcgctgcgtggcgcctatcaggaggcgcgggttattccgcagcctgtgcctcgcgtgtctgtggctgcggccggcggcgttctgtcggtaccgacggcgacacagggggcaacatctgcgccggtcgctgcctcgtcgggtactgtaccgttcttccaactggtctttaacgacgtcggcaaacgctcggatcaggagcttgaaaaaatggttcgcaacgctgtgcgtgatgcgatggccagcacccgcaaagctaaccgtggttcataccgcgatcgggaataa

SEQ ID NO: 182046 - DNA, 489 bp, Klebsiella oxytoca
atgatgatggtattcgggatgtttgtttttacgctgcgcactgtcccgtatcagcagcttcggcactcgcaggagtggcgacacgttaaaaatgaccgggttaatcagtcggcggcctggcagtatatcgggccgggtgacgatacgatcacccttgacggtgtgctatacccggaaatcaccggcgggcggtggtcactgtcggcgctggagacaatcggctttgccggtcgcccctggccgctgattgaaggtgacgggcagatttacggaatgtacgtcatgacgcggctggagcggggaaagacggagtttgatcgctacggcaaccccaaaaagattgagttcacgatcagcctgagtcgcgcggatgcagattttcgcgagaagctacagacgtcctcggtcagtgacgtgctggatgatctcaaaaccagcgcaaccaaagccgttaactcggtatcaaactccctcagcagcctgttttaa

SEQ ID NO: 182047 - DNA, 1059 bp, Klebsiella oxytoca
atgagtgaacgtcgtttttattccatgctgacgcaggccggtgcggaaaaaatagcacaggcacaggtgagcggtgtccctgcggggtttgtatttatggcggtaggggacggcggaggcgttgtgccttccccttcatcagagcagaccgggctgattaatgaggtctggcgtgcagagctgaacagtctgactgtggtcgacgagcagaaaaatattattcaggctgaagcgataatgccgccgcaggtggggggcttcaccatgcgggaggttgcgctgtttgatgaggagggtgtgtgtcttgctgtcggcagtctgccggtcacgtacaagccgacactgagtgaaggttccgggcgattctctgttgtgcggatatggctggcggtcagcagtacggaagcggtacagctgaccgtagacacctcggtaatcatggcgtcgcgggaggatgtggataaggcgaaggatgagtcgatggactacaccgataaggctctgcaggaagccatcgccgaagccatcacagcggcaaagcgtgatttctgggaggatgaaaacccggtcggcacggtgaagttttacgcgcagaacgttaaccctaacgagcgttatccgtggtcgcggtgggtttataccggcgaaaataaatcaattcgcgtcggcaaggctgacggctcgaacgtcgggcagaccggcggcagcgataccgtgaccattgaacgcgccaatctgcccgccgttcagattgatgttaccggcgaaaccagcgagcagcctgagcagacgctgactacagcggaaaacggggcgcataaccaccagggtggtgacggtgcgccgggtgaacagtggcgggaaggtacgcacggcacggataaccagaaggacgcgaattttaacctgaccagcgatgcgccagcgcactcgcatgacgttactatcccacagcataaacactcgacaaccggcaaaaccgccaacctcggcgagggtaaatcgttcagcgtggtggaagcccacaccctgctgatgtgctgggcgagggtggcgtag

SEQ ID NO: 182048 - DNA, 1569 bp, Klebsiella oxytoca
atggtaacgtatttcggttcgcacggctctctctcggcgggtcaggtcattgacatgattatccagctcgacgaagacaagaaaccggtagaagtgctggcgcaacatgtctccaggggaacaacagcgttttatacctacagttctgcggtggcaaaacaggacggctggctttatgtccgcgctcgtttctctgattttcgtatcttcaccaaacatcgggcattcgcgcgggaagagaccgtcagtgcgctgagccgcacggtatcaaccctgcccgccgcgtcctgccagatggagcgtctgccggtacgtctggataatacctggaacttcaacgccacggcctttatccaggaccagattattgaagaaggggaatatctctacgctgtcgtgacagcggaggggcgtctgccgcatatcatgcagcggcaccggtacggcggcgcgtggtcggtgttcgacctcagccaggttcctgacctgattgcgaatgacggctccggggtgctcaagtcacccaccaccgaagacgggcataatgtggcggtgatgggtattacccgcgagggttacatcctcgttgcagctaaccatcacggcaacccgtggcgctgcgttatcagtgagcggccgcacgacatttccgcctggaagcgtgcgccctttgccaccgactccaaagtggtgacgtatccccggtttacccgctacccggacggcacccttcacgcattctggcgcgagggaagctcggggaacggtgtctactacggggcaacgttcaatgatgaaacgatgcttttcaatcccaaagtactgctgattgatgcgcaggcatccaacccgtacgaacagcgtattgttattgacgatgaaggcacgcttcatctgtgctggggataccgcacggaatctcaggacgcaaacaccaactttggcctgctctatgcgaaatccaccgacaaaggcgcgacgttcaccagtgccgacggtagccagcagtatgccctgccactgagcggcagcaacgcggaaaaaatcattgatgcgcctgccggttcgggttactgcaaccagaacggggcatgtcatgacctggaaaacaactatcacacggtcatctggcagtacgaccgggatggtgccacccagatttgtcatatctggtttgacggtacgcagtggcagcgggagctggtgagtgatttcacatttgccgtagcactgaacgtcccgacgctggatggctccctgtgccgtccgctgattttctgcaccaacctcggacggctgtatgtggcgtaccacacaacggaaatgggacggcagaacgatatccgggtgattgatgtgacggagccgggcgcgccggtggattactgcgtggcgaaatatgatgtcgggacgattgagctgtccatcaataccgacatggtgaagcgcagcggcgagttatccatgcttctgacccgtggcgcgtcaggggcggagcgtccgggctataagcgatttgtatctgagtcaggctggctgatgaccgtcaccctgccggaaaataactga

SEQ ID NO: 182049 - DNA, 792 bp, Klebsiella oxytoca
gtgcttgcggggtgctttatcccgcacaaactgctatcgcgccaggcgttcagtgcctttgcacttgactggtttgtgttcggcaatgcgtatcttgagatgcgccgcaaccgcctgcatgggccaatgggctttcgtaactcgctggcgaagtacacccggcgaggttccgacctcgacacatactggtttattcagtccggccttgatgatcaccagttcgaaaccggttcggtgtgccatgtgatcaacccggatattcaccaggagatctacggcatgccggagtacttcgccggtctgctgtcggccaatctggcccactccgccgacaagttccgtaagctctactacgacaacgggtcgcatgctggctgtattgtctacgtcagcagcgcagtggctgacggggaaagtctggagaacctgaagaagacattgaccgacacccggcgaggcggggcatttaaaaacatcctgctgagtgcgcccggtgtcggcaaagatgccgtgcagatcctgccgttcagccagatatcggcaaaggatgagtttgtcggcgtgaagtcctccacgcgtgatgacatgctagcggctcaccgcgtcccaccgcagctgatgggcgctatcccggaaggtaacggatcattcggcgatgtcgagaaggcggcaagggtatttgcagtcaacgagctgacgccggtgatggaagcgatgaagcatgttaacgactggctcggcgaagaggtgatccgcttcaacccttacgccctgctggaaatcccgaagtga

SEQ ID NO: 182050 - DNA, 1200 bp, Klebsiella oxytoca
atgggactggatgaattttcgaagatatgtaaacggcaattagatgcatatttaaaaaaagtagagtgcgaaataaaatgtggcaatataaaatacgcaggtaaaaaaattaatcgtgcctattaccctacaacattactatgtgtagagtcagatgataatgtcttatcatttgagcttcttggattatcccatgtaagaaaatcgctgaaaataaaaaaaagagacaatgtcccattatatcaccttacacaaatgggaaaagatgaaaacgtaatgaaaccatatttttccgtctcagatagaaatgttttttctgaattatcttttggtgatacagaagcaagaaatctattaaagggggcggggcatgttattgctgataattatccggcaggactcactagcgaacaggcttcttatctggttagctttgatgatgaatcaaagtcttgcttggtgtcaaaatcagttttggcgtatgttagtaatagaattttaagggttaggtatatttacaacttggctatgttttcagttcgtttaagtgaagtggaactaactgataggttgggatattttattggtcgggaagtggtttttggtgttcagttttttttcgatgaaaaatatttatcatgggttaaagcgtcgcatttgattaatttggttttaaatgatcaaatacacgagacaacaataggtgattatataaatgatcacccagatatattgctcgacgctttaggatataaagggtttgtttatgagccaaacttagaatggatagaaaaaaccgatgacaatcctgatttgtatattaatccagacgcactcttagaaagggaagatggttgctacgatatttgtgatctcaaaaaagggttggtgaaaaagaaaaacgtgacaaaaggagaaagaagacgacgacgttttattgatggagtgggggaggggttagctcaacttgataactacgaagaatactttacgtacccgcttaatgctaagcacgctttggaaaagtatggggtaagggttaattttccaaaaaaaatactaattgtaggaaatcatgaaaacactaacagcattgaagtggcccaagcgttgcgtggtcgaactgacactatagttattgattacgattctttgatctcaagttatgttgggaaactgaataactcatccatggtatag

SEQ ID NO: 182051 - DNA, 2556 bp, Klebsiella oxytoca
atgtctgattccgctgctttggcatggagctggaatgccaaacggcagccagtgaaccccagcacaacggacgagccagcacagaaaccctctgcgctggccgtctggcttgcgctttacgcacaggacgaaagcgagcaacgcgaacaggctgaggcattgagtcgcgcagcggaagagcacctattttctattgcaggctgcgatccctggctccgcgacgagctgaataacgcgctgattgagaaggcgaagcgacacgcagaactccatcgcgctgatcctctctccctgattcgtgatgacattgccaacctgccagatttcctgcgcaagccgctggaatcaaggattaagtatttagaaaaatcagaagatcggcgccatttgcctgtatatctgaatgaggtagtcgccccatctttgacaaggattgatgctgtccgtgctaaccaaatgtcgctgtcgtttcgcgccatggctggcagggacagccttgatcagcttctccggttgccggaactcaatcagcgcgaggtcaagcgactctcgacgctggtcgcggcgcacattgatatgattttcatccagctttgcgacgagatgttgaccgatgaactggcttcgccggtcgtcattctgggtctttatcgtcgtttggcaactgaggtgctacgcctcgatgttctcccgccagcctatgaagcgctgcgcagcaaacataatcgccgcaaccctattaattacgatctgataccgggcgcgctggcgcgtatgcgctgcgccgactggtggcagcgtaagctgtggcagctccgcaatgaatggcgggaagagttgctgcgcgcagcctgtctcgttcatcgccacgcatcaccctatgtcagccacgacattcttttgcagaagcgggaacagcgccgtaaggcaatggattttttccgtaattacgacctcgttaatgaggatggcgacacgctcaacatggaagacgtggtgcttgccagcgccagcaatccggcgcatcgccgtaatgagatgatggcgtgtgttaaaggtctggaactgatcgcagaaatgcgcggtgattgcgcagtgttctataccatcacttgcccctcgaaataccacgccacgttgatgaacgggaagcctaatccgacatgggatcattctacggtcagaaagagcagtgattacctggttgatatgttcgccgctttccgcaaggcgatgcataagaaagagttgcgctggtatggcgtacgagtggcggagccgcatcatgacggtacggttcactggcacatgctgtgctttatgcgtaaaaaacaccgccgcactattaccgaattattgcgccggtttgctgtgcgtgaagaccgggcagaacttggcaacgataccggcgcgcgattcaagtcaaagctgatcgacccgcgcaaagggactccggccagctatatcgcaaagtacgttagtaaaaacatcgatgggcgcgggctgggcgacacgatcagcaaagagactggcaagacgctgtgtgacagtgccgagcatgtcaccgcctgggcttctctgcaccgcgttcagcagttccgcttcttcggcattcccggacgtcaggcctatcgcgagctgcgcttactggccggtcgcgctcgccgtgacctcccgccggttaaacaaaagcccggaaaggaacttaccccggagatcctggcggcgctggcgaatgcgcgcccggttatcaataaccccagccttgatgccgtacttgctgctgctgatgtgggatgttttgccacctacatcacaaaacagggaggtgtgctggttccgcgtaaaaactacctgatccacacggcctacgagccaacggaagagccaggaacctacggcgatcatggcatccgcatttacggcgtatggtcgccgctcaccgggaaagaaaacaaaatctgcacccacgtccacacatggaagatggtgaagaaggctcccgctaactcaggcgctgaaagcgccgcccagggcgaccccgtcgccccttggactcgtggcaataactgtcccccagaccaaaaaagcagcaaaaaagggacggtaattgccaccacaccggcagaagtggcggtgttagatgaggagtccgggccgctcgacgcgagcaagttaccctggaaggaacggcaggcgctcttccgccggattcgagacgagctgaccgcatcaccgaaggcacaaaaacctgcgttcgccccggaaaacagcccagcagtggctgagttgtacgacttcgcgcagtcgttgggatgggatgagaacaatcttttattgttggcgcgccgacttgccgccggtggcgagctatctattgccggtcgcaggtactgcacccacggcgatgggcgtatttacagccgaaaagaacccatcagcgaaacagatcctgaagtcaattgcgcgctcaaggcgcgagaaatcatcacgcggtttaaccgcattcgcagaggcaaatcactgggggtaccacatgaagcacctgagcagtaa

SEQ ID NO: 182052 - DNA, 897 bp, Klebsiella oxytoca
atgaccttacaggattcacgcaatgccatttcttcgccgggatcggcggatggtcgcttgccctgcgtcgcgcaggatggccagacagccgcccggcatggacagcatcatgcccttgccagcctttcagcgcggcaggcaaaggacttgggtttgctgacgagcggcacttatggccctccgcacattggcttgtcggccagcgtcgccctgtcgtggtctttggcgagcaatctggcagcgctgacgcgaatgactggatcgaccttgtacaagttgacgtggaagccctgggttatgccttcggggcgactgcgtttccgtctgcgagcgtcggcgcgccgcaccaaagagaccgtgcttattgggtggccgacgccgatcgccagcattgggagaggtgcggggaatttcaaccgacagggggggggtaaaccttcagacagcagcgttattagcgggttggcctacaccgacggcaacggacggaaagggcggttatcagggcggacggatccgcaacgggaagctatcgacggacaggctggacgtggctgcgcaattagcgggctggccgacgccaaccacgagcaacgaccgttcaccttgtccgcaagaagctatgcggacatatcgcgaaaatggaacaaagattcagaagcggctacaggatgtagcggcgctatgcggcccggcccggttaacggcttctggcgagatgctgactggctctttagccaggatggaaagtggcggccagttagccccggatcattcccgttggctgatggggttcccgccagagtgggaagactgcgcgcctacggaaacgccatcaacattgaagcggcggcagcgttcataaaatcctacatggcggcggtggatcatgtctga

SEQ ID NO: 182053 - DNA, 156 bp, Klebsiella oxytoca
atgaacgaagaaaccaattaccgccggttttggcgaaaccttgttatctgctgcgcgctctgctcgctgttgttctggctcccgatgggctatctcgcctttcgtgttttctctgtggtgtgggaggcgctgtggttgcttattacaacgaaatag

SEQ ID NO: 182054 - DNA, 174 bp, Klebsiella oxytoca
atgaacacgcttgatgccgttgtgacgcgagttctggacgttcgtccatatcgccatttctgggtcgtcgaggtggaggtattgagctggggccgatacagcaacacgaccatcatccgcgatagcgaaaaagaagcccgccaggttcaacccggcgacacggtgacgatctga

SEQ ID NO: 182055 - DNA, 969 bp, Klebsiella oxytoca
gtgattaagtccccgatcaaatgggctggcggcaaaacccgtgttatgccgcagctgctgaagcatctgccgaaagctgattgcctgattgagccattcgttggcagcggtaccgtatttatgaatacggagtatcgccactatgtgctttgcgatagcaatctgaatctgatcaacttcttccgtcaattaaccggcagaccagaagacacaatttctgcctgtcgctgggtatttagtggcgggaataatgccgaggaattttataagcggcgcgcagaatttaattttctgacccaaaaagcggacttagatccggatgctgcgctgcttcatgctgcgtattttttgtaccttaatcgccatacgtacaacggcctgtaccgagaaaatctgaagggggaatttaactcaccctttggcaaatatgccgcgccttacttccctgaaaatgaaatgcgtttgtttgccgaaaaggccaatgacacaaacgcgatttttcactgtggcgattttcgcgattccatcccaggcactatgcagctggcgcatgacgtggttatttactgcgaccccccctacatcccggccagcaaaaccgccaacttcaccgcctacggcaagcccttcaccctggacgatcatcgcgccctggttgcaaccctgctcgatgctcatcgccagcatggcgcccgctcggttatctccaacagcgataccccggaaacccgcgaaatctactccgctttcaatctccatgccttcagcgttcgccgctccgttagtgccaaaagccgcgatatggccggtgaagtgatcggcgttcttcgcggcgatgtgggttgcaaccctggcgcatgtggagcttggacgagcatcactgaacatctgcggccggcgacgacgtggatcgggtttgacccggcctccggattcgataacggggagccatctgatgaacacgcttga

SEQ ID NO: 182056 - DNA, 195 bp, Klebsiella oxytoca
atgaaacgatcacctgaattcgcccagggtgcattggccgcactgcgcgaagccaaaaccctcaatctcgcgaacgcaacagcgatcggtgtgctggaaagcccggaggccgcgaagaccctcgttaacctgatgaatctggtgcttgacccgcttatccagaaatacaccgtgatggaggcgaaccgtgattaa

SEQ ID NO: 182057 - DNA, 228 bp, Klebsiella oxytoca
atgcatccgcgtctctccgtcatttgcagcgcaccgctgccggtctgcaacagggcgctagccgccctgaaatgcttcgcccgcggtcagcgcaatttctcccgcgtcatgccgcatgcctatctcgtgatccgtattggtcgccgctggcgcttgctcagcaagaacggcggccagcagtggcggcttatgacccacgaaacctacaaccaggaataccgcaaatga

SEQ ID NO: 182058 - DNA, 558 bp, Klebsiella oxytoca
atgaatcatttaatggtcgatttgataaacgtcaacgagaaacagacctcacctttgctcgctatcgaagccgtgttctttgagccgtcaacgggtcagatcgggaaaagcttttactctccaatcaatatccggatgacgacaggcctgatcaacgttgatacagcctttgagtggatgaaaaaggattcccactggcgcgctgaattaatgagtgccaccgaggccgaagaaggtgtgatgtgcgacctggcgggctttattgccgacaacaccgagcatcggttcgatagtttatttgtgtggttcaaggataccccggaaaagctggtctcattgcggtatgccgtcgagcgcacaaaagtgcttggcatcttccctgacggtacaaaattccgctgcattcgttctcttctcgatctcgccgccgctactggctacgccccccacgcacggaaagcccttgcgcggtacaccctgacagatgccgtctatcaggccgagcaggtttgcgagatctggcagcgcctgacctccccgcacattgaatcgctgtga

SEQ ID NO: 182059 - DNA, 222 bp, Klebsiella oxytoca
atgtcgatcacgtcaataaaactggatggcggacttagcgatccagagtttgtggaaataagcgccaacgcacggaaacacgaacgcgcgcacctgctgggcttactgcgtatttatgtcggccagctgaaaaaggaaagcgccaccccggaagagatttattcatcaatcgagcggtggattgatagccgcgaattaccaatcagcgagggcaacaaataa

SEQ ID NO: 182060 - DNA, 279 bp, Klebsiella oxytoca
atgagtatcttcagcgaagagagaacatcatgggaacgtgaaatgctgatccgcgaggcgatagaaaacgctgagcagggtttcactgtccacctgagaaatggtgcgcgtattactgtcagctctaacagcccgtcaattgacttaattatttacggtctggaaaaaaccattcgcggtaatcatgagcgtgcacgaatgacctttattgattatctgtatttttggcacgaaaggttattcaagctggctaaaagaaaaccgcgccccaaccactaa

SEQ ID NO: 182061 - DNA, 240 bp, Klebsiella oxytoca
atgaaacgcctttatgctgagcagattaataaaatgctggaagattattatttcaatctggaaaacaacccgcaaggccgtgagtcgcattacggtgtattagccagtggcgtccagcatatttatggtgccgccttctgcatgaatgatgacgacgcacttagtgatctgcgcccgttcgttagcgcgatcatgaatggcgagataccgtctccagccgcgatagagcttgctgtatga

SEQ ID NO: 182062 - DNA, 279 bp, Klebsiella oxytoca
atgaagaaacgctactcacagcatggcaagtgcgcgggaaacattcgcatcacatcccacgatagcttgcctaaagtcgtctggataaataagcacgccggaatttgttgcggcttcaccatccgtgtattaccgcgcagggtaggtaagaagcgttatcaaattatgaaagatggtgattctttcggaattgactttgctttatcggaagcacgcaaaacgatagatcgcattattaccaatcaccgctttattaatcattgggagaacgggaaatga

SEQ ID NO: 182063 - DNA, 333 bp, Klebsiella oxytoca
atgaaagatgcagttttgatcgcactgtttaagattccagacccgattaccgctgatgagttttctcgccgcaccggcaaaactgaatcagctgttcgtcacatgatggatcgtcgccttttaccgatggtcactgagcgcgaagtacttggccccgatggcagcactcgccgtcttctgattctgtggaatgaatggcttgagatggttcatgaagccacatcaaaactcccccctgagcgacaggactggcgagcaggctggatcaagaaagccaataagctggcgaatgatatgggcgtaaacatgtttggtggtggggcggcggcatga

SEQ ID NO: 182064 - DNA, 303 bp, Klebsiella oxytoca
atgaatttgccaattagtgaacgcctcaagctcatgagggaaagcgagcgcattaccagccgcaacgaagctgctgaaattattggaattcctcacaatgcgctttggcgttatgaaactggggaatcaataccaaaaggcgacgtaatgatgaaaattttaaataccccgagatttgaaaaatatgccctatggttcatgaccggaaagattgctcctgaatccggtcaaatcgcaccggctctcgcacactttgggcaagacgaaacaacgtctcagccctcagaccagaaaattggctaa

SEQ ID NO: 182065 - DNA, 1008 bp, Klebsiella oxytoca
atgaccgttaagctgctcgatggtggacgctataaagtggatattagaccgcgcggagcgacaggacgtcgtatacagcggatttttaacaaaaaagctgatgctgttgcttttgaaaaatatgtcatcagcaatatgcacgacaaagactggctggataaaccaaccgatcacaggcggctaagtgagctacttgcgaggtggtgggagctggagggacgaagccataagtacggggaaaaaagaaagcgcgaactgaaacgggtgataaacgacatggatgatcccaggctttcaaaggtcaataagggttttatcgttgagtatagaagccagcgcctctacgaaggggcaaaggcatcgacagttaacagagatctgacctcgctgcgtgggctttttcgggtcctaattgaagctgatgatctgcatgcagagaatccactaaaaggcatacccgcactgaaggaagaaaaacccgaaatgtcctacctgaccactcaagagattgagacccttttgtcagtggttaccggcgatgcgcgacgccttacggtgctctgtttgagtaccggcggtaggtggggggaatctttaaacatgctggctcagaacatgatgcatggaaaggtaacctttaccaagaccaaaaacgggaaggcccgcaccgttccggttactccggaggtaatggagtacgtgaaaaccaaaagcacaggcaggctttttaatgttgattatgttgaataccgcaagaggctcaaggcgttaaaaccagaccttccaaaaggccaggcaacgcatgtattgcggcacacttttgcggcacacttcatgattaacggggggaatattttgacgttaaacaaaatattgggacatgcaaagattgagcaaacgatggcttatgcacactttgcccctgaccatcttgatgatgcgatgcgccgcaatccgctaagcaatggcatccatattctatccagccaatcggtgaatgatggttaa

SEQ ID NO: 182066 - DNA, 3027 bp, Klebsiella oxytoca
atgaccgctaattatcccgccagcattctgccacccaacgccaccgccgtggagcgggccatagacagggccagcgccgccgcactggagaggttgccggtatatctgatccgttgggttaaagatccggacagttgcccgctggcgctgctgccgtggctggcgtgggaatatcaggttgatacctggaatattaactggtcagaacaaaagaaacgcgatgcgatcaagcgcgcccactacatccaccgccatcgtggtaccgtcgccgccgtccgtcatgccctggtggacagtcctttcgggacggatattgttgaatggttcaatcagaacccgaaaggggatccgtatacctttcgcctgaacgtgtatcagaacgatttgccggtgacggaatacgaccagcaggatctaaaactggcggtgctgcgcgccaggaatctgcgcagctggttttccgttcatgtatttggccgacttcagggaacctcgtatgcggccggttacatgtacgccacggagaaaatcacgccgcgctttgttccgttgcaggtggttttatcccgctacgagctgaatctggcccccggggacgcggaaacggtcacggtgacaattctccctgaatatgctgaagataaaacctttacggtaaccacgtcggatcaaacaatcgctaccgccacaatagtcaacggcgatattctggttacgggcatgaagcgaggtacctgttcggtcaccgttacgacgactaacggcgtcagtgcggtgatcagcataaaagtggtcgctgtaatgaagttcattacccgcatcgacagtgcaaccaggccaatattctttgctcatatggacgagggtttcacggttgactatggcgacggcatcgacagccgggattaccgtttcgatccggccagtgcaggatacggctgggttattccgacgcgtgatttggtggagggagaagagtacaccatcacgattaagaacacggaaacggcctgtctgcgaacccgtttatctaatgtgtcctcaaaactgaacactgttgtagagctgattagcgtgacaggggatagagataatctttctgggtttgcactggataccgttggcctgctggctattcgttcgggtgcatttgacgatctaccaaacgtgacggattgtgcaaatattttctccggctgctcatcactgacaagcatcacggcttcgctatttgctcgaatgaaagtagtatcctttacaaacgcattcaagagctgtacctcgcttactgaaattcctgtggggttatttgcaaatcaatccagtgcgactgacttttcatctgtatttgcgggctgtactggcttgctcagcatcggcaataatctattcaacggctgtgtatctgctgtgaatttcaattacgcatttgatggttgctctaagcttgaaaatatcggcacgggtatatttaaaggctgtattttagcggcggcattctcttataccttcagaacgtgcataaatcttcttgcattgcctgctgatatgtttacggacgttccgggcggcgcatttacgggagtattccagaaatgcgcggcgctcactgaattacccgctacattattttcaaattgttctgatgcgaatcattttggcggcgcgtttaacggctgtaccgcgctgctttctgttcctgccggcctgtttgctggactgtcgaaagtaacctatttcgggacagtcttttctggttgcagttcactgaaaacggtcggcgcgggtttatttgccgggtgcagcctggcgcagacattcgcgtctgcattttacagctgccgctctcttgaaactgcagcgaaagatattttcagcggctgcggagaggtgacaacctttgccagtacattctatggttgcagcagcctgacggcgctcccgtcctttgctgactgcgcgaaagtcaccactttctcatacgcttttgctaactgtggatcgctcacgaaaattgatgctgatgcttttgctgagaaagcgctggtaacgacattcacatacgcttttgtaaactgtacttcgctggtttctgtggcggacggcgcatttcggggatgtagcgcgttaaccagcctgggctatacattttcaggttgccgctctctggtttctctcgcgggagatatgtttgacggttgcgccaaagtgacaaccgtcgatttcttgttcgaaaagtgctccgcgctggctggactgccaaaacaactattcagcgacatggtgtccctgaaagggatgggatcgacattccgggattgtacttcactcatcgcgctaccatccggcctgctcgatggttgcgttaatctcacttcgttaacgcttacattctcgggctgtacctcactggcggtattgccaggcgatttactgaaaaacaacacgttgctgaccagtgccggatcaacattctacggttgtacctcactggtaaacattccgccggcgctgttcgcgtcctgctcgcttattacctcgtttggcgccacgttccagaataccggagtggaggaaataccggaaaacctgttcagcggcaacccgctggtgacctcttacggccagactttcaggggctgtaaaaacctgcgctctgtgccagccggtctttttgccgccagcataagtgccacggtattcacgaatgtcttttcggaatgtagtgcgctggaagtcgtcggggcgggattactcaacaccacggcggtaacgacggtgggttatctgtttgacggctgcgcgtcattacacagcgacgttaacacgatatttaatcttgcgagttacccggagattgtcaccacaacggcaatattcaggagctgcgcattactcgccggcaaaggcctggtatttatgggcaaagtgccgaacgtcaccgcgcactattacgcgttttatgcctgtgcgggccttgacgattacgacgatttacccggcaactggataacgaacaaactatga

SEQ ID NO: 182067 - DNA, 432 bp, Klebsiella oxytoca
atgctcaggccagacaatggccgcagatgtgcaacaggctgcccgggcggcaaccctgaaaacgcgtttgtgattggctctgcatacagcgcagataatccgccaacgggcagcagcctgctggaaatcatcatcaccgcaccggatggcgctcgcctgcattacgacgcagccgacgatgccggagcgctggccgtgaccggcattaaaaccgcgcatatccaggcagaaacccgcgtcacgctggacgcgcccgaggtggtatgcacagaaaaacttaaagcgcgcactttcgaactgacccacggcggcacgatggccggtgatgtgactcacagcaacggtgcgttaacgtccaacggtgtccaggttgacagccacggtcatggcagggttcagaccggcggaagctggacggagggcacgcgatga

SEQ ID NO: 182068 - DNA, 462 bp, Klebsiella oxytoca
atgaagaacatcatcaaaaaatgttcgattgcggtgattgtggccctgggcatttcgctgacgcccgggagcgtcagaacgtcgaaagaagggcagcagaaaattgccggttgggaagactgccgcagcacgccttattactgcacggcgggagtgctgacggtgggcattggctccacgggtggcgtggaaaaccgtgaatacagcaaccaggaaatagcgcggcgctgggttaacgatctgcaacgggcagaaaactgcatcaataacaatttccacggcgccgacatgccgcagctcacctttgaggccatgacggatgccgccctgaatctcggctgcaccgggctgatgtggttcaccgataaaaacggacgcaagcagagaaccacgatctggaaacatgctcaggccagacaatggccgcagatgtgcaacaggctgcccgggcggcaaccctga

SEQ ID NO: 182069 - DNA, 279 bp, Klebsiella oxytoca
atgactctggatcgtattaacgaatattttgcgtttgcaacatccgccctggtgaccggtgtgggcgtgatgaccgtcagcgaaaagctggcgctggctggccttcttctggggattgtttccgccgtccggctggcgattcatcgccgccgcattgagcaggccagccagcgccgcaacgacttgatcgagcagattctccgccaggctgaaacccgcaacctgtcggaccgcgaacggcagctgctggagcaactgcacggagacaaaccggcatga

SEQ ID NO: 182070 - DNA, 1674 bp, Klebsiella oxytoca
atgatgacggaatggcaaccttcagctggtattgaagcgacagatgaattgatggagattattctttgtgatgggcacatctctgttttggcgggtgctggtgcgggtaaaacggaactgttagcacagaaagcagattatttattgcaaactgggaaatgtatgtggcccaaaaaaatactctgtctttcatataaaaaagaggctcaagaaaatattaaagagcgcgtaatgagtcgatgtggctcaaaaggggaacgttttgactcatatacatttgacgccttttgtaaaagtattgtagaccgattcaaagatgttttacccgacagtaaaaggccttcaaatagttatgatttggtttttgacaataaagaaagtaatggcagggataaagtctcttttgatttgattagatatttggctttggttatttttaaagaaagagaagatatttctgatttgttttcaatgacatattcacatatttttattgatgagtttcaagatacacgtactgatcagtatgagctaattaaattattatttaaaaataaaggaaattctttactaagtgttggtgatattaatcagagtattatgttatgggctggtgctaaaagaactgtttttgatgattatattaaagattttaatgccacaaaaaaattactggtgaaaaattttagagcaagcgatgagattcaagaggttcttagatgttttattcactatgttcaaaatgatacgaatttttcgccaatagcaaaagatataaataattgtacaatccatttttacaaagatgagatttcagaggctgaagatctatctgatataattaaaggattaattgggtctggattttctgagaatgaaatttgtgtgttaactaaacagcaatcagagaagtatacagagcagcttaggcatagtcttacgaaaaaaaatattagaaatcttgagatgtcagaattacaagatcttttgaaagaacccttgggtgaactattctcggcatgttttaaattatacacatctcgatctttatctggttatacagatctttgtcagttgtatttgggtatgtacagaatttcttccggagacgcaaaagaggaattgttaatcaaaagtttgtcaaatgaaattgctaggcatcgtgcagaattaggtaatcagcctaatgctgattcactgttaacatgtataaaagaaacggttgagtttttttgcattgatcgaataaagggtcgatgggggcagtataagtcggctggttattgggtaaaggtctggaacggcttggagcaacatttgcgatacacaatatcttcaacagggtcactaaatgatgcggtgcaactcttcggggctgacaattctgttcaagttatgaatattcataaatgcaaggggctggaatataaagttgttattttgctcggattggaagaccaggccttttggacttatcattcccagaagtttgagaatgattgcgcattatatgtggctttgtccagagcaaaagaaaaagttataatatcaactgctaatttcagatctcataggattaattctaggtatgataataggacttcattatacaatatgcttaatccagtttatgaatttttaagaacacattgcaaatttaaggtggttacttga

SEQ ID NO: 182071 - DNA, 2031 bp, Klebsiella oxytoca
atgagactaaaaaaaattttcatctctggattcaaaagtatttctaaccaacatcctcaaactattgaacttgaaaaagacttaacaacttttattggccataacggtactgggaaaagtaccgttatggaagctttaaataaattattttcagtcgatcactcattaagatttttatcaataaatgattttaacagctcctatgattgtaaagatgaaaagaacaagaatttaattattgaggcttggtttagttttgataagccaaaagatagtgagctcgttattccgcctttgattgagcatttaactattgataaggaagatggtggtatattatttcgggtgcgattagagggaagtcttacatatgattctaatccaatgggggacattgatgaagacatttgggtagttaacacaagcgatatgatagttgaggatgacaacaaacagaagctacctgctgctataagaaattctattcaggtaaattacgtacctgctaatcgtgatccattattacaacttaaatattcttccaaggcagttttaggtcgattgcttaaggctatcgagtgggttgaagacagccaaaaggctatagaagaacaggcagcacatctgaatgttttgactaagagtaatccagcgttaaatgaaatagcctcagcaattaatgcaagttgggctagtatatatagaggacgatacttatctcaagcctccttgaatttcccacatgctaatattgatgagatacttaaactgatacaacttcaattcaatcctgatgaactcgggaatacaataagtgttgagcgtttgagtgatggccaaaaatcactagtttatttttctctggtcaaagctatgttcgatattgaccagaaaacaagagagttattatcctcagggaataagtcaaattttaacccagacaaaatgagattgcctatttttagtatgatttccctagaggagcctgagaatcacctttctccacactatttaggacgtattataaagttagtaaaagactatgcaaaaaatgaactctgccaggtaattatttcctcacattcatcatctatattaagtcgggtagaaccagagcatatacgccatttcagacttgatagtgattcaaaaagtaccatagtaaatgcgctatctttacctgataaaactgatgatctctctaagtttgtcaaagaagcagttaaggcttatcctgaaatttatttttctaaattagttatttttggtgagggggatagtgaggaaatagtcattcctaaagttcttgaactttattcgactgaggtagatagccattctatttctatagtccctctcggtggaaggcatgtaaatcatttttggcgacttttgaggacattacaaatcccttttattactttattagatttcgatattgatcgaagcggtggtggatttggaagaatcaagtatgcaattgagcaattagtttcatttggtgatagtggtagcaaatatattagcgacagaattatatctaaaataccaagatggaatagcgagacggatcctacaacattctctattagatatactgatggggctgaaaaaaatatcgttcgggaacttgagaaatgcaatgtatatttttcatcccccttggatatcgattatgcaatgatcgaggctttcccggatgttttttgtgaaaaagatgtggtctatggagaaagaggaccgtcggcaataaaatttgatgttgcagaagatttagatgagttaattaaagcggttttgaaaaaaggaaattcaggtgttcgttacgccttttcagaaaactatatgaagtattttttgtggtatcgttatcgatttctatcaaataaaagtaagccagcatcacatgttcgcatgtttacaaaaattgaagagttatattctccagatgaaattcgtgacaagttaccacccgaattaattaaagtggctaagaaaactattaagctattgagggaggtcatagaatga

SEQ ID NO: 182072 - DNA, 678 bp, Klebsiella oxytoca
atgtctaccccagctaactttaatggttctcgtccggttattgatgtcaatgataccgccatgctgctgattgaccaccagagcggtctgttccagaccgtgggtgatatgccgatgccggagctgcgggcgcgcgccgccgcgctggcgaagatggcttcattagccgggatcccggtgatcaccacggcgtcagtgccgcagggaccaaacggcccgctgatccctgagattcatgcgaacgcgccccatgcgcaatatattgcgcgtaaaggagagattaacgcgtgggataacccggaatttgttgccgcagtaaaagcaaccgggcgtaaaacgctgattatcgccggtaccattaccagcgtctgcatggcgttcccgtccattgccgccgtcgccgatggctataaggtttttgccgtcattgatgcttccggtacctatagcaagatggcgcaggaaatcaccctcgcccgcgtcgtccaggctggcgtcgtgccgatggataccgcagcggttgcttctgaactgcagcgcacctggaatcgcccggatgccgctgagtgggccgaggtgtataccaaggtcttcccggcataccagctgctgattgagagctacgccaaagctcaggacgtggtgaagaataacgaacagcttgattcacagcgttaa

SEQ ID NO: 182073 - DNA, 912 bp, Klebsiella oxytoca
atgaaatattttatagcaataccaacctataatggtggtgaactctggcgctctaccgttctaaatataaaaaaatatgcacctcaggatgcgcagatttgcatcatagattcaagtagcaaggatgatacggtacttttagctagaaatgttggatttgtaatatctacgattccaggcgttgaatttaatcatggcggaactcgtaataaagctatattggatttcggtagtaataatgatattgttattttcttaacgcaagatgctgtaccaaaagccggttttattgaggctattcttgctgcttttgaaaatgagcaagtcgtgtgtgcatatggtcgacaattaccccacgatgatgctaatccaattgcaaagcatgctagatattttaattacccagaccaaagctatacttgtggtatctctgacgtacctcaaatgggtttgaaaactgtatttatgtctaattcattctcagcatataggttatcggtattcagagaactaggttgttttccgtctgacacaatactttgtgaagatatgtattatacagcgaaggcagttttggctggttataaagttgcatatgtccatgatgctttagttgcacactctcataactatagcccatttgaggaatttcagcgctattttgacatcggagtgtttcatacagatgaaccgtggattcgcaaagcttttgggggagctggaggtgagggtaaaaaatttatcctttcggaattattctttttgttgagaaataatccattatggatacctgttgcatgtatcaataacttgatgaaatttttaggatataaaatcggccagaaatataaaaagttaccattaagcataattaaaaagtttagtatgcatacacgttattggaaagattga

SEQ ID NO: 182074 - DNA, 2175 bp, Klebsiella oxytoca
atgtcatcagttactaacaaacagccagcaccagactcaagtgaaattgatttcggtcgtttattgggtgaattaatagatcacaggaaactcattgtttctgtaacctcacttttcatattaatagccttgatatatgctattttttccacccccgtataccaaactgacgcgctaattcaagtagagcaaaagcaagggaacagcattttaagtaatttgagccaaatgctacctgatagtcaacctcaatcagctccagaaatagcgttgctgcaatcacgtatgattttgggaaaaacagtagatgatctcaatttacaagcctatgtagtacaagactattttcctatatttggacgaggatgggctcgcttaaccggcgttacgccaggacaacttcaaatatctagactttatctaccaaaaaataacgatggtgatgtacctttaataaaattaaatgtgttagatgagcatcattatactctggattaccaaggtgtcactatcaatggtaaggtcggggaattgattgaggaacagggaatatcaataaaggtcgataatattgatgcaagcaaaaattctaagtttaatatttattatattagccgccttgaagccattaccaatttaaaagaaaaatttaaagttgccgatcaagggaaagatacagggatgctcacgctttccctgattggatatgacccatcaataataaagaaaactctcgataatatcagtttaaattatctaaatcaaaacatagctaggcaagctgcgcaagatgcgaaaagcttagcatttttggatgaacaactcccaaaagttaggacagatcttgacttagccgagaacaaattaaaccaatttcgccagaaaagtgattccgttgatttgtcacttgaggctaaatcagtattagatcaaattgtaaatgttgataatcaacttaatcagctaacttttcgagagtcagaaatttctcaactctacacaaaagaacatccaacttataaggctttgctagaaaagcggaaaactcttttggatgaaaaatcaaaactcaacaagcgtgtatcagatatgcctgttactcaacaggaaattttaaggttaaatcgcgatgttgagtcaggaagagcagtctatatgatgcttttgaatcgtcagcaagagttaagtattgctaaatcaagtgcgataggcaatgtccgtattattgataatgcagtgactcaacccaaacctatcaagcctcaaaagttaataattattattgttggcgtattacttggtataattgtatcagttgggattgttttaattcgtgtattcctaagacgcggaattgaaacacctgagcagctcgaggaattgggtataaatgtgtatgcaagtatacctgtatctgaatcactagctaaaactgcatctaataatacaggatggcgaagaaaaaatgtgaaagatgactatgagtttcttgcgttagagaatcctgctgatcttgctattgaatctatacgtggtttaagaactagtttgcattttgcaatgatggaatcaagaaataatgtattaatgatttccggagctagtccaaatgcaggtaaaacttttgtgagttcaaatctatcagccgtaattgctcaggccggcaagaaagttctttatattgatacagatatgaggaaaggttacgctcataaattattcaaaactaacaatgataatgggctttcagatattttatctggcaaaatagaagttcaaaaggctgtaaaaaatattgatgaggctgggtttgattttatttcaagaggtgtagtgccgcctaacccggctgaactattaatgcatcgacgctttggagagttagttaattgggccagccagcattatgacatagttatactggatacgcctccaatactagctgtgacagatcctgcaattatagggcactatgcaggaacaaccctcgtggtcgcgagatttgagacaaatactgctaaagaaattgatgtcagcgttaagcgcttcgagcacagtggtgttattgtaaaaggatgtattttaaacggtgttgttaaaaaagccagtagttattatggatatggatatagccattacggttattcctactctgacaaaaacaatacaaattaa

SEQ ID NO: 182075 - DNA, 135 bp, Klebsiella oxytoca
atgctctttggccattggattaataagagagacattcccgatccttatcgtaaaagtgaagaagcatttatctctgtttataatttaattgaacaggctgcaaatggatgggtcgagaagcttgactctaaataa

SEQ ID NO: 182076 - DNA, 849 bp, Klebsiella oxytoca
atgtcagaactgactctcaccgaaccagaagtgttaaccgacaataccgacgtgatttgttcaaccagtattgaacgcatcgtcagcgggcgtaacgccgcactggcgcagattgaagcgctgatacaacaactcaatgatatctcgacgctgacccgcagtatcggggggaaagctgccatcgactgggccatgaaacaggactttcgctgtggctgctggctgatgggaaaaccagaagcagccatgaaagccattacccgcaatctcgatcgcggtatatggcgagacctgatggagaagtcgggtatgctgagcctgatggacgcacaggcccgtgacgagtggtacaacagcctggaaaaggacgatattcctgcagtcagtgaagccaatattctgagcacgtttgagcaactgcatctgaataaaggcgaggtgtttgagcgcggagtgattaatgtgttcaaaggcttaagctggaattttaagacgaactcgccctgcaagtttggggtgaaaatcatcgtcacagggctggtcaaattcgacaggtgggggtttgggctgaactggggcaggcagcgcgaccgattagctgatcttgaacgcatgctgatgcttctggacgggaaaccggttcccgacaatcgcgctgacgttatccgtcgtctcggcgatcatatccatgagaacaggcacagcaaccgttacgaggatgagatgtttgcgatcaaatactttcagaagggaacagtccatatcatgtttaagcggccagaactggtcgataagctgaataacatcatcgcccgccactaccctggcatgctggcatccagacggtag

SEQ ID NO: 182077 - DNA, 492 bp, Klebsiella oxytoca
atgaaactctctctgacaatggaagcggatgccatcaacgtactggccctcaatataggccggatcgccgtagatattgacgggattgaactggccgacctgattagtgagatcagtgataacggttattcgcttcgtgttgctgatactcccggaaagctggtttttgaagatccgctaccacgtactgcccgcctgaacgggatccagtgcagtaccgcgcatatcacgtgtgaagataacgctatcctcgaccacgtcactcttcaacgccatgacggcggcaacagcgactggatactgtacaccggctacggttacctgctcagacttaacgctcgcttatacccggtactggaactaaagagaatggggctttcaaagggctgccgtatgttagtgaccacgctgatacgacgttacgggatcgatatgctacatctggatgcagcgggtgatctgttgccgggttttagcaccttcaactggtag

SEQ ID NO: 182078 - DNA, 378 bp, Klebsiella oxytoca
atgaaaacacgatctgactcccccacacgggcggcatcgtcacgcccgtctcccgttgaaatctggcagactctgctgacatacctgctggatcagcactacggtcttacgcttaacgacacaccgtttggccacgacggcgtgatccaggagcacattggcgccgggatcgccctgtatgatgcggtgaattttatcgttgaaaagtacgaactgatccgtctcgatcgtcacggtttcagcgcagacacacagtcaccgcttatcggcagtatcgatatcctgcgggcccgaaaagcgaccggactgatgacccgtcatgactacagagcggttaccgacatcacgacgggtaaatacagtgaggccgggcaatga

SEQ ID NO: 182079 - DNA, 360 bp, Klebsiella oxytoca
ttgtctcatacaacccccgtaacaactcatgatgctgcagagccctggtgggggctgcaacgccatgtcaccccctgttttggtgcgcgactggtacaggagggcaaccggctccattacctggctgaccgcagcaatatcagcgggacattcagcgaggcggatttgcgtcatctcgaccaggcctttccattgttgttaaaacaacttgaactcatgctgacccgcggtgagcttaatccccgccatcagcacggtgtcacgctgtatgcaaaggggctgacctgcgaagccgacaccctcggctcacacggttacctttacctcgcgatttacccaacgttgacaacaaccgcataa

SEQ ID NO: 182080 - DNA, 222 bp, Klebsiella oxytoca
atgaaaattatcagtaaacgtcaggccatggcgatttaccgtcagcatccgcagtcccggctgtttcgcttctgtaccggcaaatacacatggtcaggcagtatctgccactacgcaggccgggacgttccggatatcagcggtgtgctggccgtcttcgcggaacgccgccaggaccgcaacggtccctatgtcatcctgcgcagcgtaaccctgaattaa

SEQ ID NO: 182081 - DNA, 480 bp, Klebsiella oxytoca
atggaacaacagttacctttatttgcctcagaccttccagcctctgcacagcggaccatccgggaggcactcaccctgctggaacgtcagctacgcgaacccggcgcgtcatttacctccagccacgtcgtccgggactggttacgcctgcagcttgccacacaggaacgcgaagaatttaccgcgctcttcctcgataaccagcaccggctgattgcgcatgaaaccctcttcaccggcaccatcaaccatacgcaggtccatccccgggaggtggtgaaggcagcactgaaacataatgctgcagccatgctcgttgcgcactgccatccttcaggacatgcagagcccagcgatgcagacagacggatcacagaacggcttaagcaggcgctggctctggtggatatccgcctgctggatcatctggtggtgggcggcatggaaatcgtctcgctcgctgaacgtggctggctgtaa

SEQ ID NO: 182082 - DNA, 465 bp, Klebsiella oxytoca
atgaataacaccaaaaatctgcaaacatttccagacaccgaaaacgccagtcctctcaccgccacgttactgcccgatgagcagcgaatcggcttctggccacaacactttggctccatcccacagtggataaccctggagccacatatattcgcctggatggaccgcttctgcgcggattacagcgggggcatctggaacttttacacactcagtaatggcggtgcgtttatggccccggagcccgatggtgacgacaatgaaaaatggacgctgtttaacccgatgaacggtaacggcacggagatgagcccggaggctgccggtatagcggtctgtctgatagcttacagccaccatgccatgcgcaccgaatgcgatgccatgacagaacactactaccgtctgcgtgaccacgcgctcaaccatccggaatgcagcgccatcatgcacatcatcgactga

SEQ ID NO: 182083 - DNA, 819 bp, Klebsiella oxytoca
atgcgattagccagccactttggccgtatcaaccagatccgccgcaaccgcccgctgacccacgatgagctgatgctccatgttcccagcgtcttcggcagcgacaaacacacctcccgcagtgaacgctacacccatattcccaccatcactctgcttgagaacctgaaacgggagggctttgagccgttcttcgcctgtcagacccgcgtcagagaccagagtcgccgcgagcatactaaacatatggtgcgcctgcgacgcgcagggcagatagccgacaaacaggtgccggaaatcatcctgctcaacagccatgacggcagttccagctaccagatgttgccgggattattccgcgcagtctgcgccaacggtctggtctgcggtcagtcgtttggtgaagtcagggtgcctcataagggcgacgtggtggaaaaagtcattgagggggcttacgaggtactcggggtgtttgaccgggtggaggagcaacgtgatgccatgcagtcactgcagttaccaccaccggcgcaactggcgtttgcgaaagcggcgctggcctaccgatttggcgaagagcaccagcccgttactgaatcccagacactgagtgcccgacgctggcaggacgagagcaatgacctgtggaccgtctacaaccgcctgcaggagaacctgagcaaaggcggactgaccggacgttccgcgcagggtaagcgtagccgtacccgcgccgtcaacggtatcgacggcgatatcaggctaaaccgtgccttgtgggtgatggcagaagaactgcagcaggcactgagctga

SEQ ID NO: 182084 - DNA, 276 bp, Klebsiella oxytoca
atgacacacactgacgatataccacttcctcccggcccgttcacccgggcacaggcggacgccattgcagcaaagtacaccaacgtggccattgaagatgatcagggcacccactttcgtctggttatccgcgataccgacggcatgcttatctggcgggactggaactttgccccggaggccggagtaatgctcaaccgctatattgccagccatggtatcccaatggcacccgctgctggcatcaaggcatgctcgtccccactatcgcaataa

SEQ ID NO: 182085 - DNA, 213 bp, Klebsiella oxytoca
atgaccattctgaacatgctgatagccgcactgggacaggccctgtcctggtggggcagccaccgggcccggcagtttatcgagcgttgttttcgtcaggccggttatgacgatgacgccctggataatgcccgggaagcggtgaccctgctggtcacggcgctgatgaccgcgctgatgacacagatactccggttactgggacgcacctga

SEQ ID NO: 182086 - DNA, 363 bp, Klebsiella oxytoca
atgaaattccctctgtctctgctgtccgcgctgttgtgttgctcagtcccggcaatggcagcgcaaccccctgttcccgtcaaagtcgaaaccagcaaccatgtccacccggcgggcacccgctatgccaccgtggtcgtgacggcacgggatgacaccgtgaccgtcaaaaacatcgacgtcaaccgcggtcactgtcgcattgataaccagaaatacctgtattccagtaaaaaggacaccattctgcccgccaccctgcagtacggtgagtcggtcaaagtgaatttttataataactgcgtggcctccgaagtggtggtcaccacggataaaggtgcctggcgcatcacctacgactga

SEQ ID NO: 182087 - DNA, 468 bp, Klebsiella oxytoca
atgaatatgaagaaaacagggctgatggccctctgtctgaccgcgctgctccccgtcacgtcacacgctttcggtaatcctgacacctggacccgcggctggggtcagggagtctcagagtttgtcatcaccgggaagggactgtcacagctgttgttgtcctgtgaggatgagggcctccgagcggccaccatcaccctgaccgatgcccggggacgccaggtcagtatggatacagatgccgaactgcaggtcagaatcgaccagcaggagcccgtcgatatcagtgactcaggtagccgggtgggtgagaacaatctcgattttgcctggggtcagttgcgccggggtaaacaggtgacggtctccggaaccggtgttacccccaccaccttcacgctgaagggtgcccgcgaggtactgccggcattcggcacgcatggctgcgtctccgccgcatcggtctga

SEQ ID NO: 182088 - DNA, 312 bp, Klebsiella oxytoca
atggctctcattattaagtacttcattatcgcgctggtgattgcgctggccgttgtgctgtttaacgtgttcagcgccaccggcgaaatccgcagcttcgggcaggggctgggctatttgttctggatgacccttggccccggtgccggcatgaccatcggggcggcactgcgccagtggctgatgccggatgcggtatacaccagtgaaggcatgaccgggatgctgaaagcccgcctgttctggctggcaggcccccagagcctcggctggctggccgggttaatggtggtgggaaaacagctgatgtaa

SEQ ID NO: 182089 - DNA, 276 bp, Klebsiella oxytoca
atgtacaccacacaaaagaggtcatttacagggtggcttccgggtcttctgctttcagcgcttttcctgagtggctgcggcgacaaaaccgaacgcgaatttatccgcggttgtcaatcaggtggtggaaccaccgctatctgcggctgtatttacgatgaccttaaaacgaaatatccctccggagagctggagaaaatgaaccagcggaccggttatgtccccccggggtttatggacaacatgctgtctgcagccagacagtgcagaaaataa

SEQ ID NO: 182090 - DNA, 1455 bp, Klebsiella oxytoca
gtgagtcatttatatacgtcaggtttattacatggaggatcctctttccctctggagtgtgtaccggacattatccgtgatgccatcaacggtgcggccagtaaaaccagggcaccggtaccgctgatttttgcatccgccatggcgccggtttctctgctgtgtcagggactcacggatgtcagtccggctgaagggctgaccttcccggtatcctgtaatttttgcaccatagcggaatcaggagagcgtaagtctacggtggataagctttttatggccccggtacatgagttcgaatatgaggccgggatacggtacgaaaacgccatgcaacagtatgcgactgaactggatatatgggaggaagaactgaaggcgctgaaaagcgtgttgaaaaaacagacaaaacatcaacaaccactggaggagataaaagaacgtatccgggaacaccggagtgacaggccggaggagccggcacgggaacaactgctcggcagtgatatcactccggcagcactgcagtatcagttgtacaaaggcggcggctcaatggcgttgcattctgcagagggcgatatcattctgggtgggcaggccatacagaatctggggatgcttaatgacctgtgggatggcgctccttttaccgtcacccgccggagctcagaaagcttcaccgtccatgacgccagactcagtgcgagtctgatggttcaggatgcgccgctgcgtaagtatttcagccgggcacagcagcaggccaggggcagtggctttcttgcccgtttcttttttgcccgcccggagagcgctatcgggacccggacgggtcacactccggagaattaccggcaattactggtgccgtatcacggacgtctcggggctttactggaggcttattcggctgaaaccgcaaaaaacgccccgtctgatcgacagaagctgacattcacgccggaggctcagttgcggtggatggatatgtgtgactattttgaacggcagatggcagaaaatggctggtattaccatttacgcgattttgcttccaaagagggaaacaaggtggcgcgactggcagctctttttcactatttcagtggtgctgaagggaatatcccggaagctaccgtgatgagtgcacagaaaatcagcgaatggtacctgaacgaggcacttgccctgttcggcccggtaccggaggtgccgcagcatattcaggatgcagagttgttatggcaatggctggatgagcattttatggataataacggtcagcctttaaagcgtagctgggccaccccccgcgtaccccaaaggatccgttattccgggcgactgcggccggcgttacagtatctttgtcagatccagcgcattacgttctggcgggagcacaagacgacatggattgccccttacggctggatgccgtatgcccgctga

SEQ ID NO: 182091 - DNA, 1023 bp, Klebsiella oxytoca
atgcaggagaccggaaaagcgaaacagccagggcagacacacgctcacccggactgctattaccagcagttattacatcaggcccgctgccggaagaatatcgccgtcagacccgaggagctcgcctggtttgatatcggacattatcaatacgtgcgtcacctgaccctgcgggagctcatgaccgaactggtggtgcggggaagcctgtgtaccgcgcctgacatcgtgacatgggacggggcggtgctgggaccgggtgaggtctttcagacctgctacccgaacatcattgcgggtgagccggcgctgcacaagctgtttatctctcatgagaagataccggaactgaattaccttcgccccactgaagatgttgcttctccggcgctggacctcccggtgcgggagctgagtatcggtgatatcgacgcctgctatcatgcgttgtctgcggcggagacggacgaggcgacattttcgctggaaacatcccggcatccctgttacctcgggcatatccgtaaaagcgaactcgagccggagacccggctgacgcgccttcagacacaggcttttggcagtcatattgagcagatatacctggcggtggacccttccttctcaaagtcccagcttatcgatgcgttcagcgcgttattaactgacctcgataaccagtacgggttgtttacaccgtctgccgcgcgtcatggcgggttacgcaaaaaactcctttacgatatccaggcatgccacctcattccgttgattgatttgctgctgtggcaaatcaggaacggaaagatcctcccgttaagggttgtcggtaatttgctggaaaagcgtccctttgatgcctcgtcagccagcacgggctattccgaaaccaatttccgcaaccgttatctgaggaccttcaatcaggtgatgaaccagggcaatcccggagagatactgagtcggctgctggagaacacggatgattatgatgcatcgtattatgacaccacgcatgcctga

SEQ ID NO: 182092 - DNA, 204 bp, Klebsiella oxytoca
atgaaagacgataagctgaacgagagcaacccactcaaactggtggacttaaaatttatctgtgaaaataccgggctttcccgggcgtatatttacaaactgatgagtaatgacctgttcccgaaacccctgaaactggggcgtgccagccgctggtacctcagtgaactcaggggctggctggagagtcgtgaaaggatgtag

SEQ ID NO: 182093 - DNA, 1011 bp, Klebsiella oxytoca
atggacattatcaccgacagttatctggattttgagtcaagcagtatgcatgatgctgaccatgatactacatttattattactgaagactgggatatcgtgcagacacaacgccagctgctttctgtgttaaataaactggtcaatgctgacactgaaatattcaggcttacgaaatccgggcgttataataaaacaggttatttgcttcaggaagccttcagcgcactggctgaactggagggctgtatcagtgagtgtcagcagttacaccccacgatacagctcttcagtacgatccttaaagcctccggtctgactgcgctacccgagtccggtgatgatgtaatcaacagcctgttgaaacggtttcgggaagaagcacaatcagtggcccataagcgacggctacgtaacttccagcgggcagccagtaaaaacctggcgggtgcattatcttatgtagacaacctgtttgagcatcatgcccgtttgctggtcgtccgtgttgatttgtcctggcagaaggacatggtcaggcataaaaccatttctgcagacctggtccggctgcatcgcaggcgcttgtttaagcgggtacagtcactccctttgtttaagcactgtctggggtatatctggaaacttgaatacgggcagtacaaaggatttcactaccatacgtgctttttctttgacgggagtcaggtcaggggggatgtcacactggcccgatgcattggagaatactggaaaagggaaatcacagccggtcaggggctgtactttaactgcaatgcgatagcgagtacttacgctcagtcaggcatcggtgacattcattacacagacctggcgaagcgtaaggtattacagaaggttatcacttatatcgccaaagttgataccgctgtgcgtttgaatttaccggagggggcgaggacattcgggcgtggcgaatgtattgtacagatcggagaaaaacgggggcgttcacgctcaggtaaataa

SEQ ID NO: 182094 - DNA, 726 bp, Klebsiella oxytoca
gtgaaaagagatatccgatcaataaatttcaatctcattaaacttgaccaagaaaatgtcaggtttggtggcgatattgcacaaaatcaacgtgaagctattgagttgatgcttgcagaccctgaagatgcaaagaaaattctaaaattggcagagcacattgctctttatggtcttgatcccacagaattacagcttgtaactcctgatcatgagggaaactacatcgtgcttgaaggaaacaggcgattaactgcgttgaagttgttacaacgtccagatttgtgcacacaagaaaaatactacagagattttctggctgcccataatgaaattgtaaggaacttccctaacgaaatcgaatgtagtgtagttgctactagagaagatggtgatgtttggatagagctgaaacatactggtcaaaacggtggcgctggacgtgtaccgtgggatagtgatattcgtgatgagcgccgagcaaggcaaactggtgttgaatctatagggcgacaaatacgagagattgtccgagataatcctgcaatatttaatgaaatagccatcagcgacatttatcaaatccctgtaactacactcacacgtctttttgcttctaaaagggctcaggatgcctttgcagtatttatcaacggggagcaggtcatcgtttcatcggagttaagaatgttatggatgagttcctcacattccagttgcttttga

SEQ ID NO: 182095 - DNA, 882 bp, Klebsiella oxytoca
atgagaaacgcccacgatatacttgacaatattgtatacgactttgccaatgccaccggtctgggttctgttgccgtagatctgaatggcaaagagatatccccatggtataattttacttctttctgccagcaagtcaggcaaatcgcagcttaccatccctattgccaacaatgcgatcgctgtggtggttttgaaagtacgaaagcaaaacagattcaatgttatcgctgtcacgccggactcgtagatttttccattcctattttcattaacggtaatctgacagggtttgtttcttgtggacaagcacgtgttgcagaaaacttaccattaccaaaaatagtggaaaacgataaaaacttaccaacagaatcaaaacttatcgaactatatcatgaggtgcctgaactgagcctgatgaaaatcaagtctgctgcacagctcctgaaccttattatagagaactaccttagtaaggaatataatttacgtatagtaaaaaatgtcagtcctgttaaaaatcagaaactggagacattgggtcgacatcaggcaacaatggaaatgatactcaatcacataaatcagaatttttctgacaatctcaatcttgaacaaatgtccgccaaagcaaatctaagcatgttttatttttcccgaacgtttaaggagctaacaggaactggcttcactgcttatttaacaaataaaaggatgacggaagctcattgcctccttgaacaaacaaactggagtattgaaaaaatagcacggagtgtcggttataatgatgtccattatttttcccgtctctttaagaaaacgttcaataggtctgcatcagaattccgaaatcattcttcaggcttttccgtgtaa

SEQ ID NO: 182096 - DNA, 1113 bp, Klebsiella oxytoca
atgtccctgttcacggtaaaaacgcgggtatatagcggagccgacagtttagcctggctcagaacgctccacggtaaaaagatctggattgtctgcgatggttttctggctggcagccccaatctgaaaatggtcaccgacaatatccacgaggacaacactgtcggtctgtttagcgatatcatccccgatccgcctatcgctacagtggcggctggtattgaggctatgagtgcgatacagccggatgtagtgatcggtttcggcggtgggtcggcactggattcagcaaaggcgataattttctttggccgcaagcttggcattatggttgagaacttcgttgcaatccccactaccagtggtacgggttctgaagtcaccagcgccagtgttatcagcgatccggccagcagaataaaatacccgttgtttgatgacagtctttaccctgatatagcgcttcttgaaccgcgactggtgctaagcgtaccaccagctgtaacagccaataccgggcttgacgtactgacgcatgcacttgaggcatatgtggccaaaggcgcaacggactttactgatgcactggcagaaaaagcagcacaactggtcatcagtttcctgcccgtcgtatatcgggacggtaatgaactggaagctcgaacccggatgcataatgcttccacgctggccggtattgccttcagccaggccgggctgggaatgaaccatgccattgctcatcaactgggtggtcaactgcacataccccatggacttgccaacgcgctgttgctgtgccacgtgatccggttcaacagtcgtgatttagccgttcgtgcaaaatatgcacggttaagtaaactgtgtggcctggcaaacttccattcggcggatgagtattgtgtcgcgagtctaatcacccatctgcacaatctcatgaagcaggttaatgtcgcggacaaccttagcgcattaaacatcactcgcgaacaggtaacgactgctgaaaatgccatgattacagccgctttacaagatgcctgtctatccaccaatccggtaaccgtatcggatacggatatacgtgctattcttagagcgattatatag

SEQ ID NO: 182097 - DNA, 1395 bp, Klebsiella oxytoca
atgaataccattgaactggagaatatgatccgcaatattcttgctgataatctgaaagggaccgctactgcccctggaaacattcagcacactatcttcgctcgtgtggaagatgctatcactgccagctacgatgcctataaaaaatacatggcagaacctctggcacttcgaaccaggatcattacagccctgaaggaagagctggccccctggatcaaagagatgtccgaacgcgccgcagaagaaaccggcatgggtaatgcacccgacaaaatcagtaaaaacactgcggcactgaataatactccggggattgaggatttgaccacaagcgccctgactggtgatggtggcatggttttattcgaactatctcccttcggagtcattggcgctatcgcccccagcaccaatccgaccgaaactatcattaacaacaccatcagtatgctggccgctggtaatgctgtctacttcagcccccatccgggcgcaaaaaaggtatccttgtggcttattgaaaaaatcgaagacatcatttatcgggtaagcgggatccgcaatctggttaccaccgtagcagagcccacctttgacgctactcgcgaaatgatgtcagatccgcgcattgctctgcttgcggtcacaggtggtccggcaattgtcaatatggccatgaaaaccggtaaaaaagttatcggtgctggccctggtaacccccctgtactggtggatgagactgcctgtccggtcaaggcagccaaagatatcgttgatggtgcctctttcgatcataacgtcctttgtatcgccgaaaaatgcgtcatcgtagtagatagcatcgccgatcgcctcatggataatatgcagaaaaacgatgccttcttggtaaaaacgcccggtgatattgccaaactgcgcaaggtcgttatcaatgacaaaggagaagcaaacaagaaactggtaggtaaaagtccggcagtgatcctgcaggctgctgatctgaacacatcaacagcaccgcgactgattattgtggaagtggagcaggacgatccgctggtgatggtcgaacaattaatgccagttctgcctgttgtacgggtcagcgatttcgagaccgggctggcactggctctgaaggtggaaaacgagcagcaccataccgccataatgcattctcagaatgttacccgtctgaacctggctgcgaagaccatgcagacttcaatatttgtgaaaaatggcccttcctatgccggactgggcataggtgccgagggttttaccacctttactattgcgacacccactggcgaagggacaacatcagcacggagcttcgcccgtaaacgccgttgtgtgctgaccaatggattttccatccgctaa

SEQ ID NO: 182098 - DNA, 510 bp, Klebsiella oxytoca; identical to SEQ ID NO: 150251

SEQ ID NO: 182099 - DNA, 279 bp, Klebsiella oxytoca; identical to SEQ ID NO: 150252

SEQ ID NO: 182100 - DNA, 480 bp, Klebsiella oxytoca
atgctggacatgatcgtctcaagggtcattacacttttacagggaagggaaagccggagtttacgggtgacccaggccgagctggcggcaggcttatcaaaaacggtttatttgcataatgcacaactgatattgcccttacctgatctggcttttattcagagtctggttgcctatgatcaccaccacccggcagtggcgactgtcctggaagcatgggcatatggcgtaaggttacaccttcagatccaccagcaattactgaccgcactgccactgcgagagttacgccgccttccggtcacactcactgaccatatgagtacaccggtgcaactggcagctgcagctggcctcagctatgccagcgttattcactggcacgattgctgggttttactggaaaagcagacgctgattaccgccctcgcccgggaagtaatggaaagacagaacatcaaactaatatggcaggagtaa

SEQ ID NO: 182101 - DNA, 636 bp, Klebsiella oxytoca
atggatcacgatctgatcacaaaactgaccggtcaggtaattgcgcagatgcggcaacgaacgattccgctgggtatatcaaaccggcatgttcatttgtcggaaaaagattaccagagtctgtttcccgggcagactctgaaaattaaaaagccccttggtcagcccgggcaatttgcggcagagcagaccgtttccttaatcggtccaagaggtcagttgaaaaacgtacggatactggggccgttgcggggacaaacacaggtggaaatctcgtacaccgatgccaggcaaattggcctgacggcgccactccgcctgtcaggtgatctgaccggaagtgtctctgtcacactcaaaagcgagggcggagaaattaatctcaccgagggagtaatcatcgctcgcagacatattcatatgtcgccactggacgctgcaatatttggcgtaacacaaggagaaacggtgaaagtcgggattgagggcaccgatcgaaaactgatttttgatgatgtctgtatccgggttgctgaggatatgcgtcttgaaatgcatattgatactgatgaagcgaatgctgccggtattgatggaggccaggcagtggcaagacttctcctgacaaaacgctaa

SEQ ID NO: 182102 - DNA, 867 bp, Klebsiella oxytoca
gtgcaacattctcttggccttatcgaagtctcgggtatgtctctggcgataactgttgctgatgtgatggcgaaaactgcccagatcagactgatcggcgtggaaagaaccatcgggtctggctggatgctggtgaaaattgcaggcgatgttgctgcagtgcgtacggctctatcggccggagaagaaacagccagagcacaccagggatttgttgcctgcaccacaatcgcccggccagcaaaaggaaccggtgaactggtttcaacaactaaaccgccccgagctgagcctgttcagaagataaccgctctcccggccgttgccctcacggcatccgccgcccataccacaaccggacctgaatccgttcaggaggatccggacgcagaaaaggcagtccccccgatcagggaggctgtcgagggaagcacagacaatatcattcaggtcgatgctatcaatgatcctgtggaaacggccagggaaatcagtaaaccaaacgcttcagcaaagtctcctcctgctgaatatggtgaaaaacaatctgtggcgacggtcaaagcatttccggtcatgggagatatcgctgctgaccacgatattccgacagcgtcagcgagatccgttgccgttgcgcagcaggtcaaacccggaatatctctgcatcagtttcattatcaggaaaaacctgatgatgaaactgcagatgcgggtagccaacagacaggtgaaacaaaacaggctgtcgccatatcagcaaaattactggtgacatgcaaaatctgtggagatccttcatgtccgcgacataagggccagccacgcagtagatgtattcacaatcagaaatcggtattgaggtaa

SEQ ID NO: 182103 - DNA, 291 bp, Klebsiella oxytoca
atgaacaatgcgcttggaatgatcgaaacctatggactgattggcgccatcgtaggtgcagatgccatggtcaaatcggcaaacgtccagttggtgggttacgaaaaaattggttccggcctggttaccgtcatggtacgaggtgatgtcggtgcggtaaaagcttcggtggaggcgggctccgcagctgcagccggtgtgggccaggtgaaatcaactcacgtcatcccacgtcctcataatgaggtggaaacgcttttgccggtttatcagaccgcaacagccgagtga

SEQ ID NO: 182104 - DNA, 828 bp, Klebsiella oxytoca
atgaacacaaccttaccgacattaaagcaggagtgccttgccgaatttctgggcaccggactctttctgtttcttggtatcagttgcctcgcagcgatgaaactggctggcgccagtttcggtttgtgggagatctgtattgtctggggactgagtgtcgcactcggtgtttacctcactgcgggaatatccggagggcatcttaatccggcagtcactatcgcattgtggcttttcggcaatttcagtgcccataaggtcttaccttacatcctgtgccagattatgggcgcttttggcggcgccatggtggtctacctgctttaccacaatctgtttattgattatgaactaacacaccatattcaacgcggcagcatggacagccttgcagaggcgggtattttcacgacgtttccccatccggaaattaatctgcttcaggcttttgccagtgaaaccatcggaacgctgacgctgatgtgcctgatcatggcgcttaccgacgacggcaacggtgttcctcgcggtccgctggcgccgctactgattgggatttccgtggccctgattggggttgccatcggtgcactgacgggttttgcgctgaatccggcaagggatttagggccccgtctgttcagctatctggctggctggggtagtaatgctttaacaggcggacgtgcattcccctacttcattataccactcgtcgcaccgatcttcggagcctgccttggcgccgcgctgtatcgcggtctgaccaggttaccacttctgccgggcaaggggggccagggaaaaagtctgtcgctgccggaataa

SEQ ID NO: 182105 - DNA, 921 bp, Klebsiella oxytoca
atggcggaaattgattacgcgcagactggcaccgtatttaatatacaaaaattctccttacatgatggcccgggaatacgcaccattgtattcctgaaaggctgttatctggcatgtaaatggtgcagtaatccggaatcacagcatactgaaccggaaatattttactacgatcgcaattgtatccattgcggacgctgcgtatccgcctgccctgttggggctatcgatgcctcacgtcaagggcttattgaccggaatgcctgtattcattgtggagcttgcgctgaggcctgcccggctggtgcgatggttcagtcaggtaagagaatgtcggtggtggaggttatagacgaactgcgtaaagatgagacgcattaccgccgctccggtggaggtattacattgtccggtggcgaggcactggctcagccagcatttgcagcagcattgctggccgcctgcaaagccagaggatggcatacagcgatggaaaccaccggaatagcctcccgggccgtgctggaaaaggttatcccattgcttgatatcgtattgctcgacatcaaaaccttttatagtgaacggcataaggaatttacgggacatccgaatgagacggttttacgtaatgcactgacaatttcagaactggcaaagaatgtcgccgttcggatcccggtaattcctggatttaatgatgatgaacaaagtatcgaagctattgccagatttgttacgcacatgaaaaatgtatcgcgattacatttattaccctatcacaactatggccagaataaatataacctgcttggcagaacgtacgacatgattgaaataaaaccaccggaagaaagtcgtatgcataaatataaagatattgtgacatccctaggaatcgactgcgtcatcggtgggtaa

SEQ ID NO: 182106 - DNA, 2544 bp, Klebsiella oxytoca
atgagccaaatatcacaggcttttggtgaaccaactgaccgaatttgtgccttacgggaacaaatccttgatacgaccccctgcattgagacggatcgtgcccgcctgatcaccgagtcctataaggaaacggaatccctgcccatgatcatccgtcgtgccaaagcgcttgagaagatccttgcggaattgccggtcaccatccgggcaggtgaactgatcgttggtagtctgacggtcactcctcattccacacaaatttacccggagtactcaaatagctggcttcaggatgaattcgatcgtctgaatctgcgtaaaggtgaccgttttaccataaccgatgaagcgaaacagcagctggatagcgtatttggctactggcgagggaaaacgacgaatgaactggctacatcctatatgttgcctgaaacgcttgattgcatggcagaaaatgtcttcactgtcggcaactattactttaatggcgtcggtcatatagccgtggactacgcgcgtgttctcgctcgtggatacaaaggcatcatccaggatgttgccgccgcaatggccagtgctgataaaaaagaccccgcttttctgaaaaaagaatcattctacaaggcggtcattatttcctgtaacgcagcaatcaattttgctcatcgttacgcggttaaagctcgtactctcgcggaacaggcctcaccagtccgtaaaaaagagctgctgaaaattgctgaaatctgtgacaaagtacctgaaaatggtgcaagtaatttctatgaagcctgccagtcattctggtttgcccatgccattattcaacttgaatccaacgggcattctatctccccggcgcgtttcgatcagtacatgtacccttacctggaaaaggacagctccctgagcgaggaacaggcgcaggaattgctggattgtctgtggctcaagttcaacgacgttaacaaggttcgtgatgaaggctcgaccaaaggttttggtggctatccgatgttccagaacctgatcgttggcggtcaaaccagcggcggacaggacgccactaacagactgtcctttatggccatgacggctaccgcccatgttcgtctgcatgaaccttcactgtcagtacgtgtctggtcaaaatctccggacgatttgttactgaaagcctgtgaagtcagtcgtcttggtatggggatcccggcctattacaacgatgaagttgttatccctgcattgattaaccgcggcctgaccctggaagatgcgcgggaatacggcatcatcggctgcgtcgaacctcaacgtccgggaaaaacagaaggctggcacgacgccgcgttctataacatgagtaaggtactggaaataaccctgaacaacgggcgctgcggggataaacaactcggccccaaaactggtgagctggattcattccagagtattgaagacatcattgaagcttatcgtaaacagaacgaatattttgtctatcatctggcaatggccgataacagtgttgaccttgctcatatggatcgggcccccctgccgttcctgtcctgtatggtggatgactgtattagtcgcggtaaaagcgttcaggaaggcggtgcccattataacttcacgggtccccaaggtgtcggagttgccaatgtgggcgactcgctgatggctatcaaacgtctggtatttgaagaaggccaattatcgttgggtcatctgaaagaagcactggatgccaatttcggtgtatctggcgggatagagaaacctgacactatagccactgaaagtgcgccgaaacaggatgcaacctatgaactagtccttgaggccgtgaagaaagtgctgggcgaaagcggcgcacttgcactcacctcactcaatagcaacccaccggagcctgtcaaaggggctgatgccgggctgacagcagtgcgtcagttactcattaatggcgcccccaagttcggtaatgacattgacgaagtggatatgctggcccgtactggtgctgaaatttactgtcgcgaggtagaaaaatacaccaacccacgtggcggtttattccaggctggcttatatccggtatccgctaatgtggctctcggtgagagcgtcggggcaactccggatggccgtctggccggccagccgcttcccgatggggtgtcgcccagcaggggcatggatacaaaaggtccaaccgctgccgccaactcagtagccaagctggatcacttcctggcctcaaatggcacgctgtttaatcagaaattccatccggcagctctgaaaggcgatgagggattacaccatctggcggccttactgcgtggttatttcgatcagaaaggcatgcatgttcagttcaatgtgatcgaccgtaatacactgctggcagcacaaaaagaaccagaaaaatatcgtgatctggttgtgcgtgtggcgggttacagtgcgcaatttgtctcactggataaaagcgtacaggacgatattatcctgcgaaccgaacatgtcttttaa

SEQ ID NO: 182107 - DNA, 816 bp, Klebsiella oxytoca
atgagtagcgataacctcgtagaaaatattatcgccgaggtgctcggaaaagtcggggatttgaaaaccccgtccgccgcatcccagccggggatatctcagcaggagcccgctatcccaagaaaactttgcggtttaaccgagttcgtcgggacggcaacgggcgacagtatcggccttgtaattgccaacgttgacagcgccttgctggatgccatgcatctggagaagaaataccgttcaataggcatccttggtgcacgtactggtgcgggcccacagatcatggcggctgatgaagctgtcaaagccacaaatactgaagtcgttgcaattgaactggcccgcgacactaaaggcggcgcaggacacggttcactggtgctgttcggtggtcaggatgtttccgatgtgaaacgggctgtggaagtggcgctaggcgaacttgagcgtactttcggtgacatttacgccaacgcagcaggtcatgtggaactccagtacaccgcacgcgccagctacgctctggaaaaagcatttggcgccccccttggacgcgcctgtggcgtgattgtcggtgccccggcagcgattggtgtgctgatggcagacacggcgattaaatctgccaatgtggatgtggtggcttacaactccccggcaaaaggcaccagctttactaacgaagttattctgattgtttccggtgactccggtgctgtgcgccaggcggtgcgttctgcacgtgatgtaggtctgactctgctggaaacgatgggtggcaaagcgccttcagccacaaccccctatatctga

SEQ ID NO: 182108 - DNA, 303 bp, Klebsiella oxytoca; identical to SEQ ID NO: 150261

SEQ ID NO: 182109 - DNA, 861 bp, Klebsiella oxytoca
atgtcaatcgataataccaataaagacactactgttaccgaaaataaacgccttacctctggcgaccttagcagtatgtttttaagatcaaacgtccttctggcttcagcaaactttgaacgtgtacagaatctgggtatttgctatatcatgattcctgccataaaacggttgtatgcgccgggtccggaaagaatagaagctcttaaaagacatctggagtggtttaatactcagccctactgcgcctcccccatattgggtgttgcggcggcgatggaagaggaaaaagcaaacggtgcacagattgaagggaatagtatcagtggtgtaaaaatcggtttgatgggtcccttcgcaggtgttggagatcctattttttgggggactatcagacccgttcttgctgccctgggagcctctcttgcgttaaccggaaatatccttggcccaatcattttttttgtattgttcaacgcaatccgtttagcactgaaatactatggtttaaattacggataccagaaaggaagagaaattcttaaggatttgggtggggatcgccttcagaaactgacagaaggtgcatcaattctgggactgttcgttattggcgccctggtttgtaagtggacgacaattaatgtaccgattgttgtatcccgtgtcacacaggcagatggccatgtcacagtaacaacgctgcagaacatcttcgatcagttacttccgggaatgcttcctttggctcttacattgttagttgcaagattgctcaggaagaaactgagtcccctactattgattatgcttatttttgcattcggtattctgggttactgggctggaatattggcttaa

SEQ ID NO: 182110 - DNA, 798 bp, Klebsiella oxytoca
atggaaacatatcaaattattgcactggtcatggtagctgctttagcggggatagggagtgtgctggacgaagctcagacccaccgcccacttgtggtttgtacgctggtcgggatcgttctgggtgatattaaaaccggtattatcttaggcggtacacttgaaatgatggccctgggctggatgaacgtcgggcttgcaatggcgccagataccgccattgcttccgtcatttcaactatcctcgtcattacgacccatcagggcattgggcaaggtattgccatcgcagtcgccctggcagcagcaggtcaggtcttaactatttttatcagaacgatagcggtattctttgtccacaaggcagatacctatgccgagtccggcaatattcgaggtatcgagttcatgcatatcagtgcgctgtcattacaggcattacgcgttgcactccccacgctggccgtactgatgcttgatgttaccaccgttcagaacgttctcaacagtatcccggaagtcgtcacaaaaggtctccagatcggaggtggcattgttgtcgttgtgggttatgcaatggttgtcaatatgatgaatgtcagacatttgatgccattcctgtttgcgggttttctgattgcggctttcaccaatttcaatctggttggacttggagggatggggttagttgccgccattatttaccttcaggtaaatccaagattttctgcggccagtaaagcggtaagtagcccatcgaaagcaaccttgtctgatgaagacgatctcgattcctga

SEQ ID NO: 182111 - DNA, 477 bp, Klebsiella oxytoca
atgaatatcttaatttccagaattgatgaccgatacattcatggccaggttgtgactcgctgggtaaaagactatccggcagagcgaattattgtcgtttcagataaggtggctaacgacgagttacgtaagtcgctgctactctctgttgctcccagccacatgaaggccagcgtggtcaccgttgaaaagatgataaaagcatatcacagtgaacgttatgaaggtgttaccgcttttcttttatttggtaatccaacagatgttcttcatcttgttgagggcggagttaaaattccttcagtaaatattggaggaatgatttatgaagagggtcgtaaacaactcacgaaatccgtcagcgcaactcctgaagacatcgcggcgtttaaaaaactgcatgagaaaggtgttcagcttgaactacggcaattaccctctgattccgcggttgatttttattctaaaattgaataa

SEQ ID NO: 182112 - DNA, 429 bp, Klebsiella oxytoca
atggaaatagctattgtcgtcattacccatggttcgagtgccgcgcctctttgcaaaacggcagagatgatcgttggtcagcaggagaatctggccgtactggattttttccctggcgaaaatgttgattctctcgccattaagatcagacagtcactgcccccgttaaacacagataatggtgttttgttccttgtagatgtatttggtggcagtccgttcaatgccgcaatgctcgtaagttcagaacaaaatcactctgatgtagtgagtggggtaaatatcccaatgttaattgattgttttatggacagaaatacggtgcaaaatttctctgaccttgctgatatcgccaaaaattccggtatagccggaatattgagtatgaaccaggacatggaatttaataaccaggaggaagatttataa

SEQ ID NO: 182113 - DNA, 2859 bp, Klebsiella oxytoca
atgaaaagaatcaataaaatacatcagttactgatttcattatctgaagggttggacaagaagaaaattctggaaacacaggggataacgacagaggaactcagtgaggctctgggttatctgcgcagtaatgtcagctttgatctgaataaactggcagaggatggtctggttgtcaaaataaaaaaacgtccggtcaggtttatcgataaacaaaaagttgaaaatttatttggcgtaagtatagaaggaaccgcgatttaccatgatattaatgaaatgctgaagaagcatgatattattcctcctcccggtaagtcagtgtccggaaacgatgttttttccgaaatgataggatgcgatcaaagtcttaaaacaccggttgagcaggcaaaagcagcggtaatgtacccaccctatggcttacctacactcattatcggtgcgacaggggtgggaaaaagtcttttcgcccggcttatgtatgattttgccagggacgaagatttaattaacggcgattttatcctgtttaactgtgctgattattataataaccctcagcttctgataagccatttattcggccacatcaaaggggcatttactggcgccacttcggataaggaggggttaatcgaaaaagctaacggtggcgtccttttcctcgatgaaatccatcgattacccccagaaggccaggagatggttttttacactctggacagcggaaatttttcacgtcttggcgaaacggaaagaaccagaacatcaagattccggtttatctgtgcaactactgaggatcctgaatcagcattattaaaaacatttgtacgtagattgccggcaatcataactctcccagccttacatgccagaagcgcacaagagaaatttgagctctcatgtgctttgctgaaacaagaagcactgcgtgtcaacaaacctatcaccatcgactctgcctctttaaaatccatcataggcaacactcgaaccggtaacgtcggccaaatgaaatccaatattcaactgatttgtgcaaatgtgtttatgcgtgcaatcaatgaagaaagattacatatcaatttcgaggatctgcctttccacctaaaaaaggggatttatgaactcaaccggacatctgacgaaacccgggagcttacaaggctgataaatgatcagattgacattgaaattaaatacattgatacaccaccacaacatattaatgatgagtatgaactgaagtttaatttatatcgtatcattgaagaaaagaatgagactctgactcatctgggagtttctaaagaagatgctttcaaatatatcactattgacattgaacaaagcctgtcattaattactaaaaaattcaacaacagtgaatcatcacgagaaaaactgttacgactggtcagtccggacttactgcactcagctgagaatgttcgccagatggtatctgcaaggttaaatcagtttttcgacgatcgttttctggtcgcgtttagcctgcatctgagtgcatacatggaatcgcgtcagaaaaaagactatcgcccccttacgtttcagaatacgtacgatcaaatccctatcaatattcaaaattgcgcccgagaagttgttgaatacattgaattcgaataccatataacagtccacaaaaatgaagtttgctatattgccctactgattaatgcactcagatcagatagtttctccgaacacgtatcagtactggttattatgcatggttccaccaccgcgacaagcatggttaacgtggtcaaggaacttctcgatgaaaaagaagtgtatgctgttgatatgcctctcgatatgagcccggatgttgctctggaactggtaaagaataaaatccaaaaaatcagcaataataaaggtgtccttttactggttgatatggggtctctggttaattttggagacatgataactcatgataccggaattaaaatccgtaccatccctatggtttcaacaccgttgcttatcgaagcagtcaggaaagccacgttaaatggttcagaacttaatgatgtttatacttcattgcaaaatttccgtggttatgacattactcatacaattcccgcaagtgtcactctcaccacgccctttagctccgaaaaagccagagcgattgtcgctatctgttcaagtggtgtcgggaccgctgttaagctgaaaaagcttgttgaagatattctggaagagtcgggtgatagtgacatacaagtcatcactttgtctctggctaatgcaaatctcagaaaaacagatattcttaaaaaatacaatgtgatatttaccatcgggattaaggatccagaatataacgctccctttgtttctttggagcaaatatttacagcggagggcgagtcaacgataaaatcactgatgaatactggtgagcttatccatcatatacaaaggcaacctacaatgattcgtaacgtactgcatgagtcattacgcgaagtcatgacttttttaaaccctcataaagtcgtggatatcattattgatttcatacagtgtatcgaaaaaatagaatgcaaaaatttttccaccgccctcaaaattagccttggattacatgtggctaatgctctggaaagagtgatattgaatacacaacttacctccacggtcccggcatccctccaggaaagacttgccgaatataaaacagcttcttcattgtttgaacaaaaaataggcctccggcttaatgataccgaactcgctttcgtcatcgaaatgattgatgaattacacagcagcaaaaataattcctcttctgaagcccctgacctttag

SEQ ID NO: 182114 - DNA, 963 bp, Klebsiella oxytoca
gtgattaataagattggtattctcacaagcggtggtgatgcccccggcatgaatgcggccatacgcagcgtcacccgctcggccttatctgaagggctggaggtgttcggtatttatgacggttatctgggactttacgaaaacaggatgatccagctggatcgttatagtgtttccgatgtgataaatcgaggcggaacatttcttggctccgctcgttttccggaattccgtgaagaacacattcggcaagtcgcgataaaaaatctgcaggcgcgtggcataaatgccctggtggtcatcggcggcgacggatcctatatgggggcccattgccttacccaaatgggctttccctgcattgggttgccaggcaccatcgataacgatgtcgcgggtaccgattatacgatcggctatatgactgcactgagcaccgctgttgaagcgattgaccgaatacgtgacacctccagctcccatcaacggatctatatcattgagattatgggaagacattgtggcgatctgaccctttcctctgccatcgcagggggatgtgaatttgttgccgtccctgaaatcgagtttaacccggatgaattggtcaaacagatccatcttggtatttcaaaaggtaagaagcatgcgctggttgttatcactgaacatatgtgtgatgtgaatgaactggcgtcatacattcaggaaaaaaccggccgggaaaccaaagccactattctgggtcacgtccagcgaggcggggcaccggtaccctatgatcgaattcttgcttcaaggatgggggcatatgctgttgaactgttattacagggccacggcggacgttgcattggtatctgcaatgagcagttagtacaccacgatattacagaagctgtgacttcgcttaaacgtccctttaaaagtgactggttggcgtgtgcgcaacggttatattga

SEQ ID NO: 182115 - DNA, 1092 bp, Klebsiella oxytoca
atggtaactacagcgattttcccgggacgttatgtacaaggagctaatgctattgatgaatgccttgcggacgagcttttacggctggggcagcgtgcatttattgtacaggatcccacggtgaataaactcattggcccccgtattgatgcattactggccaataaaattgcaacaaaatcagaggttttttgtagtgaatgctgtgatgaagaaattgagcgtatttcggccttaactaaagcatttgaagcggacgttattgtcggtatcggtggcggaaaaacccttgataccgctaaagcaacaggtgcagccctgggcctgcctattgttatcgtcccgacgcttgcctcaaccgacgccccatgcagctctctggttgtgatttatacccgggaaggcaaatttaaacgctatctgatgatcccgcagaaccccactcttgttctggtcgatacacagatcatcgcgaacgcccctgcccgcttcctggtatccggaatgggggatgcactggcgacctggtttgaagcagaagattgccgcattaaaggggccggtaatatgaccacgcgtcccgggcctatgacagcatttggcctggctcgtatgtgttttgacgtcctgttgaaatatggggtacttgctaaagcagcctgcgaacagaagatggtcacccctgccctggagcatattgttgaagccaatacgctgttgtccggtctcggattcgaaagcggtggcctggctgcagctcacgccattcataacgggttgaccgtattaccggagacacacagttactggcacggagagaaagtggctttcggtacactcgccatgctgatgttgaccgacagggaacctgagcttattgacactgtatacaccttctgtgaatcagtcggtttgccaacgaccctcgcgcaaattggtctgaataatgtgactgatgagcagttgctggccgtagcaacggcctcctgccaggaaggagagacaatgcacaatgagccctatgctgtgacccctgaacgtattctggctgctttacgagccgctgatgcgtatggcgtgcgtcgtcagtaa

SEQ ID NO: 182116 - DNA, 2700 bp, Klebsiella oxytoca
atgagaattgaccgtatttttaaaaaacttcagtcgatgcaggtgccggacggtgttacagcccaggagcttgctgatttactcggttattcaagagcaaatgtcagccatgagctgaataaactgacgttgtccggaaaagtgaaaaaagttcacgggaaacccgttcgcttcttccctgttgagccgcgtcaaagtgaaaaccatcctgtatcagtccttaagtcactgaatacagaaaataaagatatcaagaaaatatccatactggggaaattcagtcaggataatccaagtctgtatgcagcgatagagcaggctaaagcagcggtactgtatccaccgaatggcatgaacattcttattctgggcgaaaccggtgtcgggaagtccatgtttgcagaattactatacgattttgcgaaagacaatcagctggttaaaaataactctaatctcatcgtttttaactgcgcggattatgcaaacaaccctcagttactggtttcccagctattcggcagtaaaaaaggcgcctacaccggcctggatgagaaccgtgtgggattaattgaaaaagcccatggtggaatactgttccttgatgaagtgcatcgcctcccacctgaagggcaggaaatgttttttaccttcattgataaaggcacttttcgtcgcatgggagaaacggatacattacgtcaggctgatgtacgtatttttgctgcaacgacagaaaaacctgagtcgcatcttttgcgaacgtttactcgtcgcttcccgatgattttacgattaccttctctgaaagaaagaactttccaggaaagaaataatcttgtcaacttctttattaatgcagaggctcaacacctgaatgcacccattcatgtttcggcaaacagcctgaatgcattcatgagttatgagtgtgaaaataatattggtcagcttcgtactgatataaaattctcatgtgcaaatgcatacgctgaatatatttcaggtaaaaagcctaacatttcagtagtaagtcgtattctgcctgagcatgtgaaagcagccttgcttgaaaatgttgagcaccggaaggtatggaatggctatatgccagccaaaacctcggtatccatttattatcccgaccaggcctttgattatactggggaattacctgacaacacggtctatgatgccttacacgagttgtttgaaagttcctcgcctgaaagcatgcctgaactggttgatgtcgagaatgcgatcaccacattcttccgggaaaactataatcatgccaataagcactcgaactacaaaatagaaaacttaatcagcggaaacattctcaccctggctgacgatattattacgatttgtgaatctgagttacataaaaacttccgtcctgagtttaagtatgctctcgctaaacacatcgaaagtacgcttgaaagagtcaaagcgaacaaaaagatttatcaccctaatcttaataaaattcgcgtcgaactcccccgcttgttcaatctggcactggattcattacgtttaatcgaacgtcagcttgaagtgaccctgccaatcgatgaggctggttttctggccatgattttactctatgatgaggtcagtaaccggaaagatacgcataccaaagtgatcgttgtgatgcatggtgaagcggcagcatcttccattgctgaaacggctaatcatctgatgggggtgaacattgcacacgggtttaatctgccattagatgttaagcctcaactgattacggacaatattattgacttcattaacagcgaagagcacatctctgatgttctgctccttgtggatatgggttccctgacgcatattggtaacgttatcgaagagcataccggtatcaggaccagaacgctccagcttgtcagtaccctgcatgtcattgaggctgttcaaaaatccatttccggcctgaaagaggatgacctgtataacgaagtgctgaatgtattcagtattcttgatcaggcaacagaaacaattccgtcaccgggtgatgcagaacagaaattggccattctcactatctgtacgtcaggtgaagggtcggcaaaagtactccagaacattattgaggaatcgttctcataccggaaaaattatctggatgtgatcccagttgaattcacagatgcacaacagtttgtgcttgagtatgagaaaattgcatcaacccatatcattattgctgctatatcacctttagagctctctttaacggttccggtatttaacgtcaatatcgtgtcgactgatgccggtatcaatcagttgcagcaattaattgatattgagacgacggctcaactgatgattgaacccttacgcagcatgctgaataatatttcaccgggcgatatccttccggacatccggtatttcattcagcaatgtgcggaaagtcttaacattagcgttaccagcaatatgatcatcggcatttgcatgcatatggcatgtctgattgatcgtctttcatcatcaaaaaataataatccctgtaagcatatggaaaaacctgactcgcctgtcaacaacatactgatgaaccacatcatgccgttatgtgaaaaatattcagtcgttgttaataatgcggagctggacgtcatcgcgaaattttttaaacaatccaacaagtga

SEQ ID NO: 182117 - DNA, 561 bp, Klebsiella oxytoca
atgactgacaccgtactgttatcgattgttgaagaactgcagcagtctgcaaaactggtaaaacaggaagacgtcgacaaccttgccgatctgattgaaaagtcaaatcgtatctttgttgccggtgcgggtcgttcaggttttatggttcgtgcgttcgttaaccgtctgatgcacctcgggtatactgcattctttgtgggagaacccactacgccgtctatccagaaaggggacctgttaattattggttccgggtctggtgaaacgggtagtcttgttaccatggcgaagaaagcggctgataaagaggcaaatattgcgctggtgaccgtttgtcccgggtcgacaattggtaagttgtcttcaaccaccgttgtgctgcccggttccacacaaaaaagtaccctcggtaccggaactgtgaaaacgatccaacccattggctctctgtttgagcagttgcttcttctcgcctgtgaaagcgtcatcctgactatcaaggtacgcaaaaacatgacggatgaggaaatgttctcccgacacgccaatctcgagtag

SEQ ID NO: 182118 - DNA, 636 bp, Klebsiella oxytoca
atgaaattacaacttgccttagatgacctggatttagttaaagcgcttcgtatgatcgagcaagttcacgactcaatcgacatcattgaagttggaacaccgtttgttatcgatgaagggatgcgtgccgtccgcgaaattaagcgtttcttcccggaaaaggaagtcctcgccgacctgaaaatcatggacgcaggctattatgaagcggaactggcattcgaagccggtgctgactacgcgacagttctgggtgttaccgacgtactgaccgtaaaaggctgcgtcgaagttgctgagaaatacaaccgtaaaattgttgtcgacatgatctgtgtcgaagatatgccgggcaaaattgcacaaatggaagcaactggtgcccatattctggccgtacatactggcgccgatcaacaggctgctggccgtgagccgattgatgatctgcgcattatggcgcagcacgtaaaatctgcacaaatgtcagttgccggtggtatcagttcacgtactgcgcagaaatacgtcgatctgaaaccttctatcctgattgttggtacaggcatcacgcaccagaaagatccgcgtgctgaagctgcagctatcaaacagatcatgaacggagctaaataa

SEQ ID NO: 182119 - DNA, 1152 bp, Klebsiella oxytoca
atgaaagcagttcatttcggagcgggaaatatcggtcgtggatttattggtgacctgttacatgacagcggctaccatattacatttgttgaagttggtcagaagatcgttgatagcctgaacactaccaattcttatgacatctattttctcgataaaggctatgaaaagaaaactataaccaatgtatgtgcgatttctccggtgagtcatcccgaagaggtggttaagtcagtcgtgggtgctgatctgatcaccacctcggtctgggctgacaacctaccgaagatttccgcaatccttgcgaaaggcctgaaagaaagaaagctgaaagggatgccaaaggttaacgtactcgcctgtgagaatgcgctgtacgcgtccgaccgtttacgcaacgaggtccttaaacataccgatatcatcactgaagcggaactggatgcaattgcctgtttcgccaacgtctccgtagaccgtctggcgttgacaaatgtccgagacggtgtggagtacctggatatcgatactatgtttgagctggtcatcgaacagaatcgtctggtcgataccaaatctgaaccgattaaaggtgcagattacactgataacctgactatgtacctggaaagaaaactttatatctgtaactgcgggcatgcggctgcaggatatttagggttcatcaaaggataccagtatgttcaacagtcctttgctgataaagatattttcgaagatgtcaaaggtatgatgtatgaatctgccgatgcgttaattaaaaaattcggctttgaatttgacgaactggactatttcatcaagaaaaatattaaacgcttcacgatggacgtggtacaggatgataccaaacgcgtctgccgctctcctatccgtaaactggataaaacagaccgtctggttgctccctgtgaagcttatgaatcacttgttggtgaagtgaaatatttacctaaagctattgcggcagtgtttctttttaaaaacagcgatgacgctcaagccgtggaattgcaggattatatttctgcaaacggtatcgaaaaatcaattactcacttcaccggacttgaacaaggctctgccattttcacaaaagttctggctgaatttaacaaatttaatcattga

SEQ ID NO: 182120 - DNA, 435 bp, Klebsiella oxytoca
atgactattttcaacgccggaaacatcaatctgaccacagatgctaactctgtaaaagatgcaatcattaccgttggtaaattgctttccgataatggctatgtcgatgtcggatatattgatgcgatgcttaaacgtgagggggttatttctacctatgttggcaacggcgttgctgttcctcatggtatcgcaggttctgatgggttgatttttaaatccggaatatctctgattcgcctcccgcatggaattaaatggagtgatgacgacgaggcccgaatcataattggtattgcaggtaaagatggaactcacatggatatcctcggtaaaatcgccatagtgtgttccgatgaagacaatgtcgaaaaattactgaatgcagaatctgcagaagaaatcgtgaaaattttcgaggagtatgaagaatga

SEQ ID NO: 182121 - DNA, 1440 bp, Klebsiella oxytoca
atgagttcaacaccgaataccttacagttaaagatccaaaaacttggcgcattccttagcggaatggttatgcctaatataggtgtattcattgcatggggtattattactgctcttttcattcctaccggctggtacccaaatgaatatcttgccaaactggtgggtccaaccattacctaccttctaccagtactgattggttatacgggcggttatgctatccatggccgtcgtgggggagtcattggtgctctggcaaccatgggagttgtcattggagcctcagtaaccatgctgataggtggtatggtcatgggaccgctggccgcctgggtaatgaagaaatttgacggctggctggttggtcgggtcaagcccggttttgaaatgctggttgataacttcagtatcgggattattggcgggatcctaatggtcattggctatgccgctgttgagccgattttttccgtcatccttggctttttatccgccggtgtcaactgggcactgaatcacagcctgatcccattggcgagtatttttgttgcccccgctcaggtcctcttcctgaataacgccattaaccatgggattatggccccacttggcatacaacaggttgttgagcatggccgttctatcctgttccttgtagaaggcaacagtggtccattagttggtgtaatggttgcctactgcctgtttggaaaaggactggcgcgtaaaaccgctccggctgcgaccatcatcgtcatgttcggtgggatcgccgaggtttatttcccatatgtcctgatgaaacctaagctggttcttgctccgattctgggaagcatggtctccctatttattttccagactttcgatggcggtaccgtagccgtcccgtctccgggcagtgttattgcctttgcgatgatgacgccaaaaggttacttcacggttaacctggccggatatttcgcaggtctcattgtctcggccattgttgccgggatccttttaaaacttgataaatctcctgtcgaagacggggaagaataccaggaagaaacaacaactccacacatctctacggcaccagttgttgcggctacaaatagtgaaagtgctaccatcgctggtggtgaacacctgacagaccggaaaatcaacaagattattgtggcctgtgatgcgggtatgggctcaagtgccatgggggcttccgtgctgagaacgcgagcgaaaaaagccatgctgaacgtgacggtagcgaacgcttctgtcagtagtattccagaagacacggatctcgttgtaacacacgctgaccttctgaatcgcgcacgtcagaataacaaaaatccagatacgcagtttatatccatcaaaaacttcattgaagctaaacaatatgatcgtgtcttagaacacgtgcagaaaaacggataa

SEQ ID NO: 182122 - DNA, 276 bp, Klebsiella oxytoca
atgcagctgaaagcagaattcgtaatcgctaacaaaagtggtctccacaccagacctggcgccatgctggtgaatatcgccaaaaaatatgaaagcgatattaccatcacaaacctgacagcacagggaaagccggcaaacgcaaaaagcctgatgaaattgatgacttgcggaattaagtgtggtcataaaattctcatcactttagaaggcaaggatgcagagcatgcgctggcagcgatcagtgatggtattgccagtggactgggtgaataa

SEQ ID NO: 182123 - DNA, 993 bp, Klebsiella oxytoca
atgtccatcctcaataatctgagaaggttcacgacagtcgttgcggatacgggtgatatttcggctatacggcagttcttacctgaagatgcaacgaccaacccttctctgatactgaatgctgcgtcactaccattgtacctccctcacatcaaagaggcggttagctgggctcttgaacaaggtgggtcaaaagaaactatcttactgaacaccagcgacagactggtcgtaagtattggaaccgaattgctgaaggtggttcctgggaaggtgtcaacggagatcgatgcgcgcttatcttatgatcgcgggatgtgtgtagcgaaagcgagaaagttaattcgtctgtatgagcagcaaggtgttgaccgttcccggatcctgataaagcttgcggcgacatggcaaggtattaaagccgctgaacaactggagcgtgaaggcattcattgcaatcttactcttttgttctcgtttgctcaggcacgggcatgtgcagaagccggggtgtggctcatttcgccttttgtcgggcgtatctacgactggcataaggaaaaaggaagtattaacaaggacgatatacagacagatcctggggtacactcagtccgccgtatctatgattattttaaaaaataccggtatcagaccatcgttatgggagccagttttcgtaaggtggagcagatactggctctggccggctgtgaccgattgactatttctcctgacctgcttgcagaactctctcatcaggagggtgaggttatccgaatgttgacgccaccggtacaggcagagacaccgccagcccccctttctgaatccgaattttattggcttcatcacgaagatccgatggcggttgacaagttagccgaaggtatccgttcgttcgcacgagctcaggaaaagcttgaagaaaagttgttaaacgaaatagcaaaaatgcaaccaacagcaacagttcaattctctctgtcgtaa

SEQ ID NO: 182124 - DNA, 483 bp, Klebsiella oxytoca
atgttaaaaatcgcaatcggcgcagatgatgcagctaccacactcaaaaacgcagttaagggacatcttcagtacaaaggcattgaagttattgatttcagtcacgatgtttcaggaaacgatctgatttatccggatatcgcgtttaaccttgcgacagcaatccatgatggggagtttgaacgtggcattttgttgtgcggtacggggatcggaatggcgattgttgcgaataaagttcccggtgttcgggctgcgcaatgccacgatacttattccgcatcaagagcgcgaaaaagtaatgatgcccaaattatgaccatgggtgcacgggtcattggtacagaactcgcattaatgttggtagatacatggctggattctgaatttgaagcgggtcgctcacaacctaaagtagaacgaatcgaacattacgaaacgttaattaaatctggccgcctgacacgggaaaaccagaattga

SEQ ID NO: 182125 - DNA, 1761 bp, Klebsiella oxytoca
atgacctggatttataaccgtccatcggaatttgccaaagacatgatcgaggggtttgccagtgctcatgcctctttggttcgccgtgttcctggtggcgtcgtccggaacacattaagccaatcaaacacggtagccgtcgtggtaggaggagggtctggtcactatccggccttcgccggttttgtggggcaggggcttgcgcatggtgcggtgatgggaaatctgttcgcatctccttcagcccaacaaatatgctccgtcgcaagagcagcgaataacggcgctggggtccttttactttacggtaactatgcaggagatgtgcttcattttggtctggcctgcgagcgacttcgatctgaaggcattccatgcgaagcccttgcgataactgatgatattaccagtgcctcttcacaggagcgaaacaagcgcaggggcgttgccggggacttggtcatattcaaaatagcagcggcagctgcagaaaaaggccattcattagctgaggtcttcgctatcgcgcaacattcaaatgaacgcacacggactctgggccttgcgtttagtggctgcactttgccgggcgcggaacacccgttgtttaccgtacccgaagggatcatgggatttggcatggggatccatggagaacccggaataagtgagatgctggttccacgcgcggaaccgctggcaaaaatgctgattgactctttaatgggcgaagttccggatgatgtagagacagcaaaaggcgcacgtattgccgtcatcataaatggactgggctctgtaaaatatgaagagctgtttgtgctatggcgttttgttcgcccccttttaatcgagacaggcgccgagatagctgatgtgcagatcggcgagtttgtcaccagttttgacatggccggcatgtctctgacagttgcctggctagataatgaactggaaagcttatggttggctccagcctgcagtcctgcattcacccgcggctcagcaatacaacatatcccccttactactgagttgctccagcaaaacacagcaactgttctggcgaggggaagcgcagcatcccagaaaaccgctcagctaataatggatattctcagcgctgctgcagaaacgatcacacacaatgttgatgagctgggacgaatcgatgctattgcaggcgatggtgaccatggtatagggatggaacgaggtattcatgcggcccgaaatgccgccgagaaggcagtgaaagaaggcgccggtgctggtgcgctactacaattcgctgccgatgcctgggctgatgatgctggcggaacatcgggtgcgatctggggagtcattctgaatacaataggaacggtacttggcaatcagtatgaacctgacgccggaactgtttcccgggcagtgaagcaggcaagtgatggagtaatgcatttcgggaaagccaaaccgggcgataaaacgctggttgatgtattacacccattcagtaatgcattatcggaagctgtaacgtcaggcgcatcgctcagcgactcatggaaaaaagctgcagaagtggccagaaaatgtgtgagtgaaaccgctgacatggttccgagaattggtcgagctcggccgctggccgaacgaagcgttggcacaccggatgcaggcgctgtttccatgtcaatggtcattgacgtagtcagtagattttttatgaaggaacagcaaaaacagacaaataatcaggaaactcatctatga

SEQ ID NO: 182126 - DNA, 759 bp, Klebsiella oxytoca
atgagcattgtgattggggttagtcataaaagctattttggctgggagagaacgcttgagtggaatcagaaagtggtagagatcatcaggaaaggccctaccgacggttctctggagctttttacatttcctgcaattccagccatatcagcatcattagaatgttttgctaataccccaatggctatcggggcgcaagacatctgtgcagaagcgcctggagcgtggacgggggaaatcagtgcagcaatagttcaggaaatgggatgtcagtatgcagaaatagggcacgctgaaagacgccgtttttttaatgaaacgatcgacattatcaataaaaaaattgatatggcattttcctgccacttaacccctgttatctgcattggtgaaccagagcggatggcgctatctgatgcggcagcatatgcgatagcccaggctaaagagctgcttgatcaacgctccgggccggttccaggggtggtttttgcctgggagcctcaatgggcgatcggggctcccaaaccagccagtgatgaatatatcaaatatgtctgtcacgctttgcgtggttttttgcatcaacattatgggactcagtgtaaggtcatatacggtgggagtgctggtcccggtcttctggagcgactctggccacatgtagatggattgttccttggacgctttgcccatcagcctgattcgtttgctctcatacttgaagaagcgcaacgtcttctctctgagtcaacctga

SEQ ID NO: 182127 - DNA, 963 bp, Klebsiella oxytoca
atggataagacaggagtgtcgcaagaatacgagctgttaacagaaatagccgttgcctactactgcgatgaaattactcaggaagagatcgccaataaatttggattctctcgtataaaagtagggcgtctgctcaaaaaagcaaaagaagaggggattgtagaaattagtgtcagataccatcccgtcttcagtacgcagttggaaaaacagctgaaagagcgctttcctatcagccgcgctctgattgcactggatcatcaggatgtcgatgagcagcgtcgtcaggttgccgcactggtttccgctcacctcaataacgttcttaaagatgatatcgttatcgcagtcggccaggggcgcaatgtggcctccgttgctgaattattcggcactgtacaacctaaaaattgtcgttttatttgtgggatcggaggaactcatcgaccgggtgatgtgatcaatgcagatcatatcagcagattactggccaaaaagtatgggggtagcagtgaatctttatatgcgccggcttatgtggaaaatatgcagctaaaagaactcttgttacagaacagtacgataaggaagacgctggatcgtgccagaaaagctgacattgcccttgtagggataggtgatatgaatgaagagagctatatggtcaagcttggctggtttacaccgcaggagatcaatgacgccagcctcaatcagggggtgattggtgatatcgcgggatatgacttctttaattcgcgtggtgaacatgtaaataccgtgatggataaccgggttattggcctcagcattgatgaacttcggcaaattccttgtgttattgcaattgcatcagaaaacacgaaggctatggcaatcatgggtgcattacgcacgggagctatagatattattgctaccagtgtaagaaatatcagaacgattcttaacctgagccagtag

SEQ ID NO: 182128 - DNA, 1419 bp, Klebsiella oxytoca
atggcccgaatccctgaaaaactaacaatggccatcattattggcaacagaggtttctttcccaatcaccttgtcaccgaagcacgggaacaagctacagctcttttttcccgtctgggcattaatatcatcatgccagatgaaaacaggaccaaacttggtggcgttgaaacgcgtcaggatgccaaggcctgtgccgaactctttcgccggcaccgggaagagatacatggtgttgtggttttgcttcctaattttggtgatgaaaaagcgattgctgaaactcttcgcctgtctgggttgaatgtacctgtgctgatacaggctgaagaggacaatcctgacaaaatgaagcaagccacacgccgggacagtttttgtggaaagatatccctttgtaataacttacggcagtacggcattcccttttcactgacaacgcagcacgtctgtgcgctcaagagtgaggtctttgaaaaagacctgatcagattccagcaggtctgtcgggtcgtcagcagtatgcgcggtgcccgggtgggggctataggtgcccgtcctgccggatttaatacagtgcgctacagcgaaaaactgctggaacgccttgggatttccgtggaaacactggatttatctgaggtgtttatcagaatgaaaggactgcagaatgacgatatccgggttgacgaaaaacgccggctgttgctggacaatgctgatgccagatcggtacctgccgataaacttgtcacaatggcaaaattatttgtggtgctcagtgactggattattgccaatgacattgatacgacggcgatccagtgctggacatccctgcaggaaaatcttggcatcaatgtttgctccattatgagtgtgatgtcaggtcaactcatgcccagtgcctgtgaagtcgatgtgatgggagcactctcgatgtatgcactggccagcgttaatatggcgcctgcttctatcgctgactggaataacaattttggtgatgagcgggataaatgcgtgctgtttcactgcggtaattttcctgccgccagtctggaatcctcccgtatggggacggccggtcttatcggtacgtcggttggtgaggaaaatacctgtggtgccgtgcatggccggatgaagaccgggccgctgacctacctgcgcctgagtacggatgatttgacaggggaaataaagggttatgtaggagaaggacgctcagtggacgatccactggaaacattcggctgctgggccgtgatccaggtgcctcatcttgaggacctgctgtcatggatttgtcgtcaggggtatgaacatcatgttgccatgaatcattcggccagtgctgaggtgatttacgaagcattcaccctctatctgggtattgagacttatcatcataaataa

SEQ ID NO: 182129 - DNA, 861 bp, Klebsiella oxytoca
atgttaatgaatatgaaagatgtactaaaagtcgcaaatgaacataagtttggtgtcggtgcttttaatatttcgtctgctgagtttggccgacttgtcattgaagttgctgaaaaattaaactctccggttattcttgaaattcacccggatgagcatgagtttactggggatatatttatccagtatttacgtgagttaggtattaaagcatcagtgcctgtcgtgattcatcaggatcacggacagtcgcttgaacaggttatgcgtgctatccggacagggttcacctctgtcatgattgatgcctccgcttatccctttgaagaaaatatcagaattactcgtcaggtaactgacattgcacatcttgtgaatgtctcagttgaagctgaactgggtacgattggtgttgcagaaggcagtgctgaaggtgggcacagtgaaattctttatacagatccggcgcaagcagagcagtttgtcaaagaaaccggtgtagataccctggctgtggccatcggtacctctcatggtctttaccctgcaggcatgcaaccaaaacttgatatcgagcgtttaaaagaaatcaagaaacgtctcagtatcccacttgtccttcacggtggctcaggcaacaaagacagcgaagttgcggaagccatcacatatggcgtaggtaaaattaatatttccagcgatatgaaaaaagcgttctttgtatccctcgaggaagaacttaaatccggcggacatgagccaatgttcctttatgtcaagccaatggaggctgcaaggaaagtcgttgagcacaaaatgcgactattctcctcggacggtaaagctgagctatataattaa

SEQ ID NO: 182130 - DNA, 1413 bp, Klebsiella oxytoca
atgaacatcattgccattactgcctgccctacaggcatagcccacacatatcttgctgaagcaaacttaaagaaaaatgcaaaaaaattgggattaaatatactcgtcgagactcaaggggctgtcgatagtgaatatatcttttcttcggatgatatcagaaacgctgacgctgtattaatagcggcagataaagtcatcgatatgtcgcgattcgcaggaaaaaaaatatttaaggtgtcagtgacgcgagctgcaaaagatgctttcgggttattgaatgatattatatcaggaaatattgtgccggagatgatggttcaatcaggaacaaatatatctgaaacaacatctcgtgaaaatgacaaatctacttttttgtctaatatatatattcatctggtaaccggtgttaacttaatgattccgttcgttgttgccggtggtattctgattgcacttagttttacgtttgggatcacagcatcaactcctggagatcctcattttaatccaatcgcaaagatgctgtcggatattggaggaggtgctgcatttgccctcatgcttccaattttagctctggggattagccgttccatctgtggtaatattggtacagtgtctggagctgttggcggcatgttggccattcatacaggttcgggctttctgggtgcaatcttcgcgggtttccttgcgggttatataacttttttactagctaaatatattaatttacctaaatcgcttgctggtctgaaaccgattttaattatccctcttctgagtgttttgatgaccgggatcttgatgattgttgttgtcggggagccaattaaatatctactggaaactcttacaacctttttaactaatatgggaaatgtcaatgctgcattcctgggattattgatgggtatgatgatggcatttgatatgggagggccacttaacaaaacagttgttatgtttgcgattgggttaatgtccactggaatctacgaacctattgctgcatgtatggctgcaggaatggtaccaccgctaggaattgctctggccacaacgcttttcaaacgtaaattcacatctcaggaaagagagacgggaaaagtcacatatattcttggcttgtcatttattactgaaggagcgattccctatgcagtcaccgaccccttaagagttatcccggcaattgttataggttctggtgtagccggcgctctttcgatggcactaggttgtgcttctcgtgcaccgcatggtggggtatttgttatgttcattcctaatgtcatcacgaatgtcttagcctacgccttctccattatcattggtgcggtggtaaccgcattaatactccgtgtaatcaaaaaagacagtctggaatccactgaagaggtctaa

SEQ ID NO: 182131 - DNA, 474 bp, Klebsiella oxytoca
atgctgaatgctgtatctataactgatttattaagtaaatcatgtgtgcttactgatcttgtcgcaaacaataagcttgaagttattcaaaagatgactgattgtttatattcagaagagattatatctaataaagaggggtttattcaggatgttctcgaacgagaggaactaggttcaaccggtttcgaaaatcaaattgcgatcccacatggaaaatctccatgggtaaaagaaacgagaatcgctatagcaaaactcaaaaactcagtagattgggaaacaatggatgattctgatgtaaaactggttatcctgttcgcggtaagggatgttgacaagggctccgcccatattaaagcactcgcgaaaatttcggttgctttaggagatgatgatatcgttgaacaattaataaaatcagaatcaagtgaggagctttacgatttaatagtaaacagcacagaccaataa

SEQ ID NO: 182132 - DNA, 1506 bp, Klebsiella oxytoca
gtgaaagtgcttaataaaagacaacttgaaatattcaacttactgacagagcaagatgactggatcccagccacaaaagttgctgaaaaattgaatatttctgtgagcactcttcgcagagatgttgagtcgataaattctttttatgtaagaaaagaaaacagaataattacaaaacctggactcggtttgaaactggaaacccaggggattttaccatcacctcatggtccagaagatgattttgtgcaggtacagagcgtattaactaacagaaggcttgtgagcattttaactgaattactttcgtattcacctacaccattttcgataacttacctggcggagaaattttcaataagtcgttcttcaatagtcgaagacctaaaaaaaattgatgtttgggtaggcagattttcattaaagatgataaaaaatcataatggtacgtctattgaaggaaatgactataatataaggatggcattaaaagaaattattacatcaagtgttgtaagtcactaccaactaacggatagcagaattgaccgtttttcccgaagccaactcattgctgagtttggggagaaaaatgtatcaaattgcatatcactcatttcatttatagaaaatgagttaggttgcataattagcgacccatattatacaaatttattttctcatctcctcgtttcaatcagacgggtgatgaatatgagcgacgatatcgatattcaacacgaatatattaaacatcaaggaacagaatggacggtagctgaaaagtcagttcaatggttaagtgatcattataaaatagccttccctgcaattgaggtgagttatatttatcaatacattgtatcttctggtgggaatcataacgaactgtcacaaaataaaccggttgacttagttgttatggaatatacgaaattattaataaaaaacatttccacgctgataaatatagatcttaatggtgatcatgagttaaagaatcaattaatatcacatataaaaccaatgttaaatcggttgatgtatggcatcacaatacacaaccctatactggaagatattaagaacgagcttactatggtttttgatgcggttaaaatctccgtgatgaaaattgactcagtgcgaaattcaagtattccatctgatgatgaggttgcttatcttacgatatatattcaatcagccatagagagaacaattgaaagaaagaaagttattctcgtatgctccagtggagttggtgcatcacaattgttatccagtagaattatccgaacttttcccgagtgggatattattgatattgtttccgggagtaaactaaaagagaccttagaaaataaaacatgtgatttagttatatcaacaattcgccttgaagggatgaaagttcctgtcgcctatgtatctgcattatttggcaaaaaggatgttgtaagagtgatcgaatgcttaggttcgattaataatgttaaggagtaa

SEQ ID NO: 182133 - DNA, 2241 bp, Klebsiella oxytoca
atggaaaatcccgccattttgttacgccgtcttaacccttactgcgcccgtgcgatggaaggcgctgccaccctgtgccagacccgggcgcacgcggaaatcctgcccgagcactggctgctgaaactgctggagcagggcgagggcgacctgacggtactggcgcggcgctacgaatgggatatggacgcgatatggcaggatttgctgacctttatggataagctcccccgttcggtgcgcggccgcccgcagctttcagacgctattcagactctgatgcaggaggcatggctaagcgcttcgctggccggggaggagcatatccgtagtatccacctgctgatggcgctggtggataaacagagtctggtgcgctgcgacggcctgtggccgctgctgaccctggcgcagagccagctggcgcgcctgcgtccgctgctggacgcgcagtccgaagagcgcccggaggtgcagcaggaagcagagctggcgcagggcgacgaggtggcgtttgtcggccgtccggttaatgcgggcgtaaaagaaggggatctgaatccggctctgcagaatgcgctggataagttcaccctcgacgtgaccgcccgcgcccgggacggcaaaatcgacccggtgttcggccgtgataatgaaatccgccagatggtggacattctttcccgacgccgcaagaacaacccgatactggtgggcgagccgggtgtcggcaagaccgcgctggtggaaggtctggcgatcagaatcgccgagggcaacgtcccggatgcgctgaaaccggtaagcgtgcgcacccttgacctcggcctgctgcaggccggagcgggggtgaagggagaattcgagcagcggctgaaaaacattatcgacgcggtgcagcagtcgccgctgcctgtgcttctgtttattgatgaggcccacacccttatcggcgcgggcaccctctccagacgctatctgaccggacgccagctgccggacaaggcggtggatttactcgacaccgcctccgcccgcatccgcatgagcctggatacggtgacgctccgggttgcgaaaacgggtatccgctttcccggcgatgctgaccgcagaccgctggacgcccgttttgccgtctgcggtttcagtaaggaggaggcgctgttgccggagtgcggcagtttcagcggttatcagctgctgctggagtattttacctttcgtgaaaagtttatgtcggtgacgctgcgcggcctggaaaatgtggatttcccggaagaactggcgtggtttgaaatcgatatcgtgctggagagacagtggccgcatgaatatgcgctgtcggagaaacatctgcgcctgcactgcacgccggtgattaatctgtttccgctggagtccgatccgctgcatctggactcgttacagaccgaatacctgctgcgcccgatgcgtgtccaggacggtcataccgagatttattccgtggattcggtcacctcctcgcgccactccggtcaccagacgtatgtgccgttcaccagcttccgtcacaagggaggaatgctgcgccatgatgcgccggaatattattaccatacgcgggtaaagtccggtccttcagggctgcacgacacctggctgacgctcggcggcgaggcgtttgataaccacgccgtaccggagaatgaaaaactgtcgctcagcctgactggcaccaacggccagctgccgcgccgggcgctgcagagtacgctgctggacacggtggtgaaatccaccaccgcgcgcattcaggtgcgtaacctctgcgccccgacgctgccgtgctacccgccggaccgcgatcgttttcactggcgggtgctgagccatctcggcagcagtttcctgtggatgatggataacgctgacgtgctgcgcggcgcgctggccctctatgactggaccgataacgagatgaaccgccgccgcctggaagcgattgtcgatgtcaggcatagcgaggtggaacgttttgcgcagggccattttctgcgcggcgtgcagattgaggtgaccctcgacagcagcggcttcgccgggcacggcgatatctgcctgttcggcgagatgctgaaccgcttcttcgcgctgtataccgatattcacctgttcaaccatatgattctgatactacaacctgggggagagcgcctcgaatggcaggagaaccacaaccgccgcattcccggctaa

SEQ ID NO: 182134 - DNA, 1158 bp, Klebsiella oxytoca
atgcaagatttcatctatcataatccggtaaaaattctttttggtcgcgatcaaatttctgcgttagcacaagaagtcccgcagggtaaaaaggtcatgattgtctatggcgggggcagcgttataaaacacggtatattgaaacgcgtaaaagagtccctgacaaacaccctggtttatgagtttggcggtgtagaagcaaaccctcattatgaaaccctgatgaaagccgttgagattgtcagagcagaaaaaattgattttcttctggccgtgggcggcggttcagtgatcgacgggactaaatttattgccgccgcagccctctacgaaaatgatccatgggagatcgtcaagagttatggcggcgtggtgaaacaagctctcccttttggatgcgtgctgaccctggcggccacgggttcagagatgaataacacggcggtgattaatcgggtgaccacccaggataaactctttttcacctccccttacgttatgccgaaattttcagtgctcgaaccggaaatgacctacacgctgcctgaacaacaaaccgcaaacggggttgttgatgcatttgtccacgttcttgagcaatacatcacttacccggttaacgctaaggtgcaggatcgcctggcggaaggactgctgagcacgctgaaagaagaaggaccagtagcccttaaaaatccccaaaactacgacgccagagctaacatcatgtgggctgcgacgatggccctgaatggaatgttgagcacaggtgtcccaactgactgggcttctcacatgattggccaggaaattactgcattatacggaatcgaccacgcccgtaccctcgctatcgttatgcctgcactatggcgcttgtgcaaaaaggaaaaagcagaaaagctggctcagtacggtgcgcgtgtctggaatattcctgagtctgatagcgaaaaaatggccgatgaggctatcaatgccaccgtggaattttttgaactgatgggcgttaaaacccgactttctgattatggtctgggcgcggaagatatttcagctgttatcggcaagttaaaagaacatgggcacatcgcattaggtgaacatggaaaaattactgctgaagtggcggaaacaatactgaacatggcactttaa

SEQ ID NO: 182135 - DNA, 894 bp, Klebsiella oxytoca
gtggatgaattaaaggtttttttaacagtggccaggctgaaaagctttaccaaagccgcagctgaaataggtgtgacaccctcagccatcagccacacggtgaaatctcttgaggaaaggcttgggatccgcctgctggccagaaccacccgcagtatctccactacggaagcaggtgaaaggctcattaacgaagtaggcccgttaatggaacaggttgatgatgctattagtcggttgagtgagcttagggaaaaacccactggcgtcatacgcctcacggcggcagatgatgttatccagtatttgatccgtcctgtattaccggactttctgagtcgctacccagatattcagattgaaatcggcattgactatggatttacagatattgttgatcagcgttttgatgccgggattcgtccgggcgatgttctgaataatgatatgattgccgcaaaaataagccagaactggcgccagcttgttgttgctgcaccagattattttaagcgttatgctaagcccaggaagccgcaggatcttttgaaccacaactgcattaacgtccgctattctgatacgagtggattgtacgcctgggaattcgagaaagatgctcagaaattcagtctgaaagtcaaagggcaatatattgcgaacagcacgattcatcagctcgatgcagcattagacgggctggggattgcctatattcccgagtatgttgcagatggatatatcaaaagcggcaagctgattgctgttctgaccgagtggtgtccatattttgacggctaccatatttattatcctcaccgccgacaggattctcctgcgtttatggcttttctgcaagttttgcgcgacaggtacaataatggaataagataa

SEQ ID NO: 182136 - DNA, 816 bp, Klebsiella oxytoca
atgagctatattcaacgggaaacgtcttgctcgaggccgcgattaaattccaacctggatgctgatttatatgggtatagatgggctcgcgataatgtcgggcaatcaggtgcgacaatctatcgattgtatgggaagcccgatgcgccagagttgtttctgaaacatggcaaaggtagcgttgccaatgatgttacagatgagatggtcagactaaactggctgacggcatttatgcctcttccgaccatcaagcattttatccgtactcctgatgatgcatggttactcaccactgcgatccccgggaaaacagcattccaggtattagaagaatatcctgattcaggtgaaaatattgttgatgcgctggcagcgttcctgcgccggttgcattcgattcctgtttgtaattgtccttttaacagcgatcgcgtatttcgtctcgctcaggcgcaatcacgaatgaataacggtttggttgatgcgagtgattttgatgacgagcgtaatggctggcctgttgaacaagtctggaaagaaatgcataagcttttgccattctcaccggattcagtcgtcactcatggtgatttctcacttgataaccttatttttgacgaggggaaattaataggttgtattgatgttggacgagtcggaatcgcagaccgataccaggatcttgccatcctatggaactgcctcggtgagttttctccttcattacagaaacggttttttcaaaaatatggcattgataatcctgatatgaataaattgcagtttcatttgatgctcgatgagtttttctaa

SEQ ID NO: 182137 - DNA, 231 bp, Klebsiella oxytoca
atgcacacatatgacgccgacgacccccgtatgagtaatacgggggtagtaccagacgatgacgctgttgcattttctgctgatatggcagagctagttattgagggattcgataattccggatttcatctgcgcatcggggatgtttattattgtgcaaaaaattttgatgatctgatcgctgtttgtatcgattcttttggtggtggtaataatgactattatcgttga

SEQ ID NO: 182138 - DNA, 996 bp, Klebsiella oxytoca
atgactattatcgttgacacactctcgtttacatttcaaatgtccgcgctcagggatttggccgactattattatcctcgggccgttggattcggcccgtggccggttctgccagaatctggtgataagaatcagtttcaggatctgtgttgcgctgctctggaggaccgtgctcggtttctgttcagtgattttttcgggatggcgttatcgcctgctactggtagggggcggctagggtattacgatcactgtcgtatcaccgacctgtccggggttgtcgaattcggctatctggcgtttggtggcaatcgtgacacggtttattgctatctaaatggtcacgcctgcaaagaattttttgagagaaaacaaccagttgagttgcatcattttttgactgagattctgggtgtctctcgactgaaccgcctcgatctcgcctacgatgatttttctggtgtaaccggttttgactcggttatcgccgcatatgaccgcgatgcgttttattgcggaaaaggcccgagacccaagatcaccactattcaaactcgatcagggaaaaacgatttaggatcaacaatttacgttggttcgcgtcagtctcaggtttactggcgatcctacgacaaaaatgccgaacaagggatggtcgatccggtaacgccgtggtggcgacacgaggcagagctaaaaaaagtttcagtcgatttattattggatgtctcggcagcttatgctggatgcaacgattatgctcgaacactggctgattctgagcccgttcgtgtccgcacaaaaattgaaaaaacctcgtcaactctggattctcagattcgttggggtcgccacctgattggtagaactctgcgttcgctaatcgatctattcgacgcgcccacggctctggcgctactaactgcaggggaacgtggtcgcctgcacctgacgccgggggaaatttcgacctatcgaacggcgttgcaaatctga

SEQ ID NO: 182139 - DNA, 309 bp, Klebsiella oxytoca
atgtctattttaattcgtggaaaatttctcggtgctcgcaatcgcgaatacactaattcgcagggtaattattcgttttatgagatcggaatcgaaaattcccgtcctgatggctggggcggctcgcaatctgttcagaccgctatccgagtccctaaaaaattgattgactctggaattctcaatcgagtttcctcattgcaggggaaaaatgtcgagattcttgtttgggtcgacgcctatgttgggaaaaacggcgcggcgataaatttttttcttgaaagcgatcaaatcacagaaattaaatag

SEQ ID NO: 182140 - DNA, 129 bp, Klebsiella oxytoca
atggcgcggcaatttctgctgttttttgatcgttgtgacaactgtgattgtgagggttgctcagaatgcaattttctgggcgttattcagattaaaaattttgatggcacggagtgttttgatgaatga

SEQ ID NO: 182141 - DNA, 225 bp, Klebsiella oxytoca
atgagaaaacttttttcactgtctgttctgtctgccgctattctggccccggccgcgagttttgccgccgagggggatgttgacctctccagtctcactgactcgttttctgtcgcacctgtgactactggcgtattggcgattgctggagccctgctgggcctgtacgccatgatgcgcggtgcgaaaatcattttggccctagttcgtggtggtagcaactaa

SEQ ID NO: 182142 - DNA, 1275 bp, Klebsiella oxytoca
atgaaaaaaattattttggttatttttttaataatcctcccaatttcaactggttatgcatttttgccattgctaatcgcaggcgccgattttgccggtgctgctgctctacgtactgcgatctctcggggcgcggcccaactcgctgttagtgctgcggagaggcaggttcttgagaatgcaacaaaaacagcgttaaatcagtcagttaagcggttgattgcaatgtcgccaaacccttcaaaatttcagctcgccactggtgcagtaacgtgggctggtctgggttctgcgctgctagatttgggagatgaaatttttggtgctgaccagagtgcgggggtgtcctccggggattctgctgataatggccgaaaattttatgttggcgcaggctcgggcggaacaaggccctatttttcaggtgattatccagagaatttgatttattctgcgtatcgttatcagtcctctaacggtcttctgccctgtaatagcgccagtggctgcgcgtattcggctaatttttctgttctcagttctagcactggttcgagcggctctacaacctatcagatccaataccagaattcgtattcgaccagctcgggttctacagtcacggtagaccgaacggctagctataccgtgctgtctaacgccaattttgattcgtctatcacgccgcaatcatctgatatcacggctgaacaggaggagacggccaaaaataccccgctgaatcctcaacggctggccgatgttgccaatgcgctgttgctggatgctgccagtcagtcagattacgcggggattccggtgtcgagttccaatccgctcgtaacagctcgagatttcactgatgcactgactgctgtagggcgaacagagcccactaacgccgagtggaccactccatgggaggatctggaaaggaccagtgatacaggcactgacactggtacagatacaggaacagggggagggactgattcgggggcaggtagtgagactgctactgagccaacgctcgatagcccacctgacggcaaaactattttgtcacctttgttgaatttatttcctgccgattggggtaatttttcgattggttcacgtgatgcggcatgtcctgtcgctgagttcgaaatatgggataaaaatttcgttatcgattctcattgtgggttgattgaacagaatcgcgaactgataaaaataatttttctgattgtctggacgttctctgcatttcgtcgggtaatgtccgcatga

SEQ ID NO: 182143 - DNA, 1056 bp, Klebsiella oxytoca
atggcaatttctgcatatgtcggtgttccggggagtggtaaaagttttgaggttgtccgcagtgtaataattcccgccgttgctcaggggcgtagggttgtatctaatatatacggcctgaatgctgaaaaaatttatgactatgttcgtgataattataaaaacgctgagattggcgaagttttgcttgttacaaatgagcaggttcaggacgaaaattttttcccctataaaaattcagatttagatggggtgaaaacatattgccagccgggggatctgatttgtgtcgacgaggcctggcgtatctgggcctcggactctaaaatgcctaaaaatcataaatcatttttggcagaacatcgccattttgttcatcctgaaactggtgttacctgcgatttggttgttgcgaatcagtcaattactaatcttcctcggtttattcgagacagaatagaaataacattcaaaatgactaaattgaaaatgctgggtcttaactccagttaccgcgttgaaatttattcaggtgcaaagctgtttaaatcggagttaaccagcaaacgaaattataattatgataaaaaaatattcccactctatcagtcctatgacggtaacggtcaggaaaaaacagttgataaaagacaaagcattttttcctctggtctactctggtttggcattattttttttgcggttgttggtctctcgggggtttggtttttatgggttttttttcatggtgatgggttggggaaaaatgttaatgacaaaacggattcagcagcggtgacagttaatagtgctgttcaggctaaaacgaattcgaattctgttcaggtatctgtatcgcggcctgtggtttccagacagtggcgtgttatcggtgttatcagggataagacgggtcgttttgttgttctgtctggtgctgatgggcgtcagcgtgtcgagccagcgtcggggtttgttatcaacggtgctgtaatcagcggtgttttagatggggaggttgttacgtcatggtcaggttcaggggtgcaaaagtga

SEQ ID NO: 182144 - DNA, 1200 bp, Klebsiella oxytoca
atggtcaggttcaggggtgcaaaagtgaaaaaaactgtttttctttcgtcaatgctgctgtttccattttttgctaatgcaactggttcaggggtggatttcgaactcaaatcgacaccagtgcctgatgctcttagcgttttttatacgcaaatcctgaaaaagccttttcggttgtctcccgatgtcgtggcattgactaacaaaaatatttcttttcacttaatgccagatcaggatgctagaaaattttttatcgattacatgtcagatatcggtgttaaatctaaaacaaaaaatggtgtcgatttttactatgtaccctcgcaattaacagaaaaagcagttttgccgaaattcagttacacctataaaccactgtaccggtctgtcgattatcttgcatcacagatgaaatcattagccagtgacggtggtcagttctctggaggcggtgagaaaacggctgctgacatgttggttttttacggtacaaaatctgagattagacgtgtttctgaggcgttgccattggtagatattccggctgatgaggttctggtgtccggttatgtgtatgaggttcagagtacgtcgaaaacgggttcaggtctgcaactggctgttaatttattgaattcaaaattaaatttacaaattggtggcagttcagcgagagggtatgacaattatctgaaaattggtactggctccctcagtgcgctggttgaactgtttaacacagattcgcggtttactaccgtttcggccccgacgctgcgggcgcgttcaggttctcaggctgaattttcggtcggcagttcaactcctacgctgggaacggttagttatcaggggcaatcggctgttcagtctgtgaactatagagacgctgggattatttttaaaattttgccggaggttcgttttagtgtgattgacctgaatttgtctcaggaactctcgaatttcaccactactgataatggcgttaatgagagtccgacactgattaaacgggcaatttctaccgatatctcattgaaagatggggatattattcttattggtggtctcgctgataacaaaaatacggatactaaaacgggattttctttgcttccttttctcactagcaaggggagcgattcaacaaaaactgatatcgttattgttttacaggtacgaaaaatccggtga

SEQ ID NO: 182145 - DNA, 231 bp, Klebsiella oxytoca
atgcagcagttttcaaaagttgaggttttgtctctatccgccaaaatctgcgatcgttgcgggcgtcgggctgaactggcaacctcggaatttcatgagtttctgtctgtagaccgcgttgcaggttatggatcagttttcggtgacggagagtgtctgaggctggatctgtgtcagcattgcacaaaaaaacttttgggggcgtggattcaatcaggcaaaattgcctga

SEQ ID NO: 182146 - DNA, 843 bp, Klebsiella oxytoca
ttgaataccccggcaaaatggagagtgattggccttgtctcctgtctcattatctttggcgtgctgacttttataggatgttactactatggggatatctttggatgggtatcttctaaagaaaaagtgagcctttggttcttatgtatgtttttattttccgtattcctgatgttgatgaactttggtgtgtggttccatcaaaaagagtatcgctttcagcgtatgacgggagggaagtccgtcacagctaatgtccgtaataactataaaaaatccagtaaaaaggatcctgtaaaagctcatttacgccggcgctatagcttcttatggcgtcgtaaagtccgcctgctgttaatcaccggcgatgaagccgctatcgaacagctggttcccggcctgcaacagcagcagtggctcgaaggcaaccgcaccgtgctgatttacggcggcagcctggcaccggagcctgaccgcgaaaaatacaccgcattgcgcaagctgcgccgcggacgcccgctggacgggattgtccgtgtcatgcccccgtcacttaacctgaccccgcaaatcagcgactgcgatttacgcggactggaaaaaatcagcgaactgctgcgctattccgccccggtctggctgtggcagctgtgcgacagcaactggtcgcagcgtacgcgtcctgagcaggctgtcggggcaagctttcccctgcgcgcaaaagaagacgatattatccgccagctggagcggatgctgccggccctgcgggcgcagggggtaagtcaggtcgcggaagacaacagccacgacttcctgctgcgtttgggccagcacctctag

SEQ ID NO: 182147 - DNA, 843 bp, Klebsiella oxytoca
gtggatgagtatctgaaagatgccccggcgttgcgtcagacggtgctggaaggtatacggcgcagcggacgttttatggcgagccggaatgaagtcaccgcgattagacagacgatgagcagcaggctggcagagcactttgcaacagaaaagggtcaggctgaataccggctggcgggaataaacagcctgttgctggtgctgaatgcgatggattttatctacctgtgcggacaggtcagggaagagaaaaagccgctgtcgagcctgatggccagcgggctggcgatggtgagtcaggggacgtcagttattttaccggcaatagagaaaggactggaagcccgtgagcttacggtgtcgtgggtcaagggggctggggcggcagcgggtggggttgcgtctttggtttctgtgtatacagattggctttcaatgaaagcagagtttcagaataatcgtttattcctgatggttgtgatggggggaaaaacatttgtggatgtccttactgtcacaaaatcagttggccttctgctggaagccataggtactattttagaagttaaaggtaaagaggaagcatcgaaaataatcgacttaggtggtaaatatatagccaaaaagctggtagacagatattttggagtcagaattctggcgattttaataacctgggaggccatgttagcgataactttgttacaggtggttgtgacctggatatcggacgacgagcttcagatatggtgtaagaaatgcgtatttggcacagcaccattcaaccgcaacgtggcagaccagaataaagctctggaagcggcgataaaggatatatcatga

SEQ ID NO: 182148 - DNA, 834 bp, Klebsiella oxytoca
atgcaaacagaacccgacgtgttgacggaacacaatgaactcattctttcgaccagtatcgaacgtgtagtcactggtcgcgattccgcactgaaaaaaatcgaacaactcattcagcagcttgatgccatttcacggctaacctcagaaattggcggtggtacagcgcaagactgggcgatgaaagttggacatcgttacgacagttggctgacagaaaaggctgataaagcgatgcctgcgatcacccgcagtatcgatcgcagtatctggcgcgatttgatgctgaagtcaggcatgatggccttgatggatgctcaggctcgtgaccaatggcacaagaatctggaagagggcgatcttcctgctatcagtgaggcgaatatccttagtacttttgaacagttacatctgaacaaaatggaagtctttgagcgcgggatcattaacgtcttcaaaggcctgtcgtgggattacaaaaccaacagtccctgcagcttcggtaagaagatcatcatcaacaatctggtgacgcataaccgctggggctttagccttaactggggctggcggcgggaccaactggcagatctggagagaatgctgtttctgctggatggcaaacccatccctgacaaccgggatgatatctccacccggttgatggagcatatccgggacaattcgactaaggacgtttacgaagatgagttcttcagcattcgttactatcaaaaaggcactgcgcacttggtcttcaagcgtctggagttgattgagcgaatgaatgacatcattgctaaacactatccgggaatgctggcttcgagatga

SEQ ID NO: 182149 - DNA, 321 bp, Klebsiella oxytoca
atgcacatttcaactgtaccggccaaggtgccggtttcgtcaagtccgtcgcccgtgcaggtctggcagcaacttttaacgtatctgctggatcaccattacggcctgacgcttaacgacacaccattccatgacgacgcggccatcgaggagcatatcgatgcaggaatcacgctcgccgatgctgttaattttctggtggaacgttatgaactggtacgcatcgaccgcaaagggtttagctggcaggaacagactccattcctgaccgcgactgatattctccgagccaggcgagctaccggattaataaatacttaa

SEQ ID NO: 182150 - DNA, 189 bp, Klebsiella oxytoca
atgcacctgcagaaattagatctggctttcccgctgtttgtagaacaactggaagatatgctgcgtgctggcgaactaaatccacatcagcaacgtcaggtgaaaattcaacttgcgagtttaacctgtatagctgatacccgtggtagctgcggttacgtttacatctctatttatcccacaccgtaa

SEQ ID NO: 182151 - DNA, 471 bp, Klebsiella oxytoca
atgtctgtatttaatttatccccggtatttcctgcaaacgagcaacgcgtcattcgtcgggcattacgcctgctggagaaatatcagcgtcaaccgagtgagccatttacctccaccagcttcactaagacctggctgcaattacagatggctcatcaggagcgtgaagtttttatcgtgatgtatctcgataatcagcactgcctactgggatgcgaaactctatttaccggcacactcagccataccgaagttcacccccgcgaagtggttaaattggctctgaaacacaatgccgctgcggtaattctggcgcataaccatccgtcaggtacgacagaaatcagtcagcaggacaaacacatcactcagcggatagcgaaagcgttagcactggtagaagtgcgagtactggatcatttggttgttgggaacgaagtggtgtcttttgctgagcagggtttgctttaa

SEQ ID NO: 182152 - DNA, 822 bp, Klebsiella oxytoca
atgatccgattagccagccgctttggtgcggttaatgttgtacgccgcgaccgcccattaactcacgacgaactggcacattacgtgcccagcgtcttcagtgaagaaaagcatgagtcccgcagcgaccgatacacttatatcccgacaataaccctgctcgataatctgcaacgtgaaggtttccagcctttctttgcctgccagacccgagtacgcgaccagagcaagcgcgaacacaccaaacacatgctgcgtcttcgtcgtgagggccaaatcactggcaagcaagttccggaaattattctgctcaacagccacgatggttcgagcagttatcagatgttgccgggattatttcgttcagtctgccagaatggactaatttgcggtgagagttttggtgaggttcgtgtacctcataaaggcaacgtagtggagaaagtcattgaaggggcttacgaagtgctgggaatatttgaccgtgtagaagagaaacgcgatgccatgcagtcgctaatgctaactccgccagcacagcaggcgatggcgaaagcggcattaacctatcgctttggtgaagagcatcagccggtgacggattcgcaaatcctatccccgcgccgctggcaggatgaaagtaacgacctgtggaccacttatcagcgcattcaggaaaacttgattaaaggcggtctgtctggacgaaccaccaaaggcaaacgtgcccatactcgtgctgtaaaaggtatcgacggtgatgtgaagcttaaccgtgctctgtgggtgatggctgagaatatgctgcagcttgcctcatga

SEQ ID NO: 182153 - DNA, 546 bp, Klebsiella oxytoca
atggaaaaggattgtcagaaagatatagatatatcttctttcacgatagtaagggtatgggcaaaacctacttacagcaaaatcatgccactcgtcagccgatttgctaaaaccttacctgccattgtcgttttaatgctgtgccatccgtcatccgcttatgcagatgaacaacgctatatcagtatccgcaacaccgataccgtgtggactcccggtaatatctgtgtgtatcagttccgtctggataatggtggtagcggtgtgggttttggcccgctgtctgtttcgctggggctgaaagacaaggcgggcaacacgttggcgacgggaacaatggacgtagccccctttggcgacagcgatgctactcgttctcaggaagcttttcttgagcatgaatgtgtcgaaaacgtcagcgctattgaaatcatgacggcgaccgaagagcgcaacggccatcaggctaggctgccactgtccgttttcgaccctcagtattatcagccactgtcagtatcggttgctgtgaataaggcatcataa

SEQ ID NO: 182154 - DNA, 648 bp, Klebsiella oxytoca
atgaaattacttaccactacattgctggctaccagcatttgtctgagtgcagtttttccggctgatgctggcaatattgtcggctctgtcaaagcctgggagtacatgcatgctgacggctggaaatcagctgatggcatggatgacaatacgctgcacaatatgctctaccaggccaatgttattgataactacccgtggacgaagcagtttttgctgcgtacccgtggtggtggtgcaattttcctggccgataagaaaacccacactattcgtcaactaaaactgaatcctgtcggtgaaacctacaacgatattgaaacggtttatcagggagatgataagggggaaggctgctactttgccgttattgataaccaagcttcggtacgtgataaggctatcgatgctcttatataccccgactggtctgcaccccaagatacggatgcagttcttaaggctaagattgcaaaagtcagacaacagatagccccaaaagtcattatggtgatgccagataattgtgtgaataaacaacagcaagccacattggcggctaagcgctcggaagaggatcggaaactacagcaatgggtcgcacagcaaagcttagcggaattgtgtcgtcgcacaggcaactgctga

SEQ ID NO: 182155 - DNA, 702 bp, Klebsiella oxytoca
atggttcaggttgaacgtcgtcatgaccggcttgccgtccgactatcgttaattatcagccgcctggtagctggagaaacactggatttacgagcgctggcaactgaatttggtgtgtcggttcgaactctacgccgggactttcgggaacgtctgatgtacctggatctggagtatcgcaaaggccgatgccgcttgctatccggtagccgccagagagagttagcggtgttgaaatttgcccgtcagtcaggcgttgaagctttgtttcctgatatggataaccatctggtcagttcactgttgagcggatcaggagagtctccttgccttatctggcagggaagagcccaggtttcatccccagaatcaggcgtattcactcggttagtgagcgcggtatcagaacatcgaaaggtgacgctgctcggtaaaggttgccgctgtacaggcctcgcaccctatcggttggttctgcgtgacggcgagtggtatttgacaggcgagcatcagacccggatagcagtatttccgttgacggatattcgtgcagtcacgctccacaacggcagcttcgctccagatatagcaatgcgcgatatcctctctcacccggattttcttcaggctttaccccactttcgctttttccattcattgcttgtcgcaactgacggcgagcttatacctcagaaggaataa

SEQ ID NO: 182156 - DNA, 876 bp, Klebsiella oxytoca
atgaaaaaatcagaaggtctaatggccattgaaaagccactagcgtcactcccccatgccattggcagacatattcttgaccatgttcaaaaactcactcactacgaaccagtcatcgggatcatgggcaaaacaggcgcgggaaaatcatctctctgtaatgcgcttttccagggtgaggttacgcccatcagtgatgtccacgcctgcacccgtgacgtactgcgattgcgtctgagcagtggtgaccatagcctgatactaatagacctacccggagtaggcgagagcgagcgacgggataaagaatatgaatctctatatcgcaatattctccctgagttggatctcatcctgtgggttatcaaagccgatgatcgagccttctctgtggatgaacgcttctaccggcgagtgatgactggctaccagcaacggtttctgtttgtcgttaaccaggctgacaaaatcgagccatgccatgaatggtttgtcaccagcaatgcaccatccccgcatcagttggtgaatatcgaggccagactggcgtctattcgccagttattctcaccacaccatccggtgtgcgctgtctcagcgagaacagaatggaatctcccatcaatgatagaaacgatgatgtgctgcctgccagaccgagccactagcccattggcgacacaactgcatgggaggttatgcagtgagccggtaaaaaagcaggctcgtgagggctttggtaatgcggtcggggaggtatttgattctgcggaagcggcatcatttattcccgcgccactgaaagcagttattcgcactgtccgcgatgccgtagtatctgctgctcgcgccgtttgggactggattttcttctga

SEQ ID NO: 182157 - DNA, 951 bp, Klebsiella oxytoca
gtggaggggtatgaattcgatgaacgggaaatgcgaaaaaagagactgcgacaggcaagtcgcctaaagtggttgaggaaaaacccaagggcaatgcatttctttctctttcgtttactagtgaacaaaaccgtagcactcgccagtacgaacatccgaacaaagctcgatatgccacagtttcatgtccatgcccccgatgtggtcatgtcccctcaaaatacgggaaaaataaataataaaggcgagataaacttccagaatttaaacataaatctgcaggacttggatctgaattttcccccaccaaaatgtgaacaagctaatggattagacttctctagggtaacgaatacggatgttatcccagatgtaatggaaaaaataatcgatgtcattttgaaaatgcaccaatcgacgagggaagcagaccaggctatcacggaagtcatgggggcttgggctaatgccagcaatcagttccctagagcattttcatggctggataagaataatgaagagcaatgtttatgggtttgggagcaaatgaggaagaaatatatttctattgataccaaacctatttcctgtgagcaacgctaccattttattattgctatctttgataactggaaagggtggagtgacgagcaactaggttatctgaaagaaaataaaagaagaaaggatgggaaattcatttctcatggattgggtggtacaagtactttaagccacaaagaaatattgctcgaagaactgagtaaagcttgggaacaaaaatcccgtaggaaaaagataaaagatacgcatccccctttgaaattgaacaaattataccaaaaaaggctgggccagattgctgaaagtaaaagcatgacgctagatgagacactcaaatgtcttatcgacaatgagttatcacgcttgagcatgttgaaacctgtatag

SEQ ID NO: 182158 - DNA, 207 bp, Klebsiella oxytoca
atgaacacccatctttctcttttagaagaccagtttgtcaatatggcatatatcaccagtctgacaggtttaacggacaagtggttctataagctaattaaagatgatgttttcccaaaaccaataaaaatgggtcgtagctcccgctggctaaaaagcgaagttgaagcttggctccaggaacgtattaaccaatcccgtaaataa

SEQ ID NO: 182159 - DNA, 597 bp, Klebsiella oxytoca
atgaaagactataaaccgcgttacgaagaacttcaaaaatgctaccagacttggttgacagattttacgaagctgactgtccgccagggaatgtgccatcaaaacatatatcattatcatagcctgacggttggctgtctcaatttctctgggaaagaagctgttattgctattgtgcctcactggctgcaccggcttatttacggaaaggcagaggcggcatcattatcgatagatgatgacctgagcgtaagcttattaacgcaggagcacctgttagcccaccatcccatgcttgaaggtgttctgctttccgaatgtgtccgtttaaaacaacgttcactggcaaataagctcaccagcctgtttcagcagtttagagggactgagcttcgtctaaagcttgtctggttgtgctggtacgatttgatgttggggaattgtcttgctgactggattgaaagtctaaagttcaaaacaagcgaggaggtaaataactgggtcaatgaccgacaggctgataaccatatgcttaccagcatgatggatgagtacgtctgttttgcctaccgcactgtactcgatccgctgatttga

SEQ ID NO: 182160 - DNA, 579 bp, Klebsiella oxytoca
atgaatattgaacgatcctggacaccagactggtttctggagtctgtcttgaactggcatacggatagtatgatcaaccggtatgcttgcctgcgggctattagaatagacctgttctacaaaaatggaacgactagatatgcacaacctggacaccaccaactggaactggatatccaattgttaatgaaaaacatgatgagtctgcgagccgtagtaggttatttctgggtcatagagtggactgaggatcaccgctaccacgcccacgcagtcttctggttagatggtaataggacccagataacctatccatgggctgcgaaagcgggcgagctatggagcaacattacagacagggaaggctggcatcaccgttgcgagtacaaggaacactatcgagcaaatatcaatgtccctgttcactacaacgatcctggaagtattaccaacatacggcaggtactcgcctatatgacaaaaatccagcagaaggaggggttgctactccacggctgtaatgaagtacctgagcgtccactgacaggtcgtccacgacttcccctgcaactcaactga

SEQ ID NO: 182161 - DNA, 1272 bp, Klebsiella oxytoca
atgagtcaattaaattttttggagaagcttctggatgggattgaggttgaatggaaacctttaagggaagtttgtgattttaaaaatggatttgcatttaaaagcaacctatttaaagagactggattaccgatagttagaatcacaaatatagatggattgaatgttgttttagatgaagtaaaatacttctcaccaaatgattataaggaagatatatcctcctttgaggtgtcaatgggggatatactgattgcaatgtcaggggccaccacaggaaaggtgggtttctataaaaacgaaaccaaatgttatctcaaccaacgagtagggaaattcataccaaaaaataatattttaaataataagtttttataccatttcttgttattaaatacagaggcaatctatatccttgcaggaggcggagcacagccgaatctaagctcaaacacattgatgtcaaaactacttattcccattcctatcccctccaacccggaaaagtccctcgccatccagtctgaaatcgtccggattcttgatacctttactgcgcttaccgctgagcttaccgctgagcttaccatgcgtaaaaagcagtacaactactatcgcgaccagttgctgagttttaacgatgatgaagttgagtggaagacgctaggggatgtaacaaaaaaatggtactcaggcggaacacctacagcaggcaaagctgagtattatgaaaatggtgatattccttggttaaggactcaagaggttaagttctccgatatcaacagtactgaaataaaaataactcaagctgcgttaaagaattctgcagcaaaatggattccagaaaattgtgtaattattgctatttcaggagcaacggcgggacggtctgccataaataaaatccctttaacaaccaaccagcactgtggttgtttagaaattgacgacacaaaggcgttatatcgttatgtcttccattgggtaagcttcaattatgaaaacataaagtcgctgggacaaggtgccagaggtgacctcaactcaaccattataaaaaatttcaaacttcctataccttatgcaaccgaccctgataaatcacttaaagaacaagctcgcattgttgaaattttggataaattcgacacgctgaccaactccatcactgaaggccttccccgcgaaatcgagttgcgccaaaaacagtacgaatattatcgggacatgttatttagcttcccgaagccggatgtggtagaggcgtga

SEQ ID NO: 182162 - DNA, 1200 bp, Klebsiella oxytoca
atgagcaagacactcctggaaatagcccaacagctgagtacgcctaagaaagtcaagaaaactgtctctgaaaaaacaaaggaagttgaagagaccaggcccgtaccaaaggtgcagttaatctacgctttcaatggcacaggcaagacacgtctttcccgggatttcaagcaatggattgcgtccaaagtcattgacggagaaggtgatgacgaagctgaacagccggcgttgccgcgcaaaaaaatcctttattacaatgctttcactgaggacttgttttactgggataacgatctacaagaagacgcagaaccgaagctgaaggtgcagcctaactcctatacaaactggttgctgaccttgctaaaagatttgggacaggatagcaatatagtccgttttttccagcgctatgcgaacgacaagctaacgccacacttcaatccagattttaccgaaatcactttttccatggagcgcggtaacgatgagcgttccgcccacatcaagttatccaaaggtgaagagagcaacttcatctggagtgtgttttacaccctactggatcaagtggtaacaattctcaatgtagccgatccggatgtacgtgagaaccgagaattcgatcaactggaatatgtattcattgatgatcccgttagctcacttgatgataaccatttgattgaattagcagtcaatcttgcagggctgatcaaatctagtgaatccgatttgaagttcattatcacgacgcataatccactattttataatgtgcttttcaatgaactgaacggaaaagcttgttacatgttggagagttttgaggatggtacatttgacctcacagaaaaacatggcgactctaacaagagtttttcctatcatctccacctaaagcaaaccatcgaacaggccattgttaacaacaacgtggaaagatatcactttacgttactgcgcaatctgtatgagaaaacggccagttttttgggctaccctagatggtccctacttttacctgacgacaaagaactttatttgaatagaattatgcagttcacaagccactgtacactatcgaatgaagccgttgcagaaccaacgccagcggagaaagcaacggtcaaactgttgctcgaacacttgaaagataactataacttctggcagcaggaacaaaaaaatggttga

SEQ ID NO: 182163 - DNA, 3120 bp, Klebsiella oxytoca
atggttgattgcaccaagccaattgctgagtccaataattttatcattttggacaaatacaacccggactggaagattaccgagagctaccagagcgaaggtgatctggagcgtgagctgattcaggatttagttaaccagggctatgaatacctgccaaccctgatcaacaccaaggctatgctcgccaatgtcagggaacagttgcaaagccttaacaatgtggagttcctggaggctgaatggcgtcgctttgtagagacctggatggacaagcccagcgatggcgttgtcgaaaaggcccgcaaaattcatgatgattatgttcatgatttcgtcttcgacgatggccatattcagaatatctatctgctggatagaaaaaacatccttcgcaataaagtgcaggtcatcaagcagtttgaacaagcaggcacgcacgccaatcgctacgatgttaccattctggtcaatggcctgccgctggtacaaattgagttgaaaaaacgcggtgtagctatacgtgaagccttcaatcagatacaccgctacagtaaggaaagctttaacagtgacaattctctgtttaaatacctgcaactgtttgtgatatccaacggcaccgatacccgttactttgccaataccaccaagcgggataaaaacagtttcgatttctccatgaactgggcgaagtccgacaacacgttgattaaagacctgaaggacttcactgccacgtttttccaaaagcataccctgctcaatgtgctgtttaactacagcgtatttgacagtagccagacgctgctggtgatgcgcccctatcagattgctgccaccgagcgaatcatatggaaaattaacagttcctttaccgcgaagaactggtcaaagccagaaagcggagggtttatttggcacaccaccggatcgggcaaaaccctgaccagctttaaggccgcacgtctggcaacggaactgagctttattgataaagttttctttgtggtcgacagaaaagacctcgattaccagacaatgaaagagtatcagcgcttctcgccggacagcgttaatggttctgacaatactgcaggccttaaaaggaatctggataaagacgataataaaattatcgtcactactattcagaagctgaataacctgatgaaggcggaagcggacttgtccgtctatcagcagcaggtggtgtttatttttgatgaatgtcaccgtagtcagtttggtgaagcacagaagaacttaaaaaagaaattcaaacgtttttaccagttcggttttaccggcacgcccattttcccgcaaaacgcattagggtcggaaacgaccgccagcgtttttggccgtgagttacattcttacgtgattaccgatgccattcgtgatgaaaaggtgctgaagtttaaggtggactataacgatgtccgcccgcagtttaaggcgctggaaaccgaaaccgacgagaaaaaactcagcgccgcggaaaatcagcaggcttttcttcacccgctgcgcatccaggaaatcacacagtacatactgaacaacttctgccagaaaacacatcgcactttccctggtgccagaggttttaatgccatgctggcagtaagtagcgtggatgcggcaaaagcgtattacgcgacgtttaaagagctacaggaagaggcggctaataaatcagccagctataaaccgttgcgggtggcaactatcttctcttttgcggctaatgaagaacaaagtgctatcggtgacattactgatgaaagctttgataccagtgcaatgaatagcagcgccaaagagtttctggatgcagccattgatgattataacgctcactttaagacgaatttcagcactgacagcaacggttttcaaaactattaccgtgatttggccctgcgagttaaaaatcaggacatcgacctgctcattgtggtgggaatgtttttaaccggttttgacgctccgacgctgaacaccctgttcgtcgataaaaacctgcgttatcacggcttgatgcaggcattctcccgcaccaaccgtatctttgatgccaccaagaccttcggcaatatagtgacattcagggatcttgaacgcgcaaccattgatgctattacgctgtttggtgataagaacaccaaaaatgtggtgctggagaaaagctacaaagagtatatggagggctttactgatatcgtgacaggtgaggccaagcgcggctttatggatattgtgacgaccttggaacaccagttccctgatccggctagcattgatagcgagaaggggaaaaaagccttcgttaaactgtttggtgaatacctgcgggctgaaaatatcctgcaaaactacgacgaatttgccatgctgaaagatctgcaaaaagtcgatatcagcgattccgatgccgtggaaaccttcaagacagcgcattatcttgacgatgaaaagtttgctgaattacagaccattcgtctccccacagaacgtaagattcaggactatcgttcagcctacaatgatatccgtgactggcagcgtcgcgagaaagtggctaatgacaaggataagtcaactactgactgggatgatgtcgtgtttgaaattgacctactgaaatctcaggaaattaacctggactacattcttggtctaatttttgaacacaacaggcagaagaaaggtaaagaggcactgactgaagaggttagacggttaattcgctcaagtctaggtaacagggcaaaagaaggtctgattgttgactttattcagcagactaaccttgatgacatgccggacaaagccagcatcattgatgcgttcttcatttttgctcagcgtgagcagcagcgtgaagctgacgcattgataaaagaagaaaacctgaatgaagaggctgcaaagcgctatatccgtacatcgctaaaacgcgaatatgccaccgaaaatggtactgagttaaacgagactctaccgaagcttagtccgttaaacccgcagtacaaaacgaaaaaacagaccgttttccagaaaattggtgaatttattgagaagtttaaaggggtgggtggacaaatttag

SEQ ID NO: 182164 - DNA, 1353 bp, Klebsiella oxytoca
atggacagtggattcgtagatctcgatatacttcttacacgaattaggcatgcccagtcgaagacatactttcttgatgccgttaaggcctacaaagcgggcgcgttgaggggggcactaacctccgcttgggttgctctcgtctacgatctgatagccaaatatcgtgaacttagtgccatgggcgatgcagccgcgactgcatttcttaacacctgggacaacgcgactaaatcaggtgacatccctaaacttctccaacttgagggaggcattcttgaagacgcaacggccaatactcaggtagtcaaccggttagcccgaactcacctagaccgtcttcgcgaggataggcatctttgcgcgcatccggcattctcagcagaagcagatctattcgaaccttctcatgagttagtgcgacttcatttagtaaatgcagtggaattcgtcctatcgcaagaacctctacagggaaaagcaatattcgagttgtatgacgttgatgttcagtcgcccggctttcctacggacagtaaacgcattcttgattatgtagaacaacgttatcttactcgcgtacgcgctcagaatatcagtaacttcggcatggttctcgcaaaatcacttctcaaaggcgtgccagaacaatgggaaacgctttatcaccagattattacatcattagtcgccgtacgagaccgcgccagcattgcttggccaaacgtttcactgtcaattgttaggcttattgataatctagaaccacgacatcggcctagagcgatcgcatttattgccgcatttaatgagctttggatgcagcttcaggagccaacgcgaacagtcttgctagagactattgaaaatgccaatccagaaaatatcactgattaccgtattttgactggtgtaactttcgtaccgtttcaagcctcgctgcaaaggctaatagctggactaactcaacagcagttggcctcagcgatcatctttaacccacttgctgagctttgggataaggcaatagaatactatgcggaatcaggtagctggcgtggatctgaggggaactttatttctctcgtcataccattttctggtcgccttagtcagcaacagttcgaccaacttctagatgctatcatttccaatgggcagaattgggatgccgctgagacgcctaagcttctcctaggaatgctccgcaatgctttacccgccaacttaccaactatagatgcgcgtgctcgtttttatcatcacctagatcgccatcacagtattaataagtatagtgatgtactcacaattctacaaaccgacggctggcttctgccaccacctgaataa

SEQ ID NO: 182165 - DNA, 933 bp, Klebsiella oxytoca
atgactagtcgcccacagatgattattaatgttcttcaggctaatcctgatgagcaatttacagcccgtcagcttgcccaaaaaatcattgatcactatggcgcagagcttgctgtaaagcgtcaaaatcctcgattcgccagtgatgaagatttcttgagtcaaatagctgctgaagtcggtgggagcagaaccgttcaggcaaaagcgatgtgtcctcaggttatgacgcgtgacaaacctcggcccagactttattactggggtaaggaaatcgataatggcgtgcaacaagagtcatcttttgatattgctccgactccgtctgctgagacggtagctttttctgagcatgctctttacccgcttttgattgagtacctttctgaagaagaagaattgctttgccgtcgtatcgatgaaaagcgttcaagcaacaacaaaggtcttggggcaaaccattggctttatccggatattgttgctttgcagcctctcgataaaggttgggatagcgttgtgcaaaactgcgtacggtatagcgaagggcgtttaacccgtctgtggtcttttgaggtaaaacgtcagcttaaccgtagcaatgttcgagaatgtttcttccaggcagtgagcaattcaagctgggcccattatggttatcttgtcgcgaccgaaataaatgaagataagcagcgtggtgtagaaagagagctgcagatgttgtgtgcattgcatggtattggcgtgatccttcttaatccgcaagatcccggtaatagccaaactctgattcctgcacgagagcgaacaagtattgattggcaatccgtcaaccgcctggtagttgagaacaaggattttaaagagtttatcgatctggtttccgattatcaccagacaggaaaaatacacaaagcgctctggaatagataa

SEQ ID NO: 182166 - DNA, 1257 bp, Klebsiella oxytoca
atggctctaactgacatcaaagtcagaacagccaagccaacggataagcaatacaaactgaccgatggcaatggtatgcatcttctcgtccacccaaatggttcaagatactggcgtctgcagtaccgctatggcggaaagcaaaagatgctggctttaggtgtttaccctgacgtatctcttgcagatgccagagctcgtcgcgatgacgctcgtaagcttttagcaaacggcatcgatccgggagataaaaagaaaaatgataagattgagcaggaggaagcacgtacttttgagcagcttgctattgagtggcatgccacaaataaaaagtggtcggaagaacatagccgacgagtgctgaaaagcctggaggacaatctctttccagccattggcaaacgtaatatagccgaacttaaaacacgggatttgttagccccgataaaagccgtagagatgtctggacgtcttgagatcgcgtcacggctgcaacagcgaactacggcaattatgcgttatgccgtacagagtggtttgcttgattataatccggcacaggagatggccggtgctgttgcttcaagtaaccggcagcataggcctgcgttagagttgagacgtactcccgaactgcttcagcgcattgatagctataccggcaggcctttgactcgtcttgccgttgagttaaccctccttgtcttcatccgctccagcgaattgcgttttgctcgttggtctgagatcgattttgaaacatcaatgtggacgatacccgcagagcgcgaggctattgaagggataaagcactcccagcgcggctcaaaaatgcgtacacctcatttggtgccgttatctcgtcaggcgttagcaatccttaaacaggtgcacaaacttagtggcgatcgcgattttgttttcattggcgatcacgaccatcgtaaaccgatgagtgaaaatacggtaaacaaggctctgcgcgttatgggttatgacactaagatagaggtttgtgggcatggtttcaggacgatggcatgtagctcgttgatagaatcgggattgtggtcgagggatgcggttgaacggcagatgagccatatggagcgtaactctgtgcgtgcggcttatattcataaggccgagcatctggatgagcgcagactgatgctgcagtggtgggctgattttcttgatgcgaatcgtgagaaggcggtgagtccgtttgattttgccaaattaagcatggaatga

SEQ ID NO: 182167 - DNA, 1227 bp, Klebsiella oxytoca
atgccgaaaaaagccaaagaactttcgggacttacagtttcaagactaaaagatgaaggaatgtatgccgttggtggtgtggatggcctataccttcgaatcagaggtcagtcccgtgcatgggttctttgtgttgctatgggaaccagaatcaacactcttgggcgaacagttcccagaagattgaatatgggtcttggcccctatccagaagtttccttagctgaatctcgtgacaaagctcgtgagttacgtaagcagattcgcaacggtattaaccctctacaagaaaagcatgaacaaaaagctcaacaggaagaacaagcccgtaagaagaagacgtttgctcagtgttgtgaagaagtgctggaaatcaaaaacagcgaaatgaagaataaaaagcatctagctcagtggcggtccactctggaaacgtatgcctatcctttcattgggcaaaaagcggttagagaaatcaccaaagttgatcttctggcaatactggaacctatctggttaaccaagaacgaaaccgccagtcgtctacgtggacgtattgaaacagtgatcgattacgccaaagccaaagaatacttcgaaggtgataaccctgccgcatggaaaggcatgcttaaacctctcctccctcagccaagcaaagtgcaagtccaaaagcaccatgccgccctcccctataaccagatcggcacttttatgaaggaacttcgtgaacgaagcggtatttctcctcgtgcgcttgagtttgccatccttaccgcagcgcgttcaggtgaaattcgtggtgctgagtgggatgaaatcgatcttgaaggcaaaacatggactatacctgctagtcgtatgaaagcagcaaaagagcatcgggttccgctatctgatgctgcggttacattgctaaaggatttaccacgctttaaggacaataattttgtgttccctgcccctcgcaaaggacaactttccgatacagctttactggcaacgttgaagcgaatgggatataccgacttaacacagcatggattcaggtctacattccgtgattgggctggtgaaacgaccaactaccctcgtgaagttattgaacatgcgttagctcaccagttggcagataaggccgaagcagcatatcaacgtgggactctatggccaaaacgggtggcgctgatggatgagtggtcggggtattgtcttgcctatgcttag

SEQ ID NO: 182168 - DNA, 393 bp, Klebsiella oxytoca
atgccgaccggtagccgccagcgtaccaccgttgttgatgtactcatccgccagtgtgccgccatcagggctgcgtacataggttgtgctgccatcgggtatattcgcgatatcagcctgtgccgcttcaagcgtcatgtactgacgactgagagggatgatgttctgccggatttcatcattcttcgccatcatctggcgccaggtatccagcggaactccgccccgatcgttaaccgttccggccggaccgttcaccagttcgtcagcgcgcttgacgttatccagaaaaatatcggggtcagtggtttgccccacgggtggaacataggccatgttttttgctccaaaaagaggcttcgcgcaaacgagggtttgagcgaaaagagttaa

SEQ ID NO: 182169 - DNA, 369 bp, Klebsiella oxytoca
atgactatcacactacaggcagtaaacgagctcattcagtcgctggagtctgcgggcgagctgtcgatcaaagagacaaaggttatggcgctggcgaaagcttaccagcagctggctgcggagaatgtggcgctgaaagattgcgttgttaatcatgctcccgcagtagaaaactggaacgcatgggccgacccagaagacaagattcagaacgcacctgaaacccccgccaccgatcgcatcgtagccgaagccgaggcgcgcggagttgagaaggccatcgaatgcatagtgcaaacaatcacgcctaatcacgaaacgatactcaaagaattcgcccagcagctgcgcgagggggcagacaaatga

SEQ ID NO: 182170 - DNA, 294 bp, Klebsiella oxytoca
atgaaaacaaccaaatccaagaaaacacaatacagcggtgaaatcacgatgatcgaatttctcaaagctaactctgatttgactacgcgtgaaatcgccactgcgctggggcgcggtatgtcgtcagtgaatggccagcttcgccagctgcatggagcgggtcagattgtccagagcggcctacgcaacggcgcagccttgtggcgctttaacgacatgccgtttggctgtgcgaaccgtatccgcatgatgtttgaaaaccttctgagggaatgtcgcggggtcgctcaatga

SEQ ID NO: 182171 - DNA, 228 bp, Klebsiella oxytoca
atgtacaaatcggatgctctttcctttttcggcactaaaacacggcttgctaaagcagccggggtccgcctttcttcaatttacaagtggggtgagcttgtaccagaagggcgcgcggcacgtcttcaggctgcttctgaaggtcagcttcattacgacaaagatatttacgaccaatatcgtaacgaaaaacgctctggtgaggtgaatcatgaaaatcaggcatga

SEQ ID NO: 182172 - DNA, 507 bp, Klebsiella oxytoca
atgagctacacaacagtaatacgagtttggcctggcgaaaaatcagagactgctgaagagtttcgcaatgcatggggcagcggtcccgtaatctggaacgacatggctatccgttatctgagagcggccccttatggttatatggcatctatcgataagctatggcctctggccaatcgggaggatatcccacttcatcaccgagctgtattagcaatgacatataaccggatgtatgtcctcaaggagcattactcccgtgcagctgaatacatcaggctttaccttgctgatttccctccaaatgaagccactgtaaaccactggcctgctatcgctgaattatttgagagaaaccctgactgtccggcgatagggctatggctaacctcggtctgtgaagacccctttgctggcgaatgggatgatgaagcggaagagtattcgcagccagactggccgagatactggagtttgtttgatcatcttgatggatccagcatttga

SEQ ID NO: 182173 - DNA, 123 bp, Klebsiella oxytoca
atgaacaaactacaaattatcgctgacatgcttaaactggctgaacgactgaacacaattgtcgctgacatggaagagcgtaagcaaaccatgcttgctgagatgaatcgcaaggcagcttga

SEQ ID NO: 182174 - DNA, 348 bp, Klebsiella oxytoca
gtgtcccatgagttcagagacgccgtcaaagttgatggtgcagaggcttcaattgaagagaagcaactgtatcaagtgcaaattgcggtgaaatcattaatcgattttgttgtcacgagctttgagcagcttggtattgagaaacttcatgagttggttgatccgtcattagacgaactgcatcagataattctcgacctggacattaaggctaaagagctcgatgctcttgatttgcagcaagtactgttgacggctcaaattcttatcagggatataaaaaacaaaaaccctgacatgtgtgccattggctctagaactctgaaaagagctactatttttaagtga

SEQ ID NO: 182175 - DNA, 228 bp, Klebsiella oxytoca; identical to SEQ ID NO: 103868

SEQ ID NO: 182176 - DNA, 321 bp, Klebsiella oxytoca
atggagaatgcaatagcccgaaagttagaaccgccaatcctcaacccgattgagatagaaggcattttgctaaaccgccttttatctattggccagaaggtttttgcagaaatgcggggagtgagcgaatcaacaatcagtcgccggaagagcgaaggatattacgccgaaatggcgaaagaaatatcagcgctgggcctgcaggttgttccaccggaagcggtggtagtttcccgccactacctgcagtcagtagagacgcttgcagatatcggattacgtgcagagcggtgccgtccagggccgttagggtgggactga

SEQ ID NO: 182177 - DNA, 309 bp, Klebsiella oxytoca
atgactatcacactacaggcagtaaacgagctcattcagtcgctggagagtgcgggcgagctgtcgatcagagagcagaagttcctgaagctggcgaaagcgtttaagcaggtagctggggagaatgtggcgctgaaggctgtttttagccagggggaaatcccatccgaagcagtcgatgcattcatggaaaccgcagtaatggatcatgactggaatgaaacctccgagtggtcatgggttgaaaacgaaacagaggttatcgggatattttcgccagacctcggtagtgataaccggatgccataa

SEQ ID NO: 182178 - DNA, 1251 bp, Klebsiella oxytoca
atgcttgatatcaacgtcgcttcaataaaaacaagtgttcgttttgtcgttagtaaagaagatattgcagaggctaaacgggctgcttctgacttaaagaaagccttcgagaagattcaagatccgaagatgaacttcaagcgcatgaaagagaatatgcgacaggcgaagcgtgaaacagagaaagccaataaaaacgccgccaaacctcgtagcaacgatgaacaagaaaaggcaagggcagctaaggcacaagcccgtgtagaggctcaggcagcgaaagaggccgcgagaaacgcacagcggcgtgaacgtgcggagctaaaactcctggatacagccagcagctttaaatcaatgcaacaccttaccaatgttgagcttacacaggcggcattacaggccagcaggattacccgtagttatgctgatggaacgatcagcctacaacgccaaaacagcgagatcaaacgcctccagcagagctacagacgtattaacgcagagcgtagggcagcggcaaaagcgggaggggctaacgctcttgctggcggtggtaaggctacaggggctatctctggctctctgatgggcttaggcactggtgcgctggctggcgctggtattggtgcggcggcttatggcgcttattcatggggcaaagaggctgttaccgcacaggaagagcgcagcgagattgtgcagcgtgccagattgggcggtgtggattataacgtcctccaggcactttcacagtatgcctcggctaacgggatcgatagtgggatggggctgcaaggtcagcggaagttgctcgacaacggaaaggacatttccgaaaagctggcagacagctacaccaacagcacctttgataagaagtctggaaaatggaaaggcgggaacgccgcagtaaatacagccctgaacatgggattcactaaagacgatctgaaatcctaccaatccaatccgtttggcttcgtttctgcctataccaacaccatgcagggcaaaggctattcacaagagcaaatccttcataacctggaagaccttgcagacgatttaggcttgtatcacaaggcattttctaatcaaggaaaagcgatcactgatcaggtggacgtgctcaagcgtaatggtcagtggctggatgaagcccagcaggatcagcttgttcaataccgtaagtttaaccaggagcttagctgtagcgcggcatttttttttgcatcaaaaagcaaatga

SEQ ID NO: 182179 - DNA, 1038 bp, Klebsiella oxytoca
atggcttattcagatctattttctggcaacatgtacgattttgccagcccgtttacattctctactcagttgaatgcaattgtaagtaatcttgggttatttaaaattgagaaccacgacgtcaatacaatcgctcttgagaaaatcacagatgtgaaaaatcttgttgcacctgaaaagatgccctacgctcaaagcgattggaacagtgcagaacgtccagaattcagcaatgtgctgtatcagcttaaatatactaactcccttaactccgtcacctcacgtgatcttgagcagtataaagcgcgtggaacagtagacactgctgatcaaatcaccctcgctattagtgatttcagcgatgcacaatacgcccaggtgagtaatacggtagaggttgacctggtagaggcgctgttagggcttcgtgtgcagtcacaatacgccggacagggtaatttagatttcctcgcaggtgggagcaaaaccgcatacacgatggatatcagtgcaagcgctaacgtgttccagcaactaagcgagatcgggcgcattcagaatgtgaaacttggctcaggactggcacaggctaaacagggcgtagtgatcctggcctccggtaaagcagccgtagcgctacgctatcacccatcagtgagagacttcatggtgtatacgctccctctggagcagggagacaacttctacacccgtactaaaagtgcaaaccctgctttcgaaacctggacactaaacggtgtcaccgtgatcgatgtgacaggctatagcctcatcactgacaaaatcggggttgatggctttgtgagcattcctgttatgtctgaacagtctaacgcttacgttcttcactctggtgtcggtgttcgccatgccacacaaggcaaaggcgcagagctatatcaccagtatgtcgtagtagatcagcgttggggattcccagagatcgcaactgaatgcagttatctggcaattgtgaatattccacaagcgatcatcttcggtactgtcgcagaataa

SEQ ID NO: 182180 - DNA, 378 bp, Klebsiella oxytoca
atgcaatttggaacatttcaaactcttaacgggaataacagccacgcccgatataaagtagtggcttacgcatctgatgcaattatgcaggataagctgatccgtgtggaatccggtattcccgattctctcattgttggtgagcttgttgacgttacaggtaagaaagctgccgcccctggtgacattgcgtatgttgtcgtagaacctgcacgcgctggcgataaggcgtttattgtagcttctccagaacatactattttagccctggttggcattgaatttggaagtctggataaatctctggctcaagcgcaattagcaactcttggctttactttcactgactacgacaccgtagccctacgcaccacctaa

SEQ ID NO: 182181 - DNA, 234 bp, Klebsiella oxytoca
atgttccttatgaattatgatcgtgtaataacacacaaaggtgcttctcttattctctctgaaaagatgatgaaacaagcggcgaatgtattaggtgtaagtgtcgaagagattcgagaggctacagagaaattctggcctaccgccactatcaccaaatcaaaagaaggttctcacccatcatcagggtttgaggaacgattaaaactaaaagcaatagcaaaaggaaaataa

SEQ ID NO: 182182 - DNA, 318 bp, Klebsiella oxytoca; identical to SEQ ID NO: 164607

SEQ ID NO: 182183 - DNA, 225 bp, Klebsiella oxytoca
atgcacacacagacaacacaaactaaaagattcgcgcagcacgttaaatgttgcgaatggtattacgatgaaatcgagaatgtcatcaatgatgcttttctgacagatgaagaaaaaataatggcacttgatgaccttgaaaacagaatccttactctcgcagcgcctttcctggctgctgcaaataaaatcaaaatgacaatggaaaaaaagaaaaatgactaa

SEQ ID NO: 182184 - DNA, 381 bp, Klebsiella oxytoca
atgtctaagaaagaacggaacacgctcacacgcattgagcgagagaacaccaccagagttaagccttcccgcctgtacgtaaagtctcttgaagaaatccctggtgaactaatagaacacgttgaagaagtgcattcacaaccgccctctgtggaagagtgggctgctttgaatgatatcctcacttcctgtcctggtgcgtattaccgcccacgtaaacggaaggtttacacctgggatgactcaaatttgaaaaaatggcagtgcctcggtttcacctctttacgtcattacctcacattcaacgcaatgaataacaccgtggcgggagtcagggattttgatgaactatttaacatcggagacagcaacacagaataa

SEQ ID NO: 182185 - DNA, 282 bp, Klebsiella oxytoca
atgaacaacctgtacttactgaacgaagatacaaagtttcaactcggatgcaacgaagtatgcagacgaatctataaccactttgcaagcctccaccgtgagaatggaacattccgttccagcgtcaaaaccctggcgtctgccctgggctactcggaaagcgggatcagatattggctttcgctcctaaaagacgcgaaggtgatcaccattactcgcaggggcgggtattacgattttgacgttaaccataacgtttctttcatcacctcgaatcactaa

SEQ ID NO: 182186 - DNA, 699 bp, Klebsiella oxytoca
atggcaaaaaccctcgccgagattaaggcagactaccaatacaccgacaagaaaactggtgaagtaaaagatcgtacaattaacaccccacattatttccgagacattcccagaatttattctcccaacctccaggatggttacatggacttttgccccaaggcgcaaaagttgtattgctattttcaggggtgggaaaattcagggaatttctgttacgaaagtcaggaagagcttggaaaggtgatcgacttatccagggagagaacctgcaaactcattaagaaactgcaagatgcagggctaatcacgaaagagaaaaatcctggttatcgttccaaagtttaccggacgtttccgatcactgatgcgcacgttaccccaccagaagcactgacggtgcaacctgttataatttctgatgtagtgccacaccaaccagcgcctgaaacagcgaagaccgcagtaacccacgaagacacaccagcgataacgcctcaaagaatccgtacttctgacgcagtgaaacacctgtttgaaaatctgtcacaacgacgagaggacgagagcttttattgctggtcatcaagggtgttacaacggcttggaatagatcattcaatgggaatagagcaactatttcaggaaacacacccgtatgaatacacccagattgaacaatcaacgatcccattttaa

SEQ ID NO: 182187 - DNA, 1383 bp, Klebsiella oxytoca; identical to SEQ ID NO: 126213

SEQ ID NO: 182188 - DNA, 1656 bp, Klebsiella oxytoca
atgagcattatgatacaaccaacaaagaatcgtttcggcgtttacatcgtccgtaaagtcgtccctaggcacctgcaaggcatcctcaataaacgtgagatcaagttcacccttgataccaaagacgtgagggaggccagagaacgtgcacccgcaaaaatcattcagatcgacatgatgctcaggctggcagaaaagcagcttgaagcggaagagtccttaactgatgccgatatcgagatgatcgctggtgtatgggcttcacgtaccatgcagaatgacgagctaatccgggagcgatacctcgttgaagatgttctcgatggtaaaacaggaatgttccactcgcctgaaaacgacatcattcacgactggctggaagaccgcgaacgcaagccccgctacaaatcagaaacatggcaggcagaacgagacgaatctatctgcaaactgatggccgtagagctggatgaggcgctcgaatacacgcccgtagcccttacccctctctggcgaaaccgtctggcatggcgactagctgaacgccgtagcgatctgaccaacacctatctactgaatctccgtccccgtctctacgccaaaagcaaagggctggattcactacccgttgaaaaaacgaagacgctcaccttcgcagacctctttgaacgttataaagagcacgtcaaacatcatgagccactgcgggcggaaaaacggattatcgcctacacgacatcggcaaaccgcttcatcgagtttatcggtctgaaggccgccgaagacatcaccgttactgatctcgctgacttccgtaacctgctcgaaaaactgccatcccgcccgtcaaaggctgtgcgattgctccccctgcataaacaggtggaagctgaaggtgaaaaaatcagccctgtccgcgtcgagaatatcatgaaggagctgtcgtcggtcttccgcgtcgcggtagaagacggcaagctcacagataacccgctcagcaaactgaagaaacgcaaagccatcgctggcccggcaatcatccgctctttcagtcgcgatgaaatccgccgcatcttctccctgcccatcttccacggtgaagatacaccgcacggggcaatggcgtactggataccgataatcctgtactactgtggtgcccgcgttgaagaaatcgcccagctccgtaaaggtgacatcgtggaagtggacggtaccccctgtttcaggctgacgatgggtgaaggccagtcgatcaagatgggtaatacgcgtcagttcccgatacacagccacctgctcgaactgggcttccttgatttcgttcagtcctgcacctaccagctctttgccgaaaaatcggaagtaaacggctcatattcctataactatgggcgctggtggggcaactacattcgtgaacacggcctgacgaggaacggcatcaagcccacccacagcttccgccactctctcgttaccctgttccgtgatctggacatccgtgaagaaattcaggacagcatcctcgggcacaacgaaaactcatctgacagagcgaaggccagccacggctacggagagaagtccgtggaggcccagcgtcgagccattgaacaaatccccagactgaagctaaagcgactggaaaactga

SEQ ID NO: 182189 - DNA, 936 bp, Klebsiella oxytoca
atgttaagaattcctgactcagactggcggatcgttgatgggggcccccaactttccgttgctttcttgcggaaaatgacgcctcaggcagccagatttactcaatgggtacagcggacacatgccaaattgcttaaggctcccgaaaatgtcctgtcgtgctgcacatccgggttaatccacggtgaaattcccgacaaaaacggctggctttccgctggagatgcccttgcaatgctgacttacagcgttcatcccagccagaacgtgcctctcattgatgcgattgagcaaaaatcaggtctgacactgccagtgaggcccggtgaaagccgtcttgaggggcaatttgctgtcaaattacgcgatttgatagtcgaactaagggaacagccgcatttcgtccactatgagcttatacagcaaaagcaaattgaccgttatcgggtggatttcttcctcaccgagcagtggtacaccgatatggcaaaaggaaaaaccgctaaacgccaattcattattgaatttgacgaggaagcccaccggacgacacgttatcagctcaatgataaacggcgggatcggtggttgcgggaaaatctgcccgacgtaaagctaatcagggtcagacacgaagagatggaagtatggctggaggctgtccgccagctaaagcgcttcgtcagtatggaggattgctatgctcactgcctgcgaatggcctgtatcagcctgtctgaatctacgctacagataagcagtgactcggcccgaaaagcctatgatgcagcccataacgagtgcagtttcctgctaaaaagtccacggcagccccttagtgagatgggtaaactgctggacaggctgacaatcccctttgataaacgcagggacagatacttccaacgtgcaaaattgaggtcatacggcctctaa

SEQ ID NO: 182190 - DNA, 432 bp, Klebsiella oxytoca
atgcacgatgaaatcattaatcaggcccgcgaaatcctcactcaacggctctaccgcaccgatgctctggcatcaccacaagataccgcaagctatctggctttacagcttggcgaccgggagcgagaagtgttcagcgtaatattcctcgacaaccggaatcacgtcctgagttatcaggaaatgttccacagcagcatagcgacaacgccagtctatccccgcgagatcgcccgacaggcactgaaactcaacgccgccgtaatctgttcccataaccacccatccggcaacgccgagccgtcaggacaggataaggctataaccctgaagttacagaaggtcatggaactcattgaggtccggctgctggatcacattgttgtcggcggcggacagacggtttcattcgctgagaggggctggctatga

SEQ ID NO: 182191 - DNA, 567 bp, Klebsiella oxytoca
atggcttctatcggctacgcccgggtatcgacatctgggcaacaccttgattcacaactggcagcgttatctgactgtgagaaaatctttcaggaaaaaatcagcggagcaaaagacgaccgccccgagcttcaggcaatgctgaagtgggtccgggaaggcgacaccgtgcatgtaacaaagctggaccgtctcgcccgcaatactcgccatctgctggaggtgtcggaataccttcagaggaaaggcgtggcgttaaatatcctcaatattggcatcaatacggcaacaccgaccggaaaactaatgctaaccatgattggtgcaatcgccacgttcgagcgagaaatgatgctggagcggcaggccgagggtattgcactggcaaaactcaagggcaagtataaaggccgtaaaccaacagctcgcagcaaagctaaagaagtcatagaattagtcgaaaatggtgccagtaaagcagagatttcccatcagctgaaaatcggtatcaccagtatctatcgaattatccgagatgagcgtccagacctcttagacaaacaataa

SEQ ID NO: 182192 - DNA, 651 bp, Klebsiella oxytoca
atgaaatggctattcgcggtgtgcagccttgctgccttccctgctctggcagtatatcaaccaacagcaaatgaaatagcattactggaaaaattgaagaagggtacggaacaaaacttgaaatatgctcttccacttcaatctaaagccgaaatctgtagatcctatcttgatctctatcgccgtgaacatcctgatttcaattactacaagatgagttcatacatgacgtattgggggatagttcaaggaactacagaacaatcaatgacaatagctcataacgtactatcgcagttgtactactacgagaacaagctttatgagaaatttgggcgatatacagccacccctgcggatgtagatgcgatctttgagaaagcgaaagaggataattatcttaacttaaatcaatacattgcgataaatcagcaattcagagaaaacctccgcaaaaaagatctttctgctgcttgtatgacacctcctggcgaagacccaagtcgagtgagggacagggcatctgcggctactcatgtagaaaaactcttctatcaaggctacttacctatcgataaggagggttcctacaatgatgagtttaatgagatgtattcagtccttaggaatattagggagtcctattactga

SEQ ID NO: 182193 - DNA, 1257 bp, Klebsiella oxytoca
atggcactgactgacgctaaaatccgcgcagccaaaccggatgaaaaaccttataagctggccgacagtggcaacatgtttttgctcgttcaccctaatggctcccgctactggcgattgcgctatcgtcatcttggtaaagagaaaacgctggcgcttggtcagtatcccgaagtttcactgtctgaagcgcgtgataaacgcgatgaggccagaaaactcatatctgacggtattgacccgtgtgaacaacggagagcgaagaaagctgcaccggaggccgtaaacacttttgagctcattgcccgtcaatggcataagagcaataaaaaatggtccgaagctcacagcgagaaggtgctcaaaagtcttgagggtcacgtatttccctatataggtttacgcgatatcaccacgctgcgaacaccagatttgctggtacccgtcaaagcggccgaaaccaaagagatatacgaaattgcagcccgtcttcagcagcgtattacagcaatcatgcgctatgctgcccagtcaggcatcatcagctataaccctgccgtggatatggccggcgctttaacaacggtgaaacgccagcaccgccctgctcttgccctgagtcgtatttcagaactccttgaacgtcttgatgcatacaaaggccagcctcttacaagactggcaacaaaactcaccctgcttatcttcatccgttccagtgaactacgctttgccagatggtcagagatcgacttcaagaaagccatgtggaccattcctccagagcggaaacctattgaaggggttaagtactcgcaccgtggttccaaaatgcgtacagagcatctggtcccgctctccagacaggcgctggatatactgaagcagatccacgccatcagtggagaatatgaattgattttcactggcgaccacaatccctggagacctatgagtgaaaataccgtgaataacgcattgcggttgatgggctacgatacaaaagtcgatgtctgtggtcacggcttcagagcaatggcctgcagttcattgattgaatctggtctatggtccagggatgctgttgaacgccagatgagccatcaggaacgtaatggtgtccgggctgcctatattcataaagcagagttcttagacgaacgcaaattgatgctgcagtggtgggctgattttctcgatgcaaatagtgaaaatccggtctcacctttcgattacgccagacaacaatacttataa

SEQ ID NO: 182194 - DNA, 1062 bp, Klebsiella oxytoca
atgagttttttaacggatgaagaaattaatgcactgacaataaaacgaatgatttttcatgtcgtcggtggggaactggagatccccgtgctgctcagtgaaatatcaccgcctgaacacgtcgattttttcctggaacggattaaatctgcattaagcggtaacatgttccgttttacggaattgtccaataccgagcgtattctgcgcctcatcaggaacaatgccgataccgacgcggactgcttcaccgagcagtccacctttctggcaaacgattttcagtctcaccaccacacaaaaaatgccagtatgggggtattttttctttttgagcttcacaccctcaacgatgaaaaactgtttgccctcattaaatatgataacgaggatgtggtacgttacgtgctggatgcggagggagacgagtttcaggttcccagactcgaacgtttccgcgaaagcttcgtcaagaaagctgaagccatgcagaaaattgctctggtccgcctgacggaagattctcagggagggcgggttgtcgtacgggatcgcagcaaacgaaccaatatctccgtttattttgagcgttttttacaggtacagcgcgtcaacagtacaaccgatctcagcgacaaactggttgccgcactcaaggatgtcttcaaaaagcatcgagacctgttaccggacgacatcagacgcagcggtattaacaagatttatgaaacgttacatcacggggcgcaggattttaacaccgatgaacccctttccctgctgaaccaaatttttggaccaatggaagaagatcatccattggtcaaatcctttacccgaaaaataaaagacctgggaatttcaggtgaatctttccggatcacccctgagaacattcctaagccacggaaaagaaaactggaaactctggaagatgttattgttatctacgatgaggataatgcaccggatatccaaacgatggaagacgggcgaaaacgtatagtgatagtgactgcagggctggtgacagatgacatcgatactggaaaaaatcggtaa

SEQ ID NO: 182195 - DNA, 1479 bp, Klebsiella oxytoca
atgacatcgatactggaaaaaatcggtaaggcaattgactgctcacgccgcgcatctgatctggtgatcacagaagatcagcaggcaaccacccggaaactattcatttccggaagcatggataatgacacccttcagttatggggggaagtgatagatactgatgcagaaaacctccggatcacctttgttgatgaaagccgggatgatatccaccccgctcagggtgtccccggtcagaagcattttatcaccataatcagcgatgaaatccccgggatcctgcgactcttcaccctggaagggtggcgcacgtttttattccaggatcccagactccgtcagtatcaccgcatctgcgccctgtttgtcaacgaatcgtttgaaacacaacagtggaaggtcgtgccatggaaacagatgcagccggaggggagtgaaaccaacgcccctattcggaccgtctccgtcacaaaaagtattatcagatgtttttcaaccgactttcttcctccggatactattgctccctggatcctgatattcggcgataaaatgaccggtgaaccaatgaagctctgggcgtccctcgcctgccgggagttgttgaagtgtttcgtcaatgagcttttttccgccgaaataaaaaaagtcggattgtccggaaaaccgccacgaaaaatccctttcggggaagaacatgcggctctacccgcctttgacgtcattcaggaaacggcaaaatggatttttctggaagggaacgaaactgagcttaaacatacctttctatccagcgaactggccagagaatggcccgagggtgtcacgttttgtgaaggcattgtgtgtcgactccccccggcactggagtcagcccgactgctctacaaagcccatatccggacagggggaaaagacaccctgaaatcgctgggcgatttgcgaaaaagcctgacagaggatacccaaaaaattctgcagcagtcgcgggacctgtcttccgcgttgtggaaagatatggccctggttatcagcactctggttcttcgctacagcctggaggctctgaaggcaagtggtccgcaaaaagtgtatgctctggctttttgtgcactagccctgtatatcgtcatctcatacgggatgtcggtctatatcaaccggcatgccctttccctgcagggaaaaaacagaaccacctggagaaataagttatatggttttctggatgaacaggattatcaggaactggcgggttttcccgttaataccgcaatgcggtcatatcaccgggttgagcgaataacgtcagccatcgtgctcattctggttacgctattactcacggcagcagcaagtgaattctggtcgctcagtatgcttctgcagtctggctacacttgggttatgagtgcgctacagcttctgacacccacgaccctgtgcggcccgaacggatttcttgtgtacccttaa

SEQ ID NO: 182196 - DNA, 642 bp, Klebsiella oxytoca
atggaaaataaaatacaggacacagaaatctggtcagttaattatcaggccagatcgattctgggtaacgatgagaccagatggatcacaacaatcaccggcgatattattgccagtaacgatgacggagaagaacgacttgcggggagagtgaaatattaccggattcacgctaatgatgcgatggataatggctaccgaccggaggatatcctcgatctcaccagcaatactgcccattttctggggacaatcttcgataacggtggatgttatttcagacaaaaaattcaaaacctgtttgatactgaaatattgaactcagacctgctcctggtcgaccgtatcgagatattaccaccattcagagggaaaaacgtctttttacaggttattaacgacgggatacgctgtattggcggtcaggctgagttaattgccctcaaggcgttcccgctgcaatttgaggtcccatcagaagatgaagagcatatccaatggcagaaaaaaatggccaacgaccttttttgtcaggaacaaaaaaaggccttacgccggctgactcgttattacaagaaaatgggttttataaaaatatcggatacaggtgtgatggtaaaacctgtcgtacaactctggtaa

SEQ ID NO: 182197 - DNA, 738 bp, Klebsiella oxytoca
atgaccacatgctctgagcgttttttaagctacgatgatatttgtaaacgccctgcttttgatcaaaattatgagatcagccctgataattttcataaactcattggtaaatattcttttaaagaaagacatatttgtcaggtacgtacaaataaaggaatttgtcgtcagaaacataataatggttggctgggtgtttcactggaaggagttgaagcactgattggttgtgattgtgcggtaaactatttttcagcccataatgatttcatccgggaaaaaaatcgtattaatgatgaacttgaccggaaagaagcacttgagaaaatatcattattaatcgaaaataagctggaaacggcgagctatattgtggaccttgaaaagacagtcaaagaggaagaaggtaagctaagaaaaatttataataccttccccaatgaggttttgagttttatctacgatgctcagagaacaaataactgggatgtgtttgttgatgtgcaaagattaaaaacggttgaagatgaaaatggagaattacatacccaggagatctgggttaaaactaaattgggaaaaattagtgccatctcttcatcaatggctttaaaacgtcttttagataacgtgacagacctcaggaaattttataactcatttgccacggtcagacttgatgatttggctgacataaaaacaccgaagcttaaaaacaagttaagcgacttggtctga

SEQ ID NO: 182198 - DNA, 537 bp, Klebsiella oxytoca
atgagtacgatcagagctgttggtattgatatcgccaaatcagtgtttcaggtctgcgtctggatgattgatggttccattgtctggaacagaaaaatatcacgtcagaaattgctggatacgcttcgccagtttgaacttggaactcttgttgctatggaggcctgtaccacttcgcatttctgggggcgaaccttcgcatctataggctattgcgtcagactcatctccgcacaacacgtaaaagcttttgtccgtagccagaaaaatgctgccaatgatgcgctggcaatatgcgagacagcatctcgcccgggtattcactttgtttctgtaaaaaccacagaacaacaggatatcaaggcgcttcggaacactcatcaactgatggttgagcagagaacggcgctggtcaatcagcttcgttctctgctcgctaaatatagcttcactattcctgttgggatcttgcgtctccagcaacagctaccggagctacttgaagataccgcaaacagccgtaagcgtacagcgtga

SEQ ID NO: 182199 - DNA, 1158 bp, Klebsiella oxytoca
atgaaggtgatgattataaacacgctttattacccctataaaattggtggtgctgaagtgtctgttcgattactggctgaaggtttagttaatttgggtgacgaagttactgtgttatccctgaataataaaaacataaaagaagatatcatttattcaggtgtcttaaattcttcatatccaattcctaatttatactggccatatgataacaaaaaaaagtcccgatttaaaaaaattctatggcatatgtctgatttttttaatattagagcattaaatattgtaattggagaaataaaaagacataaacctgatattatacacacaaataacctcgctggttggtcagtatcggtttggctcgctgctcgtatttacaaatgtaaggtggttcatacttctagagattattatcttctccatcctaatagttctcttttcaggaaaggccaaaacatggatcctgatataattgaagtaaagctcttctctgcctttaaaagatatctcagcaggttcgttagtggctacgttggcattagttcttatatcaaagatcttcatttgaaggctggattttttaaaaaagcttctagtataagaatttataatccagttgttataaacaaaaatatagaaagttttatgggtaaaaccaagggggttaaatcaataggatttattgggcgtctgtcagaagaaaaaggattcgatatattttgtgacattgcatctttaaatagccacgaatataattttttagccgctggtgggttttctaacattaatgagaaaaacagatttgatgatttatacagcgattatgtacacttacttggtattgtagaacttgaggatttcttagcgaaagttgatgcggttatacttcccgttaaatggaatgaaccttttggccgagtaattgtagagtgtgcaaaggcaaacaaaattgttcttacctctccaaagggagggattaccgaacttaatgagcattttccaaatgtatatctttccaataattggggggatgattttataaagtttgattttgaaaaagctaattcagaatgtagatcatgtcaaatgagtttcgaagctagcgatatagcaagtcagtatcgcgaattttatcttaaaattctatcatcttag

SEQ ID NO: 182200 - DNA, 1239 bp, Klebsiella oxytoca
atgaaacgacgctcgtttatcctatctgctctatcgttgtatctattttcatttgatctaaaggctggcgtccatcctttagatacgcgagataataatctagaatcgcttaaagcacgaatacataaagataaaatggagctcaatctgcttttatctcagctggcgcatgaaaataaaaaagttttaagcgttaataagctttattaccttgacgaggcagtaactctgcctgatggatgtgatattattggaactggcaaaaattccggttttgtttttgtttctgaagggcgaccggaaacgaaatatggtttggtaattcgtaactccaataacaaattagaaaattttggtttatatttcacctccagtcacaatatctctaatgatataagtaaacctgattttatttgtatttttattactgaaacagcattaaattgttctctcaataatttatttgttgaaaattatactcctgatttgtttttcttttcccattgtgtcagggttatgggggcgaaccattcaatcaataattgctccattattaacggtagtatgtgcttatcgatccgaggtcaagatattactgtattgaataatcaagttacgaataatttttcgtctagagttaaggggccttggagaccgtcatgtgatgtttgggatggtattgttatggaggggtgtaagcaatgctcaattattgaaaatcatatctacgattgcggtcaaagtggaatttattgcggtggtaatggttctgcaagttctaatatatctattataaaaaatacagtttataagaattggaacagaggaattgatataggagtcacaggtaaagttacagaaaaaaatttcgtcaaaaacgttttaataacaggaaatatagttttcgacaatcgtgagcctcagatttggttaaatggtgtatctggcagcgaagtttctcataatattgtaaatatcacacctaattataaaaagttctatagaggatattatgggggtattgttgggatagcgttaggaagtgacagtcgtacagaaaataactctgtaactctaaacgaagtgaatgtgatgcctgaaagtgtagctgcaattacagtttatggtaaagggaattctgttcgcgataataatattaaagggaaaggtgtgtggtatgacgaaaaatctgatgtgttgagtcataatattgtcattaataatgttattactaaatga

SEQ ID NO: 182201 - DNA, 1425 bp, Klebsiella oxytoca
atgaatttaatatcaaatgctaaatggaatgccttttctcaatttttcaaaatggctatccaagttgtaaatcttgtttatttagctaagattatacccccggctgaatatggtttgatggccatggccgtcgttgttatgaatttgggtatccttttaagagatctaggaacttcagctgctattattcaacggaaaaacatttctaatagtcaaattaattctattttttggttaaatgtttttttaggagtgatgctagcaattttaatgattagcctcgcacctttcatatcatatatttatcgtgaaccttccttaacactggtcttaatacttcttagtgttacatttcctctatcaagttgtgccgctacgcatctagcattaatggagaaagtgtctcattttaggaaaatatcaaccatcgagatttcttcttcattacttgcggctatatttgcaatagtttttgcaaacttggggtatggggtttatagtttagtaatacaagctattgttcttaatttgtgttcggctttgcaattttggtttgcatcaccctggcggccatcctttaaaaaattaattttagtggaagatcttaaggacatttttggattcagtgctcatttatcgatttttaatttaattaattatttttcccgaaatgctgatagttttttgatcgggaagttcatgtcatcttttattttggggagttacaatcttgcatatagaattatgctcttcccgattcaaagtttgacttatgtagcaactcgctctttatatcctattttaagtcatcatcaagatgataataataaagtcaaagatacataccttaattgtgttcttgttattctggttttaacatgtcctcttatgagtggtatagcaattctaagtcgaccctttatatcaatagtctttggtccacagtggcatattacagcagatgttttgcagtggttagctccgacagctattatacagtcggttctgagtaccactggttctgtatttatggctaaaggtaagacgaatgttttaatgaaattagggtttgttggtgcatttttacaagttggttcttttatcattggtgttaatttttcaatatcagttttagcaaaattttatttgcttgcgaatataattaatttcttccctgtcatgttgtgcttatttagtattgtctccataaatttttcagaatttattaaaaaaatatggccagtcattgcttcgactttagttatggtaatagctctctttctggtgaatatttatgttgttaatttcagtactatggggagatttgatcttctagttggcgtgtctttttttggcgcttttgtatatataatttcccttttcttccttttgcggccttttcgcttattatttatcaggaaatag

SEQ ID NO: 182202 - DNA, 2103 bp, Klebsiella oxytoca
atgccccgacccatccccctcgaacgttatcgcaacatcggtatctccgcgcatatcgatgccggcaaaaccaccaccaccgagcgcatcctgttttataccgggatgagccacaagctgggggaagtacacgatggcgcggcaaccaccgactggatggcgcaggagcaggagcgcgggatcaccattacctccgcggcggtgagttgcttctggcccggcatggaccgcagctttgagccgcaccggataaacattatcgatacccccgggcacgtggatttcaccatcgaagtggaacgctctatgcgcgtcctggacggcgcggtgatggtttacgactccgtcggcggcgtgcagccgcagtcggaaaccgtctggcggcaggcgaataaataccacgttccgcggctggccttcgtcaataagatggaccgccccggcgcggactttttccgcgtggtgcagatgatgatcgatcgcctgaaggccaatccggtgccgattgcgatcccggttggcgccgaagagcacttcaccggggtggtggatctcatcaaaatgcgcgccattttatgggacgacgccacccaggggatgaccttcagctatgcgccggtgcctgacgacctcgtggaaaccgcccggctgtggcgggagaaaatggtctcggcggcggcggaagccagcgacgaactgatggacaaatatctcgaaaccggtgagctggacgaggcggagatcgtcgccggtctgcgccagcgcacggtgaagggggaaatccaggcggtgctgtgcggcagcgcgtttaaaaacaaaggcgtgcagcggatgctcgatgcggtggttgagctgatgccgtcgccgctggatatcccggcgattcagggcgtggatgagaaagggcggcccgctgaacgtcatccgggcgacgacgagccgttctcggcgctggccttcaagctgatgaccgacccctacgtcggacagctgacctttatccgcgtctattccgggacgttgaaaaaaggcgatgcggtgtggaatccggtgaaaggtaagaaagagcgcatcggacgcatcgtgctgatgcaggccaacgatcgccatgaggtggatgaactgcacgccggggacattgccgcctgcgtcggcctgaaggatgtcaccaccggcgacacgctgtgcgacccggatgcggtgattacccttgaacgaatggagtttccggagccggtgatttcgctggcgattgaaccgaaaaccaaagccgatcaggagaaaatgggtatcgccctgcagcggctggcggcggaagatccgtcgtttcgtctgcatactgacgaggagtccggccagacaatcgtttccgggatgggcgagctgcatctggagattatcgtcgaccggatgaagcgtgagtttggcgtcgaggcgaatatcggtcgtccgcaggtgacctatcgcgagacgatccgcaaaacggtcaaagaggtggaaggcaaatttgtccgccagtccggcggtaaagggcagtacggtcacgtggtgctgacccttgaaccgctggagccgggaagcggtttcgtgtttgaggacgcgaccaaaggcggcgtggtgccgcgcgagtacatcccttcagtggaaaaagggctgcgcgaagcgatgggcaccggcgtgctggcgggctatccggtggtggatatcaaggcgaccctgacgtttggttcgtatcacgacgtcgactcgtcggagatggctttccggatggcggcgatatttggcttcaaggaaggggcgcgcagggccgacccggttattcttgaaccggtgatgcacgtggaagtggagaccccggaagagtacgccgggaatatcatgggcgatctctcttcccgtcgcggaatggtgcaggggatggaggagcggttcggcagccagattatccgcgccgacgtgccgctggccgagatgtttggctattccaccacgctgcgttcaatgtcccagggccgggcgacctacagcatggagttccaccactacgcggaagccccgcgcaacgtggctgaggcgattatcgccagccgcgccaaaggataa

SEQ ID NO: 182203 - DNA, 234 bp, Klebsiella oxytoca
atgatctatatcctctgtggaataaaggattatgaggttctggagctaaatgttcagcccgatcatgtacatctggtcgtcatcatcccaccaaagatctcaatatcaactctgatgggccatctaaaaggacgcagtgccatcaggctttataaccgttttccacatatcaggaagaagctatggggaaccatttttggtcccgaggctactttgtcgatacggtgggagtga

SEQ ID NO: 182204 - DNA, 1173 bp, Klebsiella oxytoca
atggcactgttacttttttcttttatctgcttgttttacctcgggtttggctttgcctacatgtcgtatcaggaactatcacctcttggtgctatggggatgagtggaattcctggcgacgtcctgacggttttttttgttggttacatatcggtagtaattggatatgcgtttgcaacaagaaggaaagttccaagacttaggactatatctaacccttactttatgcattttgcatcctacatttatttaatgttggcattagctatgttttttgccggaatcagtttctatggagggtattttgggtttatttctaccccatactcagcaatcatcgatagctcagacaatgaggttaaagatgttttgatttcaacatctggcctcctttctgttttttctattttgtgtgcattttctggtggaaggtctaaagctataagatacactgtttacattctctccttattcatattgctttccatcttcgtacaagggcgaagggaaacaactatgttattcctgatgacaataatgtcatataagtttatcggtgaaggattgaaattccgtaaccttttaaaagctgtaataatagctgcacttattgctttagtcgctggttttggcttatatattcgagcatcaggagatacttccggtggctctgttttgacagcaataaactatgctgttttgtatgagacacactttacaatagcaacattgggcaatgagatcagaactcatttctatgatggtagggattaccaaggatttcttaacctgctacaaccagtattatttgtagtcccaagctttattttttatatcgttggcctagacaagcgcgaagctcttggcatgataactacagagccaaaaatttatgatgataaaggtgggagttttcttttcactcaggcagtgcattcatttggctatacaggtgtcataatagatggcttagtagtcggtttcttactggcttatttctatcaaatagcgcgtagtaaaaatctaatatttttccatttcccattagtttctctcgttcttgtagctattaggaaagatgtcacctatggcattaagtacatatctctccaattcatgatactgttcctgataattttaatatataaaatattgcccaagaaaaaatcatag

SEQ ID NO: 182205 - DNA, 1035 bp, Klebsiella oxytoca
atgattagcattcaggtacttagggggatagcagccctgttagttgtgctcgttcactctacgctaaaggcgcagtctgcagggctcggcgaaagggtttttgaaataggacactcaggtgttgatcttttcttcatcatctccggattcattatgatgatgatcggcgctcgggaaaataactttttcctattcatgtcgaagaggattacaagggttatcccactttattacataatcactacctttgctctttgtatttatttattcaacccttcattaatcaatggcaacaatggggttatttcaatactacattcgtatcttctaatacctgcacaaggtaaatctttcctattatccgtaggatggactttgagttatgaaatgtttttttatattgtttttgcctgtgttgtctttatgaaaagcagtgcaaagggagtggtggcatcgctgatattgattgctcttattcttgcaggaaatcaatcaagcaatgttatactccataatttcttgtcaattatactccttgaatttgcaattgggataggctgtttttatttctatgactacatgtcaaagaggttatctaatagaaatgctaaagtattagcctccgcctttatccttatcgcaataatttacatagcagcccagcatgacccatttttcaccttattccaaaatagagttttagaactagcaatcccaatgatgtttattttcttggcgttctgtctatgcgaatatcagtttaaggcttttagagacaaagcaccaataaaaattatgtcatatattggcgatgcttcctattcactttatctaactcatttatttgctcttggtttaatttcaaaaatattcagtaagtttgagatagaaaactatttcattttcgttgcaacttgtgttgtaggttctgtcattggcggtgctgtatgctatgagattgtagagaagagaattaccgcgatacttagaaatacaatttacagaaaacctaaaaaacttaatagcgacatttaa

SEQ ID NO: 182206 - DNA, 978 bp, Klebsiella oxytoca
atgaaatctgcatttattatatttatttgtaacgtaataatatttccgcgcgtatgtttagcaactccagaagttaaagaaccagattctgctcttgttttatacgggcattctttcctttctaataaaaattttactatggccttatctaaggaaacaaaacttaaggtttataactttgccagaggtggtagcagtagccaggaagctgcctttatatccgggggggaacctggctttttttcacctgtgggcggtataattcctgctgatagctctgttgaactgaccccatatggggtgatgagtgaggatggtgcgctgtggcctggattttatgcagcagttatttacgtaggagtaaagggggttctttcatcgaaaaaagtaaatggaaagataagattcttttttatacgagaagaacctggggaagatattcctgttaaaaagatatctcaggctttcccagtaaaggaaacaagagttaattctggcactgaagtgcaaggggctaagttacaaaataatactaagaagatttacatattgtgggcgggaagaaatactgctgggggtaatgcgggctttattattagagatataaaaagcattgcttccacgattaaagtgggggatcatttcattgttatgcctgaattcccatatacgaaagaagtcaatggaagtcctgggcgccttaatcttaataaagtaaatgaggaaataaaaaatagttttcctaataattattgtctagttaatggacttgatgcactacagaatttctccgcacattataataaaaataatccgcaggatctgaaggatatatctgaaggtttaacgcccacaacgcttaggatggataacctacatccctcagatcgcgtaaagaagggagctatgttatctggagtagaggtcaacgcaaaatttatcgcggattgcttgagaggcaagggatggcttaaataa

SEQ ID NO: 182207 - DNA, 846 bp, Klebsiella oxytoca
atgagtccctttttaagcgcctatttttctcgtctgggctggacgggcaccccggacgtttcacttcacaccctgcgcgaactgcatattcaccataacggcgcgatcccctttgaaaatctggatgtgctgctgcccagagagatacatctcgacgatcgcaccctcgaagagaagctgattcacggtcgtcgcggcggctactgcttcgagcaaaacggcctgctggaaagagcgctgcgcgagatcggctttaccgtgcgcagccttctggggcgcgtggtgctggccaatccgccgcatatgccgccgcgtacccatcggctgctgctggtggaggtagagggggaacgctggattgccgacgttggtttcggcggccagaccttgaccgcgccgattaagctgctggcagatatagaacaatccaccccgcacggcgaatatcgcctgatttacgaaggggaagagtgggcgctgcagttcagccatcacggccactggcagtcgatgtaccattttgatttaggtcgccagtacgcttccgactatgtgatgggcaacttctggtcggcgcactggccgcagtcgcacttccgccatcatctgctgatgtgccgccacttgccggacggcggcaaaatgacgctaaccaatttccactttacccattgggataaaaaccacgtcgtcgaaaagctcgatttagcggacgttccggcgctgtatgaggcgctgcaaacgcgttttggcctcggcgtggatgatgccaaatacggctttagcgaagcggagctggcggcggtgatggcggcgtttgatacccatcccgaggccggaaaataa

SEQ ID NO: 182208 - DNA, 1197 bp, Klebsiella oxytoca
atgataattaaacctaagattcgtggattcatttgtaccaccacacatccggttggttgccaagtcaacgtaaacaaacaaatcgagtacatccgcaaaaacggaaaactcactgatggccctgcgcgcgtgctggtgatcggtgcttccactggttatgggcttgcttccagaatttctgtagcatttggcggcggtgcttccactgtcggtgttttctttgaaaaaccggggacggatgccaagccaggctcagcgggctggtataactctgcggcttttgatgaagcagcgaaacgtgaaggtctttactcgaaaagcatcaacggcgacgcgttctccgatgagtgccgcgacgaagttatcagcctcatcaaagaagatctgggtcagattgatttagtggtttattcgcttgcatctccggtaagaaagatgccaaaaacaggcgaaattgttcgctctgcgctgaagccaatcggtgaggtttatacctctaaagccattgataccaacaaagatcagatcattactgccagtatcgaaccggcaaccgaagaagaagtgcgtaacactgttaccgtgatgggtggcgaggactgggaactgtggattgatgcgcttaataacgctggcgttctggctgatggcgtgaagaccgttgcttactcctacatcggcacggatttgacctggcctatttactggcacggtgcgctcggtaaggcgaaggaagacctggatcgggtggcaaaagagttacgcaacaagctggctcctctcaacggtgctgcaaacgtcgcggtgttaaagtctgttgtcacccaagcgtcttcagctattccagtcatgccgctttatatttctatcgtgttcaagctcatgaaagatcgtgggatacacgaaggctgcatcgagcaaattaatcgtctgatgactaccagcctgtatgggggtaatgccaaacttgatgacgagcagcgaatccgcatggacgatctggaactgcgtgaagatgtgcagcaggcgtgccgcgaaatctggccgaccattaccgatgaaaatctggagcagttaacagattacattgcttataaagaagagttcctgaagttgtttgggttcggattcgaagaagttaactacgaagccgataccgatacaaacatagattttgatgtgaaaacattaatctaa

SEQ ID NO: 182209 - DNA, 678 bp, Klebsiella oxytoca
atggcaacaccaggaagtttaacaatcgggggcgattcctcccgaatcaattcaactcagaacagtaataacagcagcgctacccgtaccaaaggtgaaaacggattcaccattcttgcatcggtatataacccagcctctgataactatattcgtaactatcaggcgatagtttttgatgctgtgacagatacgggagtacgtagacaggctgatattacgagctatcccgttgagagcggggcagaggtgagcgaccacgttcagattaagaataatacattcaaaatgtctggagtaatcacggaaactccgatcagacttgagggagatttattatacagtgctggtgttaatggtacgcgaatatcacaagctatcacctatctcgatcaaatatttgacagtcgtcagcccatcacattagtgacagaacataaagtgtacgagaatgttattctctccggcatctcctacgattataaatctgaatttgctatgcaattcgatcttgaattcgagcaaattcgccttgtcagcaaagctacggttaatgtgattgcaactaaaacgcagggaaataaatctgtaggcggtacggtgaaacagaaggtggtgaacaatgcacctaagaaaaccgaaggtgatacggtgactacggagtttaataaaaaataa

SEQ ID NO: 182210 - DNA, 567 bp, Klebsiella oxytoca
atgcaggaggcgttacccttctttaaaggtttaggaaaagcggcgggtgatgtagtagacggcttaatgaagctaaccaactggatcacaggcaagctaaacctccttaacggtgacaacacttctaaagaggctgttagtcagcattacggcactacgtcagcacctgcacagccaggaagtaatcctgtggctaacgcttacggaggcagccagcctaaatcagacggcacacatgagccgaacatgttcgatacattccatgattggtggaacgggataagcgacgctaaagacgtgagcagctacgcgcagagcacaaacggagattactctcctgtttcgatgttgaaacagagtgcagcagcgccagctaagccagccagtgcgccgatcatgcagcctgtagtgttgcagaatcagctaccggaagggcttatccatctaactatttctcctgatccaacgtttggaaacatgcttaatgctaccgttgatcagcgtatcaatgacaataatcagcgtattgtgctggctgtttcatctggacaaggggcggggggctaa

SEQ ID NO: 182211 - DNA, 2118 bp, Klebsiella oxytoca
atgagatatggcccactcgttatcataaagcattttcaggtgaatggaattaagcatatgaaccagattaacctgaaaacgcattataccgctcaggaattagctgatttgcggcttcctggattacctgaaaccaggcctggaattgttgcaagggccaaaagccatggatgggattcacgagcaagggctggtcgtggaggtggaaacgaatattcgattgatagtttacctaacgaggcccagaacgctcttagggaaaaaatatatcaatcggtcttagcgaataagacgacgatggtggtcgatcgttcaagtgatattaagagcctaaagccacgtagggagctgacgctgattcgtcaatgtcctgcgctgcttgatcgtgaggttaattcattaaccgagaagcaaaagcaaatcgccgatgctcgtgcagctttggctctggaggtcgagaagctccggggtgcaggaatgtcacgcactgcggccgttaattttgtttctatggggtcgcgtaaagggacgttgcccgagcatttgatgaactccgctgagctggccaatgcccgtaaaggcagcagccgcgccggcgtcggtacccgcagcctgcaggaatgggtcagcgtttttgagtcaacaaaaccaggtatcgagcgtatggccatgctggctcccggtcatcttaaagcgaagaaaccagagcagattaagtggcttcctgacttcctggctcactggcgcagtcgcaaaggtccttgtcttaccgaggcgtatcgagattttaaagccgaatggacagctctctatgctgaccagccagcaatgattgcggcgtgcccctcctatgacgcagttcgccgggcgatggagaagctgccgcgccgagagaaagcgcgtggccgtgtcagtggttctgcagcactggcttatgagtgcttccagaaacgtgactggtcacaaatgccggttaatggttgctggattgccgacggtaagtcgctggaaatgaaagtcgcgcatcctgatcatggtcgcccgttcacccccgagctgaccctgattattgatggccggacacgctttgtcgttggctggagcctggcattatctgaaagcgttattgctgtggccgatgcctaccggtatgccatgcgacacttcggtaagccgctgtttgtgtactccgataacggtggcggtgaaaccaacaaaacgtttgatgctgacgtgactggtattttcagccgcctgggtattgagcacccgaccagcatacccggacgtcctcagtctcgtgggatcatcgagcgtctgaacaaagggataccgcgccgtgtggctatgcagtttgacaccttcagcggcgacagcgccgaccgtgagcatgcgcgtattaccgctcgtgttattcagtcagcggtcaaagcgcaggagaacggccgcgaactaacaccggtacagcgtacagctttggggaaactcccttcatggcagcagctgcttgacgccatcgctgaggaagtggacgtctacaacaatacccacgaacacagcgaactgcccaggcgcaacggtaagcatctgacgccagcagcctaccgccgggccgttcttgagctcgaaggtgatgaaaccgagtatctgaccgacgtcgaacttcgggaagcgttcatgcctgaaatgaggcgtaccgcgcagcgtggctggcttcgtctgttcaataacgattatttctctgaggagttgatccaggtcgacggcgaagaagtgcgcgtggccttcgatatccacgacccggagtccgtcatcgtccgtcgggtggatggttcttatgtctgtactgcaatctggaacggcaataaacgcgcagcgattccggtcagtgcaatggatgtagctgttgaaaaacgccgtcagcgtcgtatgaaacgcgttgaagataaagttctggagatcgaagccgaaggccgctctgtgttgccgggacaacgattcgatgatttgagcagttttatcccggctgaatataccgttaaaaaagaagaagagccttatttcttccttgagactgaccgcgacgaatatctgaaaaaaatcggtaatacccggtaa

SEQ ID NO: 182212 - DNA, 894 bp, Klebsiella oxytoca
atgagcatacatgcagaactgaatgacctgatgacccgcaaaggctacagccagacacaggtagcccgtgctgttggcaaaagtgccgccgttattaaccaatacctccagggcaaatatgccggtgatgttccttctattgatgaactggcccggagctttatcaaccgtgaagcggaaaaagaaaaatcgcaaaaaatcacggctcgctttgttccaacggtgacttctcgcaagggtatggaagttatccgatatgcgcatctcgatggcgatcttaacgttatcttcggcgcggctgggcttggcaaaaccatgattctgcgcgagtacgcagcgcagcatcgtgatgccttacttattgaagccgacccggggtataccgctcgtgtggttctggaggaactctgtaacctgctgggcctcagcaagcgtggaaacatgcacgaacttagtgaagcctgtatcgcggctctgcgtgattccggtcgtcttcttatggtcgatgaagcggaaaacctgccataccgtgcactggaaacgctgcgtcgtatccacgacaagtcaggaattggaatggtactggcgggaatgccacgactcattatcaacctcaaaggtaagcgtggtgagtatcagcaactgtatagccgcgtaggctttgctctctgtatcggtgattccctgccgcagagcgatatcactgatattgcggttagtatgctgcctggtgcaggtaaagaagacgtcagcgaggcgctgtttaaggcaagccacggcaacgctcgccggctattcaaactggtacgcggcgtcagccgtcacagtgagatcagtggtaatgccgtcagcgctggcgcggtacgtaagtttgccgaaatgctgattaattag

SEQ ID NO: 182213 - DNA, 372 bp, Klebsiella oxytoca
atgtcggttaccgtaattaacgaaatgctgggtaaggtttttgtttcggccgaaaaaaacgatgacggaacggaacttaaatttctcgaaaaaaactggtttgattcattcaccttttaccatgtagatgattgctgtgaaagcgtctggattgaggatattgagggcgaactgagcgaccttgaagactcccccttacttgaagctgaggtagtcagtaatcgagaagaaactaattctggctccagaacgtggacttttttcaagttcggaacagcgaaagggcatgtggtcgttcgctggtgcggtgaaagtaatggttattattcagaaagcgtatctctgaaaatcaccagacgaattgacttttaa

SEQ ID NO: 182214 - DNA, 162 bp, Klebsiella oxytoca
atgaaaacactttcattttacgacaggattatgctcagtccttaccttcgtccggttactttcattttatgcgttttattttgcattactctgtggggcgcgtgcatttattacggcctgaaaatgtgggagctgttattaaccttgtttaagggggcttaa

SEQ ID NO: 182215 - DNA, 540 bp, Klebsiella oxytoca
atgaataccgaaaatcgttttattaccacctggtcaggtcagcacttttatttttgtaattcaggcgttgacgttatttatattgatgatatcgcccaggcgctttctaatctgtgtcgctttaccggccatctggatgagttctatagcgtcgctcagcattccgtgctggcaagctatcttgtgccgtctgagtttgcgcttgaagctctcctgcatgatgccagtgaggcttactgcaatgatattgctgcgccgcttaaagcgttgctgcctgattatcgcggtattgaaaaatgggttgagggtttaatcagccagaaattcggtctccctgaaaccatgagccctgtagtcaaacaagctgacctcatcatgctggcgacggagcgccgcgacctgtttattgatgacgattccgagtgggccattctcaggggtgttcaacctacggatgaatttaccatcagcccgctaaatccgcgtcaggcaagaaaattattcatggagcgttggtatgaacttaaaccagcagcataa

SEQ ID NO: 182216 - DNA, 699 bp, Klebsiella oxytoca
atgaccagaaatttaacaataaacagaaaacgtcttgaggctattgcctacggctcgattcgtcagagccaggaggaaggcattgaacttgcccggatggccctgaccactatcgatagcgaaatggccgtgccagattatttttcatcgctggtatctgctgcaagattcagagctgataaagcaatgcgcaggtttccgcagccaaactacgtactgaacaaggtggcggaggaaagcggtgaagtaataaaggccgtaattcattacaccgaagggcgcgaacagtggtcgaacgttgaatctgaaatcattgacaacctggctatgctactacgcctggtgacagaaggagatcaggtaataggctttacccctcctgacggactccagacctgcatcaaacatgttgatagtgatatcgagccgcataagcggatcatcagtatccggcataaggagtatgttcacctggaggatggccaaatctcatctcacttatggcttgaggcatcgccgcagcctgctgaccttcagaccagctcgctggtaatgtgggtcaagcgcctttccctgtcacttcgttcggcatgccctgataacaaattacccaaagcggcgatgggctatctgcaaaacaacggtctcatcagcattgctgattgccttcgggggaacaatgaagaacctcctgcgtaa

SEQ ID NO: 182217 - DNA, 435 bp, Klebsiella oxytoca
atgaatctgcaacaggtaacagagctactgcccccggtagtcattcagatagctgacctcatcggcttcccggccaccgagcgcctgctgtccgcattcggtggcaccaccttcccgattggtaaaggtctccgcgctctcggtgctcaacgtgccgcactcctccgcgatacaatcggtgaccataacgcccagatattgtttaaaaactttggtggtttcccgatttatctgccgcgttgtgaactggcgttacgcaagctgcgtaacctccggttcctggcggagttcgacgaaatgagcagaaatggcacttcttctttgatggcgatgacgatactgtgtccgaagtacgggttctgcgatcgtggtggctggcgtctgctggcccggcggaagaatgcggctgagcataatcaaggttcattgttttaa

SEQ ID NO: 182218 - DNA, 480 bp, Klebsiella oxytoca
atgaaatacacagcaatttttttactaatgctgggattctgtgccagggcagatatggtccagaatactaaaatgattgatttatatgagcagcaaaaacctcagactcgcgttttaatgtctgaattaaatgaagttatgaaaattatcgatcctgtgtttggcttgtataagcatatgggaggtccgtcaccagaggtagttgctgtcagtcggcatcttttacagatacaggagagaagcgatgaactttacggtaaggcgccgggagctaccccgttctcatcttgcagagctctgaccggagtcgcatacaactactggattgaaaagcttaatagcgttaagactcaggatgaaaaacagttggatgtagtgtttaatcaatataataagatggttaaagagtgttcaaaacagataaaaacgcctccgcctaaaatggtagaagagctcggtatcattgacgttacacaataa

SEQ ID NO: 182219 - DNA, 210 bp, Klebsiella oxytoca
atggctgacaaaataatcagggtgaattcccgcgtcagcgtgatggccagccaggtggcttatgtcatcgcgccggagtttcaggatcgtatcgaggttcacctgctcgatggtcgcgtcgaagagctggaatactctatgcgtaacgaacgctggagcgcgaaagaccgctttgaaacggctgttaacgatgcgttaaagggggaataa

SEQ ID NO: 182220 - DNA, 582 bp, Klebsiella oxytoca
atgtggaaccaggttgatttacgtatccgcgctgcgctgcggggtattcgtctcgctttcagggggcgtttaacccgcgttaaaagcgatttaactatccagcaggtgcaggttaaaggacttgccggcgagcagctgcaggacgccgaactgttccagcacttcgggtttaccagttgcccgcctgccggcactcagtgtatcgtgctccccatcggtggccagacgtcgcacgccatcatcattgccaccgagaacggcgcgtaccgcctgcaggtggccagcggcgagatggccatctactccgaggaaggcgcttttgtgcatatcaaaaagggccgtatcgtcgaggtggagtgcgatgagtaccttgtgaaaaccaaaaaatacaccgtcgaaactgaagattacggcgtcacagcgtcagccggcgcgacctttgaaacgccattactgaaagccagcgaccaactggccgacggtaaatcgacgctcgatgagatgcgcgagacctatgacgaccatgaccacaatcatggcggagacgccggtaccaccaataaaccgaaccagcctatgtaa

SEQ ID NO: 182221 - DNA, 657 bp, Klebsiella oxytoca
atgagcaatgcgaagaatctcttatccctgttactgccgccggttgcctatgatacgcagcaaccagccttatcagctgagttatcggcagaaggtaacgcattcgatgcaacggatgaatccgcaaataatgcactgaacgctgttgctcccttttttgctgataacctgctgacagactgggagcgcgttttaggcgtcacacctgatgaggatgacagttatcagcagcgcctcgatcgggtgctgattaagttatcagaaattggtggtttaagtattccgtatttcatcacgatggccagcaggattggctacaccatcaccatagatgaattacaacccttcagggtcggttccagtcgttgcggtgatacgctttatatcgacgatattatttatacttggcgggtaaacgtctatgggttagaagttcctctttattattttcgcgcggggacttcccgcgttggcgaacggctcatgacgctgggcgataaagttcttgaatccacattcaatgaattaaaacccgcgcataccctttgttatttcctctacgaagccgaaatgacctatccgctttatctggatggttcatttgcgctggatggcgaacagccaatgaccggctacgtagaaaagaccaccgattaa

SEQ ID NO: 182222 - DNA, 744 bp, Klebsiella oxytoca
atgcaaagcctgatgcctcctgttgatgcacctaataatgaattcagcgacggggacccctcgctggggacgttaggaaccattgtcagagcaatgttcctgaataatgtgcaggatgccattcgctctttacaacgtgagttattgtcaattctggccgctgcaaatatcaaccctgatggcgacagtaatacgcaagtgttgcaggccattaataaaatcatggtggattcaaatatgtcggtaccttacggcattccactgccatggccaaccagtacgccaccagctggatatttaatctgcaacggtgcgtcattcagcgcagcgacctatccaaatcttgcggtggtttataccagtggcgtgttacctgatttacggggtcagactatcaaagggttaccggcgtctggacgttccctgttaagcctggaggctgatggtaacaagtcccatacgcataacgcatcagcatcggctactgatttaggaaccaaaaccaccagcaataacggtgaccatactcactcctggggttcaggtatgcagaaacagggaggtagcgatcaggaagtgggtaataacagtggcgatggtttcgggacaacgtcaacagctggtgcgcatacccatgatgttgttttgggatcacactctcacacgattactgtcgatgcttctggtaattcagaaaccacggttaaaaacatggcatttcattatattgtgagggcggcataa

SEQ ID NO: 182223 - DNA, 624 bp, Klebsiella oxytoca
atgtctggcgatattaaagcagtatttgatagcaatttaattgcaactcaggcaggtaccgttcaggtatttcattttgatatgacttcccgtgagtttatcggtactgaggaaacttatattcatattggggttggcctgcctgcattttcatgccttgaagaacctccggtacaaagtgaatatcaggtagctattcgttctgacgataattcggcctggtctgttactgaggattatcggggtatcactgtctatgacatccagacgctggccagccacgttattaccgagcccgggcccatacctgatactgtaactacctctgcgccatcaaccccatacgacaaatgggatggttctggctgggtaacggatgctgatgcacagcatactgcgcatgtcgctgctgcggacctgcaaaaaaaacagatgattactcaggtctcagacgatatttcaattcttctggatgccgttaacctgaatatggcgactgatgaagagaaatcccgtcttactgctttacaggcttatcgggtgcagcttaaccgggtagatacatcgcttgctcctgatattgtttggccggttatgacaactctggagggtggtaatgtctaa

SEQ ID NO: 182224 - DNA, 1407 bp, Klebsiella oxytoca
atggagataatctgcacatacgatgatgaggggaagagtggtgtatctgctactggaagaaataattttaacaaactaatccaagatgttgttactaaaaaaataaatgtagaagcagttcttgtttatgatgtgagtagatttgggcgttttcaagataacgatgaagcggggcattatagttttttattaaaatataatggagtaagaattatatattgtgcggaaaatctaccggagcattcacccgaaatacaaatgttaacattacctgctttacgctatgcggcaggggcatacagtaggaatttatccattaaagtttttgcaggacacgttaatcttgttaatcatgggtattatcaaggaggtatacccggttatggtataagacgtaaattaattgattatcagcataatgataaaatgatactcaactctggggaaagaaaaagcttgcaaacagatcgtgttgttttaattcccggaccgaaagatgaacttgatataataaatagaatatttaacatgtttgtttttgaatattatagtgaatatataatcgcaattaaattgaatgaggaaggtattaagcatactaatgattctgaatggagtagaagcaaggttcataatgtgttaataaatgagagatatcttggtaagtatatttataacaaaacatcagggaaactaaaagacaagagagttaaaaatccaaaagatgaatggatacaatatgaaagtttttttaatccaatagtagcaccgcaaaagttcaagatggcgcaagaaataatcactaacagaagtgttcatttgtcaaactctgatattattgtttatttaaagaataaattaaaagaaaaaggaatgctatcaggatttattatagatgaagacgaaatagggccatcttcgagtgtggtctcaaatagatttggaggattaattaatgcatataaattaatagggtatacaccagaaagagactatagctatatagaaataaacaagaatcttagaataaaacatcatgaggtgattttaagcatttacgatagaattggaataaatgataggatgatattagatgatgatagtataataataaataaaaacctgaaactatctctaattatttcaaggtgtaagaaaacggcaaaaggtagtttaagatggatcgtaagatttgaccgtagtctttcacctgacattagtattatcgtaagaatggatacactgaatagatcaatagtagattacttcataatcccatcctttgaatccattgaggaaaaactgaacataagagagagtaatccaaaattacttgagttatatagatttgatagccttagtaaatttttatcacttctgtctaaaaatgatgaggttgcagcatga

SEQ ID NO: 182225 - DNA, 891 bp, Klebsiella oxytoca
atgataaatgatgagtcagatcatgtaatgatgatagaaatttcgtccataaaggtgattaacccacgttcaaggaataaattcagacatggcgaaattacagaaagcatcgataaacagggattaagaaaaccaataacagttagacgtatagacgatgacaactttaaatatgcattaatctgtggtcagggcagacttgaatctattagcggactgcaagaaaaaatgatcccagcattcattgtagatgttgatgaagagactgcatatataatgagcttaattgaaaatatggcaagagttaatccaagagcgggagaacagttctatagaataaaggaaatgatgactgatggtgcatcaaataaagaaatagcccaattaacagggctatctattaattggataaatagcataatgatgcttgttgatagaggcgagagtaaattattggcagcagtagaatcaggaaggataccgatatcgctggctgttgagatagctaaatcagactataaaggtgctcaagaattattcatagaggcttttgagcaagggaagattaagcataaacacctgattaaaataaggaaaattctggatgaaagaaatgaaggattgaagggggctataagcaacacatttcatggtggttataaaagaaggaaattatcggcagatgacctaacgaagttatatcaagagaatatagatgagtataaatcattaaaaaataaagcaagagtggtggaggaaaatattttactggcacagcagattgtagaggagttatcaaagaatagtgattttacaaaaatagtaattggtgaaaatctagaggaagctttagcatatattaaaaaaccttatctggaggcgataaaatga

SEQ ID NO: 182226 - DNA, 303 bp, Klebsiella oxytoca; identical to SEQ ID NO: 96991

SEQ ID NO: 182227 - DNA, 408 bp, Klebsiella oxytoca
atggggtgctggcttgctggcagactcatgaaagagctggggctggtcagttgccagcagccgactcaccggtataagcgtggcggtcatgagcacgttgctatcccgaatcatcttgagcgacagttcgccgtaacggaaccaaatcaggtgtggtgcggtgatgtgacctatatctggacgggtaagcgctgggcgtacctcgccgttgttctcgacctgttcgcaagaaagccagtgggctgggccatgtcgttctcgccggacagcaggctcaccatgaaagcactggaaatggcatgggaaacccgtggtaagccagtcggggtgatgttccacagcgatagtaataatgccgatgtcagtctttaccaccacttagtttgccgtttaaccagattggtgtga

SEQ ID NO: 182228 - DNA, 1077 bp, Klebsiella oxytoca; identical to SEQ ID NO: 97051

SEQ ID NO: 182229 - DNA, 426 bp, Klebsiella oxytoca
atgaagttcattcctgcagtatcagaagccagcatagtaaaaattcctttgttcacagagcgatgccctgcgggttttccgtcaccggctgcggactacactgagtctgaactggatctgaatgagtactgcattcaccggcgccactccacctattttgtcagggcgattggcaactcaatgactgatattggcctctattccggcgatctgatggtcgtggataaagcagaacagccgcggcacggggatattgttatcgcggaaattgagggtgaatttacggtaaaacgcctgcttctgacgccacggccggccttgcaggcgatgaacccggacttcccttccctgtacccggatccggaaacgctgcaaattttcggtgtggtgacggccttcattcataaaacccgggggacagactga

SEQ ID NO: 182230 - DNA, 972 bp, Klebsiella oxytoca
atgaatatttactgcgatgatggttcaactaatgttaagctggcatggtttgaaggagatgagcttcagacacgagtctctgcgaactccttcaggcatggctggaaagtggcagaattcagtgcggcaaccttcaattatcaggtgggcacgctgaaatacacctgggacagcgtcagccgggatgccatcccgacaacaaacgtggaatatcagtacggtgatctcaacctgctggccgtgcatcatgcgctgctgaacagcggactggagccgcagccggtgagcctgaccgtgacgctgcccctgagtgagtattacgacggggactgccagcggaacgaggagaacatacgacgcaaacgggaaaacctgatgcgtgagctggttctgaataagggcagggcatttaccgtaacggacgtgaaggtgatgccggaatcactgccggcggcgttctcccgtctcgcggagctgaagcccggccccgctgagaccaccctgattatcgatctcggtggcaccacgctcgatgccggtgtgattgtcggccagtttgatgatatcagtgcggtgcacggtaatccgtctgtcggcgtgtcacaggtcacccgggcagctgcaggcgcgctgcgggcggcagacagcgaaaccagcgccctcatcgctgacactatcatccgcaaccgcaatgatcgtcagtatctgcagcgtgtgatcaacgatgccggtaaaattgacgaggttcggaacaaaattacagaggcaatcacctccctgggcgcgcgtgttaccagtgagctgacggccttcaggaacgttaaccgggtattcctggtcgggggaggggcatccctcattgaagaggctatccgtcaggcctggcctctggctcctgaccgtatcgaggttataggcgatccgcaaatggcgctggccagggagattgccctttacaataaagaggactaa

SEQ ID NO: 182231 - DNA, 642 bp, Klebsiella oxytoca
atgtccagattcattctcgggaactgtattgatgtgatgcgcggattactgctggccggaaacaatgaagtgatgcgcctgctgggacggggctgttttccactgttcggtctggcatggggaatgaatctggcccggcacgcggaaatacgccagtcgcagctgaacagcctgtggggctgggcgctggttgcccaggtgtcgtttatgctcatcgggtacccgtggtataccgggaatattctgtttgcctttgccgtcaccggccaggtcctgcggtgggtcagccagccgtcctggtcttacaccctcccggcggctggactgctggtcgcctggatacccctgtcgaccgccagctacggcatggccggagtgggtatgctcaccgccagctggctgctttgccgcgcacagcatgcaccggaacggctgggatacggggtgctgtgggccctcatggtgttgctgatgaatatgcataacgtgagtgaatcggcggccgggctggcgattgcgctgctgacgctgatcgtgtgttcatctgccggagaacatgtgaaacgcttctggccgcggcatttctttgtgatgttctatgcagtgcacctggcggtactgggtattgtcatctcgatgtaa

SEQ ID NO: 182232 - DNA, 597 bp, Klebsiella oxytoca
atgagtgaagaaaaacgccctgtactgagcctgaaacgaaaaccggcggagaacagtacggcacccgcggaggcgacacctgtccctggtgtggtgcgccgtaagaaggtcgtggtggtttcgtccccgccggcctggaaggcaaagaaagagaaacttgagaaggttaaacaagcggccgaagccgccgcgcgtaacgcggcgccggcgccggttaaagcagtaaagacgccacctccggtgcgttatcttcgcctgctgccgccggaacaggccatcatgaccctgaaggcgttctggccacagttgttcgacggaaactccccccgcctgctggcaacgggcatgcgcgaactgctgtttgccgacattgtgaaccgcgacctgccgctgtcgcataaacaggtgattaaatgcctgaagagtctgacccggtctgcgggctacctgtcccggatgaaggtgggggcctcccgctatgatctgcaggggaatgccgtcgcgaccgtcactgcagaggaagcgcagtacgccagcgagcgcatgatgaaagaactcctgcgaacggagcgtatgcgtaaccagtcagctggctga

SEQ ID NO: 182233 - DNA, 348 bp, Klebsiella oxytoca
atggattttgaagcgcggaaacaaaaagcgctggcgataatgtccagccgtaagatgtggaaaagcaattatgcaccgcttctgatacgactgttgtggcggctggggataaacattcccccgctgccgtttgctccgttctggcaggtttttgtcgtaatgacaggctatttctcccttggatacgggctgtggatgtactggacggtgtggcgggcccaagggatgcctctcctgttcgcctgcgaaatcagtcttatcgcgggcgtgttatttggcctgacgatggcactttttcatctgtggcggcgaaaggtgaataaattacctgactggaaagatctgtaa

SEQ ID NO: 182234 - DNA, 645 bp, Klebsiella oxytoca
atgtttaaatattttattctgcgcaaacagcagcagttgttctgttatttctgcggtatcgtgctagcgatggttcttatgctcctgttcccttccgtttttcgggggagtgggttttatctgcttttatcgtctgttgcgctgttctgggcaggccttgccctatatacgcgtcacatcgaccggatgagaaagccagaggtctcaccgctggtcagtattcgcgacggtaatcaggtggtggccgaggtgccgcgacatgaaaaggcccggctggaatgggaaatcttccgggacgatgaggtgtttcgccagcaaaggtgggagcttacaggcctgaccggacgggttatcagccgggggctgttgtatacgccggcggtgatgctggtcggtatcggtattctcgcctggggttccccacaggatgccatccgcctgattaatgctcttcgtaatatgcctgctgcggaactggtgcatcagattggttttgtcctgtgcctcgtcctgcagattagcgtcatatcagttctgatcgctgatgttgtagccgggagaggactgccgaatgtatttcgccgcgcgttgctcgacaggctgccggcagagttctgccttatcagaagagggacagaaagatga

SEQ ID NO: 182235 - DNA, 651 bp, Klebsiella oxytoca
atggcaaagatattaatgatggcgggcagtaccgttgttgtgctgagtttgctggggtttctggtgctgcttctgaaaggacgcgcagtaacgaagacttccccggttctgatgtcactcaaagccctgggtattcgcccctcagaggctgagcaacggttgtgtcgccagcgggtctgggtgggtaatgagacactgatgacgccacgggaacaacattttttccgggcattactcaggcataccagccgaaatcgctggctgttgtgtcctcaggtccgggtggcagatattgccacactctcttcccatatccggccacgatcccggacctggtggcaactcttccggatggcatcacagtggcactgcgatgtggtcatcgttgacatccataccttcgctatcgtcggcgcagttgaactggatgatgcctcacacctgaaaaaacaccgtatccggcgcgatattctgctggaagaggttctgaggcaggccggtattccactattacgcgatcgggattcagagaggctggtaagaagggtcagagagtttctgaaataccgcggagccgatgctgccgaaaaatccataaccggtatgaattcaacgacagagcatactgaacgcaaggagaaagaaaaatga

SEQ ID NO: 182236 - DNA, 264 bp, Klebsiella oxytoca
atgattatcgccgccgaagtgaaacgtgatgaacaggggtactggacacatcctgtgctggcacgcagtggttgtgaaacttccgcagaattaagctactggctcagaactcataaacttcagtgctttgtgatgacaatgcggggtcacctcagaaaacggaaaaaatcgtacgctaagacccagagagcggacgtagcggtcggaatttccccacgcctactttggagctactgcgccagaggtaatcgccggtcaggttga

SEQ ID NO: 182237 - DNA, 291 bp, Klebsiella oxytoca; identical to SEQ ID NO: 16838

SEQ ID NO: 182238 - DNA, 834 bp, Klebsiella oxytoca; identical to SEQ ID NO: 144188

SEQ ID NO: 182239 - DNA, 960 bp, Klebsiella oxytoca; identical to SEQ ID NO: 144187

SEQ ID NO: 182240 - DNA, 174 bp, Klebsiella oxytoca; identical to SEQ ID NO: 97407

SEQ ID NO: 182241 - DNA, 285 bp, Klebsiella oxytoca; identical to SEQ ID NO: 97408

SEQ ID NO: 182242 - DNA, 429 bp, Klebsiella oxytoca; identical to SEQ ID NO: 97409

SEQ ID NO: 182243 - DNA, 456 bp, Klebsiella oxytoca; identical to SEQ ID NO: 25798

SEQ ID NO: 182244 - DNA, 366 bp, Klebsiella oxytoca; identical to SEQ ID NO: 122249

SEQ ID NO: 182245 - DNA, 276 bp, Klebsiella oxytoca; identical to SEQ ID NO: 25796

SEQ ID NO: 182246 - DNA, 426 bp, Klebsiella oxytoca; identical to SEQ ID NO: 25795

SEQ ID NO: 182247 - DNA, 1686 bp, Klebsiella oxytoca; identical to SEQ ID NO: 77387

SEQ ID NO: 182248 - DNA, 366 bp, Klebsiella oxytoca; identical to SEQ ID NO: 25794

SEQ ID NO: 182249 - DNA, 237 bp, Klebsiella oxytoca; identical to SEQ ID NO: 77389

SEQ ID NO: 182250 - DNA, 213 bp, Klebsiella oxytoca; identical to SEQ ID NO: 25793

SEQ ID NO: 182251 - DNA, 1077 bp, Klebsiella oxytoca; identical to SEQ ID NO: 102177

SEQ ID NO: 182252 - DNA, 2406 bp, Klebsiella oxytoca; identical to SEQ ID NO: 102178

SEQ ID NO: 182253 - DNA, 441 bp, Klebsiella oxytoca; identical to SEQ ID NO: 102179

SEQ ID NO: 182254 - DNA, 504 bp, Klebsiella oxytoca; identical to SEQ ID NO: 101191

SEQ ID NO: 182255 - DNA, 375 bp, Klebsiella oxytoca; identical to SEQ ID NO: 101190

SEQ ID NO: 182256 - DNA, 258 bp, Klebsiella oxytoca
ttgcaggcaaatggtggtcttctgcggatcgatgccgacggcgagataatcggccatcacctcaaggatattgctgctgattttttgcgggttgctgccgttgtcggtcagtccctggagatccgcgacgaggataaactgctggtggtcgtgctggagcagcgcgcgctggcgcagggaaccgacgtagtggccgaggtgcagctggccggtaggacggtcgccggtcaggatcgtttggctggtgttcataagtga

SEQ ID NO: 182257 - DNA, 342 bp, Klebsiella oxytoca
atgtcacaggcaattcagcataattctcaggtcatgatgacccgccacccgaattttttacgtaccgccgaggcgctccggcccgcgctgagtcgtcaggcacacccaccgatcgcggtagtcgaagcccacgccgacgccgcggcgctcttcggctggcgcgccgagccggtgagcaccctggccgcgctttaccagcgcgagctgagtagcggcgatagcgtcattattgattttggcagccactacgttggctacctgcattttctctgccagagcgccgggagtccgccggacgctccggcccatctgcagttgaccttcggcgaaacgctgagctaa

SEQ ID NO: 182258 - DNA, 780 bp, Klebsiella oxytoca
atgaataacctggttccagttggatctccggcatctcccggaacattgctcccggtggccatcgattaccctgccgccctcgccctgcgccagatggcgctcgtgcaggatgaactgccgaaatacctgctggcgccggaagtcagcgccctgctccattacgtgccggatcttcaccgcaagatgctgctggcgacgctgtggaacaccggcgcgcgcattaatgaagcgctcgcgctgacccggggggatttttcgctggcgccgccgtatccgttcgtgcagctggccacgctcaagcagcgtaccgagaaagcgaccaggacggcaggtcgtgcccccgcaggcagtcagatccatcgtctggttcccctttccgatcaccactatgtcagccagctgcagatgatggtggccaccctgaaaattccgctggaaagacgaaacaagcgcaccggcagaatggagaaggcacgtatctgggagatcacagaccgtaccgtgcgcacctggcttagcgaagcggtggaggccgcagcggccgacggggtgacgttctcagtaccggttaccccccatacgttccgtcactcctacgcgatgcatatgctgtacgccggcataccactgaaggttttgcagagcctgatgggccacaaatcgatcagttccacggaggtctatacgaaggtgtttgcgctcgatgtcgcggcacggcaccgggtgcagtttcagatgcccgaagcggatgcggtagccatgctgaaagggaatatttaa

SEQ ID NO: 182259 - DNA, 144 bp, Klebsiella oxytoca
atgactaaccagccagcgacggccagccagaaaacagacgaagtcgcaaacaaaactaccccgtcaatgacggtagacacgatattttcgggcacaggtttcactcctcttcagtgggtggctatggaacgggaacattcatga

SEQ ID NO: 182260 - DNA, 1017 bp, Klebsiella oxytoca
atgaccgacttcgtgacccggactgttatggacaaaacaatgtggctcgtgacattgccgaagatcattacaaataacagtacccgccaggaggaaaatctggtcgtcattctgagcagggagcaatcgtggggggcaacttctgaccattttcccgacggattgtaccgggtctcctgcataatgacactgtacctggccgataccgaacagacgaagactcagactttcactgcaatctactggcctcaacagaaggccctgcatctgtttacagatgagttcagactggaacgccgcctgcagggacacggcctgggtagctggatcacgcagcagtttgtgctctgggccagaggccttccgccagaaaccagggttttgccgattgaaatttcccaggttgatgaaaaaaacgaagaaaacaagatccggagggacagactgtggcacgcaatgggtttccggttcccggccggggaaaccagctcaatgccgctgcgggcagacgaactacagttgccgcggggcaggtattcaacgctccgggtggagcccctggtatccgcggtacgccggctggaagactgttatcgcgggctgcaggaaaaaatcgtgcagctcgaaggcaaaaaacggtcgcaaaaacagttaattacttcacttaagaatcgtccattttatcatctgttgcacaggaaagggggccagctcccggacgagaaatgtgacgccctgccactgcgggcagaaaaactgtctctgccgcagagcggggattcagacctggaggtggcgcaacgggcaaccggggtcatccggctggctaccctgtgtgctcagtcgcagaaaagaatcctggagctggaaagggagcttgcctcgcaaagtgaggagctcgttgacctgcaggcacatcccttttttaacctgcgggataaataccgcggccagatcctgttctggggatgggggatgggttttctgtgctttatctactggatgttggtgtcatga

SEQ ID NO: 182261 - DNA, 336 bp, Klebsiella oxytoca
atgtgtgatttatgcagggcggatgagaattacttccatacggcagaatgcgtgtatgaccagctggtcagtgaataccccgtgatgtggctgcgggactcgacccggatcggggcctgctacacccttcgtgaactgctgtcgccggaagggatggtgctggccatacagaactctctcccgatgaaggggtggcggcttcgcatgctttacaacgaagccattgacgaagaaattaacccactgcacggggactgtattgaactgccctccagagcggatgccctgcaggctttcgtggggtcaggggacactcccctatccgataactgctga

SEQ ID NO: 182262 - DNA, 312 bp, Klebsiella oxytoca; identical to SEQ ID NO: 143783

SEQ ID NO: 182263 - DNA, 306 bp, Klebsiella oxytoca
atgcagtttaaggtttatgcctataaaagagagagccgctatcgtctgttcgtggatgtgcagagtgacatcatcgatacccccgggcgacggatggtggtcccgctggccagcgcccggctgctgtcggataaggtctcccgtgaactctatccggtggtgcacatcggggacgacagctaccgcctgatgaccacggacatggccagcgtcacggcctccgtcaccggggaggaagtggccgatctcagccaccgggaaaatgacatcaaaaatgcgataaacctgatgttctggggaatttga

SEQ ID NO: 182264 - DNA, 219 bp, Klebsiella oxytoca
atgaagcagcgcatcaccgtcaccatagacagcgacagttatcagttactgaaatccgcggacgtcaatatctccggcctggtgaacagggccatgcagaatgaggcccgtcgtctgcgtgccgaacgctggcaggccgaaaatcaggaagggatggccgaggttgcccgctttattgagatgaacggttcattcgccgacgaaaacagggactggtga

SEQ ID NO: 182265 - DNA, 2655 bp, Klebsiella oxytoca
atgtatcccgtatttgagaatggatcctgctgggtcaaggtggattttcacctgcatacccgggcagataaggaatttcgctatgccggagaatccgacagatatattcgcgactacgtcagtgcccttaaaggggcggaagtgggcgtcggtgtgatcaccaatcacaataaatttgatcccggcgagtttaaggcactgcgcaaagccgcgcgccgtgaaggcatggaactgcttcccggcgtggagctgtccgttaatgatggccagtccggtgtgcacacgctcgtggtgtttgctgatgagtggttcatcaatccgcagcagacaaaccatattgaaagtttcctgacggccacgtttgcgggcgttgataattttgagaacgaaaatgcccgttcaacagaaaatatcacacagaccatccagcgccttgaccgatacgaacgggattactttattgtgtttgcccacgtggaggcccctaacgggttatggggtggactgagccctggcaggatcggggagctttttgataacgagcttatccgccggcgcgtgtcgggatttcagaaggtgatgacccatgacctgcgggtcaaaattcagggcgtgctcggtaagcgctatcctgctgaagtccagggatgcgatgccaaaacgctggatcacattggtgccagaaaagtcgccagctatctgaaactgggtgattacagttttgaagctgtccgctttgcgctccaggattttccccatcgcgtaagcgtggagaaaccggctctgatccacagccatatccgccagatagcattcgagggagctggttcgctcggtggaaccgtggtgaaattatctccggaactgaacacactgattgggatccgcggcagcggcaaatcctccatacttgaagggatccgttatgccctggacattccgtttggtgagaaggcttctgaccgcgattacaaagaaaatctggtcagtaatttactcaaaagcggggggaaaattaccatagacgccgtgtgccgtctcgggcgggcctatcagataacccggattttcggccaggagccgcaggtcatttttgacggtcagcccacgcaaggtgtcgcgctccgggaaacggttctgcacaagccggtgtattttggccagaaagatctctccaataccggcgcgggatttgaatacgacctgattgaaaaactggtcggggagcgtctggccgccgtgcggaacaaaatccggcagcagaatgaagtcgtcctcgacaggttacgcgagtatcgtcgtctgaaaacatcaggagaaacactcgccgaatggcaggcgaaagagaaggatgtacagttccgcctgcgcttttattcccagcacggtatggaagaaaaactggcgcgtcagaccaccttcggacgggatgagcgctacctcagcagtaccactgaacgggcaacccgggcgctggacagtctgcaggacgggatcagggaaactctcgatgggctgaagcaggagcagaaatatgagtcagcgcataaccaggcagacattgatgattactgtgcgggatatgattgcttcacggcccacctcggctccctgaacaccatcgtagacggcgcccgccggctcctcacagaactcgatacgaagcagcaggcttttctggagaaaaagctggcgctgacggaggaatttgccgaaatagagcgtggcctggctgaagagctgcggctggcaggtgtggaaaaagccgatccggctgactttctgaagctgaaggccgagctggaacttgcggaacagaaaattgacgagctgacccgggctgaaagcagtcaggcgttactggagaaaagtcttacagaggcgctgagccgattgtatgaactgtgggtggaagaatatcaggaaattgaagccgtgttggccggcatcagccaggccgactcgcccctgaagatcgtggcgtcttttgcaaacgacaaaaaagccatgcaggccgttctgaaagaggcctttaccggcagccggctgcgggaaagtacctaccagaccgtggctgacaccttcagagactttggtgaactctggctgaacagggacaaactcccggggattatcagcggctctgcagagacattcagcgagtatctgaaacagcagattgaatcgctgattgcctggcaaatacccaatacctactccattgaattccggggcaaaccccttgaacaacattcgctgggtcagcgcgcctcagctttaatgctgtttgttctgaatcagcaggataatgatgtggtgatcatcgatcagcccgaagacgacctggacaatcagacaatttatgacgacgtgattaaaatcatccgggcgatgaaaccccgtacgcaatttatctttgccactcacaatgccaatattccagtgctgggagatgcagagaatgtctgtgcctgtgaatactcagacggaaagatccaggctgccggtggaggcgtggatgcccctcttgtacaacagcacattatttcggtaatggagggcgggcgggaagccttcgaacgtcgcagggaagtttacggctcatggctcatggctcatggctcagtaaaacctgatgccataatgttcatttag

SEQ ID NO: 182266 - DNA, 1026 bp, Klebsiella oxytoca
atgagtgtaaaaggcgcatatttggggttccgtaatcacaatggaacctttgatggtccgtttcttgatgaggaaaaactcacagcggtactgaagttgttcctcgcacctgagaaatcagatcactatctgtttcctgatctgactctggtcatccatcatattgatgctcagatccgaagcgggttcagagagctggaaacagggctgtcgcgatcagcaatcaggatggaaactgagcgacagttacgtgaactgtccgacaactatcaggatctttacagtgagtgggactttgcctgttcagtagaagataaaagtaaacagattcagaagtggaacgacgtcatccaaaaggccaccccggtactcaggcagcttcgggatacgatgccatccccggtcccgatcagcgaatggtcagatacgctcatcttcagaaccgaacacaccgggcgcatgtacactgaagccctgctggtttacatatatgcccgtgcagcttacgaacccttttcgcttgccagggatccgaatctgagacgattctgtcgcgagctgaaagaaaaggtcaccgctcagctcgccggggataccggaaattcacttctggagagcgcggcttatcacgaagaagcacactaccagaaggtcggggagctcatggggctgcagagcaaagccgaggctgatgcacgcttaatcacgttaatcaaaacacgacacgtcgtcagaaaggaacactctggttaccgttcgcgctggtcatatgaaagggcagatacagagtattcccgcgaactggctactacccattattctcccgctaagtggaaaatgctcaatgttctctggaatatctggcaccgggtcggtcagctggaacacctccttgatgagctggaacagcatcctggaagtgttgatttcagtcgtatggatgatgcccgggcgatgacggagaaattattgagtcagtctgcagatggtgagacaccgctgacgctcacggggccgggtaggtag

SEQ ID NO: 182267 - DNA, 441 bp, Klebsiella oxytoca
atgggtgcaatttacaaagggctacagttcaaaactgcgctggaagcacgctgggcagcattttttgaccttgctggctgggagtggcatgtgaatcctgtatgtgttggtgactggtctcccgatttctgggtcagttttccgtgtagccactcggaatgtggtcaccacaggttacttgtggcggtgttacctattgataatattgaatgttttaataatcatccaagcttaaggcatgcttactctatcggagaagatcctcaggggattcataaacgcgttgatgcaggggccgcttttggtagtagtccagaagtaactacttgggtatcagcccacggctctggcggcggaacgcacaatgtcccattcttcgtacctggtgccggtgaactgtggctaagggctgaaaaccgtgtgcttcgccaatcggtttag

SEQ ID NO: 182268 - DNA, 594 bp, Klebsiella oxytoca
atgacagataaccggaacgatgccgctcgcgatatgtgggctgaggcgttgagttcattgtttaaaggtgattccccggaagaattatttctgatttcagctgatgagattgatgccctagaggggttgcctccggacaaatggccaacgataggacagacagaaattaactgggatttgtctgttccgggacgcaaatggacaattgcgccttctgctccatggttattgcagcctgccgacagtgaacaagttgatatcgcgtctatggtcctggggaaagcctcttttgctgattttgaccctcttattaattccttctttcgactgacagattccagtctctggacgaggcttgaaccccggaagctggggatggccatacttcatatcgcaaaaggatggcctatttcgcctgtcttgttaagtttgcacgaagatggcggatttcatttcggtggtgggtcccatcgttatcaagtactgaagcggtctggatctcctcatttttactttctggctgagccggatgatgtaccggccattaataagcaacttccggttcagtggatgcgtgactatcaactatcatga

SEQ ID NO: 182269 - DNA, 276 bp, Klebsiella oxytoca; identical to SEQ ID NO: 56170

SEQ ID NO: 182270 - DNA, 378 bp, Klebsiella oxytoca; identical to SEQ ID NO: 104959

SEQ ID NO: 182271 - DNA, 396 bp, Klebsiella oxytoca; identical to SEQ ID NO: 101138

SEQ ID NO: 182272 - DNA, 2448 bp, Klebsiella oxytoca; identical to SEQ ID NO: 180770

SEQ ID NO: 182273 - DNA, 174 bp, Klebsiella oxytoca; identical to SEQ ID NO: 143759

SEQ ID NO: 182274 - DNA, 1383 bp, Klebsiella oxytoca
atgacaatgataaaaaagcttccattaaccatgccggttatcgccgcgttttttccgcttacctctgtaatggcgcaagaatttactcaggaacagatcgacgccatcgtcgccaaagccgttgataaagcgctggccgaccgccaggcgaaaatcgacgccgcggccgacaaaaaggtcgacgtgatcaccaacccgcagaccaccaccgcctcgccggatatggccattccgttcggcctcaagttcagcggctacgcccgctatggcgcccacttccagaccggcgaccagaaatatgtcggcgtcgacggctcctataacggcgcctcggcgatcggccgcctgggcaacgaaagcaacggtggcgaattccagatcagcaaggccttcaaaagcgcgcagggggctatctgggatcttaacgtgatgttcgaccactggagcgacgaggttaacctgaagaaggcctacgtcggcgtcaccaacgtcctcgactccaaccccaacgcctatatctgggccggccgcgacttccaccagcgtccgcaacaggggatcaacgactacttctggatgaaccacgacggccagggcgccggggtgaagaactttgatatcggcggcgtgcagttcgacgtggcggcggtgtcgcaggtgaaatcctgtagtccggaagtgatggccgacgagaccaacccgtcgcgcatcacctgtaccggcagctccgacaccggcgacaacggccactacgcgctgaccaccaaaacccacaacatcaaggccgggccgatcgacgtcgaggtgtacgccaactacggctttgactcgaaggcggtggacagcgacgcgcgcctcgaagcctggcagggcggcctggtgctgagccacaccaacgacagcggggtgaacaaggtgatcctgcgctactccgacaactcggataacagcgtctacaacaaaaccgacgacctgaccacggtctacgccagcttcgagggcagccataagttcacccagcaggcgcaggtggaatatctgctggccttccacgactacgacaacggcagggacaacaccgacaaccgcaagaactacggcgccatcgtgcggccgatgtatttctggaacgacgtgcactccacctggctggaagcgggctaccagcgcgtggactacgaccagggcggggataaccatggctggaagctgacgctgtcgcagaacatcgccatcggcatggggccggagttccgcccgatgctgcgcttctacgtgaccggcggccaggtggacaatgagcataccgcgaaggtcaacggcacccaggaccagcagctggattcgctgaacgtcggcgggatgtttgaggcgtcgttctga

SEQ ID NO: 182275 - DNA, 960 bp, Klebsiella oxytoca
atgaacacgcaacctgtcattgggatcagcggatgtttaaccggctcagccgtgcgattcgacggcgggcataagcgtatgggctttgtgatggatgagctcgcgcagtgggtggcgtttaagcccgtctgcccggagatggcgatcggcctgcccgtaccccgcccggcgctccgcctggtgcagactccggtcggggagatccgcatgcgcttcagccacgccccgcacgaggatgtgacggagaagatggccgattttgccaacgcccatctggcaactctgggcgagctgtcgggctttatcgtctgcgccaaatcgccgagctgcgggatggagcgcgtgcggctgtatgacgaaaaaggcaatcgcgggcgtaaggaaggcgtggggctgtttaccggcgccctgatggcgcgctacccgtggctgccggtggaagaggatggccggctgcacgatccgctgctgcgggagaattttgtcgagcgcattttcgccctgcatgaactcaacgccctgcgcgcccgcggcctgacccgccacggcctgctggcctttcacagccgctacaagctgcagctgctggctcaccaccaggcgggctaccgcgagatcggcccgttcgtcgcctcgctgcatgaatgggaggatctggaggctttcttcgaggtctaccgtgagaagctgatggcgatcctcaagcggcccgtctcgcggaaaaaccacaccaacgtgctgatgcatattcagggttatttccgcgaccagctgaacagccgccagcgcggcgagctgcgggaggttatcctcaactatcgcgccgggctgctgccgatcctcgccccgctgacgctgcttaagcactatctggccgagtatccggatcgctacctgcaggcgcagaactattttgacccctatccgcaggatctggccctgcgcctgacggtgaactga

SEQ ID NO: 182276 - DNA, 552 bp, Klebsiella oxytoca
atgaaacgcattctgacccttggcctggcgctgctgatgctgatgctcgccggctgcagcaccgaggtcaccgaataccggcagcagcagcccgccctcgacatctttcactattttcagggccgaaccgaagcatgggggatggtgcaggatcgccgcggcaagcagctgcgccgcttccatgttgagatcgatggcgacgtcgtcggcgataccctgacgctccatgagcgctttgtctatgacgatggcgagaagcagcagcgggtatggcgcattcgccgcaccggcgataaccgttatcagggcaccgccggggatatcgaaggcgtggccagcggccaggcggcaggcaatgcctttcactggcgctacagcatgaacgtcgaggccagcggcagccggtggctgctgcactttgacgactggatgtacctgcaggacggcagccatttgtttaacaaaaccgagatgaagaaattcggcattacggtcgccaccgtgacccttttctttacccgaaccacagcagaagagaggacagcgccatga

SEQ ID NO: 182277 - DNA, 651 bp, Klebsiella oxytoca
atgctccagtacagcctcactcgctatcatgcaggatttgagctttggggggatttacgttcgttagatcggctccatgacttcatccatcgggttgtcgatgaaagtccctatatcagcgataaagaaggctttgtacttgatctcgcctatcaggttcgtaaagcatttgaaggatgcagacaaacagatgcaggtgatccagatgaccccgatagctgcatgacatatggagtaccgcttctttggcctacagtcttagttcagacaagtgtcctgcgccatgcaatggcttttatgtcaatagataaacttgatcagtccattatgtttgaactagagcacattatagaatcagctcttagagaggcgattccgaatcaatcacaagagttaatacatcgtgtttggcacatagggagttccacatataaacatctcgatactatactcggtagcagaattcaatattttatcgatttgccaataaaacatagactggatacattaacaaaattgatggatacgtttgaccctatgtatgaatggctaataagagaggataatctgtcccttccgaatatgattcccccaagttcattttctgaaaatgacaataaattggatcccaaagatgagttcaaatggtaa

SEQ ID NO: 182278 - DNA, 801 bp, Klebsiella oxytoca
atgatggggattgatcagaaagtagccgttgtgactggtgccggtcaggggataggtagagcaattgccctgcgcttagctaaggatggattcaggatcggtagtctggacttcaacccacaaaccgcacaggaaaccgttaaactcattgaagcagcaggtggcgaggcgctggctgttactgtagatgtatcgaatcgtgatcaagtcttggcagcagttgatcttgttgtagacacgtttggccgtcttgatgttatggttaacaacgctggtcttggcccaacaacaccaattgaagacatcaccccggaaatctaccataaggtcttcgatgttaatgtcggaggtgtctattggggtattcaggctgctatcaaacatttcaggaaaagaacaccgtccaaggccggtgatgttatcggcaaaattattaacgcgtcctctcaggctggtcaggttggtaaccctgatctggctgtgtacggtgcgaccaagtttgctgtacgtggaattacccaaacagccgcaagggatttggctaagctcggtattacggtcaatgcctattgtccggggattgtgagaacccccatgatggagggtattgctcagaaggttgctgatgaaaacggtcagtctctggagtggggactacagcaatgggctaaaaatgttgcacttggacgaatctctgaatcagaagatgttgctgcgtgtgttgcctatcttgcaggcccggattctgactacatgacaggtcaggcattgatcatcgatggtggtatggtcttcaactaa

SEQ ID NO: 182279 - DNA, 273 bp, Klebsiella oxytoca
atgacattctattataaccatagaggtattcccaatgtttatcatgtggtaaacgaaaatgagaaatactcagaatatttaactggtgtcatacaaggagagtattttattccagatgtcagaagaagattgcctaagccttttgatcgtataaaaatcgttaatgaccagtttacttattcatatgagaactttaataataaagctataataaatataaaagatatgacgataaaatatggtcataagacctatcacattattccaaaataa

SEQ ID NO: 182280 - DNA, 549 bp, Klebsiella oxytoca
atgtctcaaatgaccctccattttcttaatgcccagaagaaactcactgctcactatgaatggcttcaaatcaacctgactgatacctacgaacaagctaaaaggttaatgccgattccttcactggacgtggtggttaaagcagggaaacttgtcatcccggagaaagggcatcttggtttttgccctgaagctggagttgtctatataactgtagatcctgaaaatccagcattttgcaaaaatgatgcgcactccattgaacgaatgtttgcacatgaactgcaccatgctgttagatgggccgagccgggatacggctcaactttaggagaagtcaagtctctgaagggcttgccgggcatttttctcttgaactttttggtggtgaacctgaactctgggaaagacttaaatcagaacttattcagccctacagtccacaattgtttcaaaactggtatagtactgattacgatcataatgcttggtttttcggaaccggggacttgccaagatggctgggatataccacaggtttcaaactga

SEQ ID NO: 182281 - DNA, 1566 bp, Klebsiella oxytoca
atggacgcaaacgatttaaaagaagctttaatcagaatcttcaacaccagaaattcaggtccatttctattcgttggctctggtttttctcgacggtatttagggattaaggattggaaaggtcttctggatagttattgtatttcaggaaaaccattcgagtattatctcgcagcgggggattcaacttatcctactgcagctagattgattgctgaagattttaacactacatggtggaatgatgcaaaatatgctgggagccgagacaagtatagcaagaaggtaaccgataacacatctgcactacgttttgaaatctgcgattatctcgcgacatcattagatgtcccaatcaaagacagtgaatatcaaaacgaaattgaaatactttcaagacttaatgtcgatggaataataactaccaactgggattgttttcttgagcaacttttccctgattataaagtttataccgggcaaaatgaactattattttccaatccgcagtcaatagctgaaatatataaaatacacggtagtgcacataagccaaaaagcctgatcttaactgatcatgattacaatgaatttaataacaaaaatccctacttagcagcaaaactgataacaatatttgttgagcatcctgttgtttttattggatattctctttctgataagaatattacagatttacttggtgctatctcaatatgtattgggaaggaaaatatttcacagttgagaaataacttgatttttattgatagagaggaggggcttactgattattcaatatctgaaacatttacaacaatagaaagaacacaaataccaataacattagttagaactgatgatttaataccggtatatgaagccattgagacaaataaaagaaaaattccagcccgtatactgcgatattgtaaagaacagttatatgaagttgtcaaatcgaactcaacagaatcaaaaatttatgtggttgatatcgatgaggttgaaaaacacgatgatgttgaatttgttgttggcgtgggagttgccgaaactcgtaaaaaagaagaggagattggaaagttaggttatacacaaataaataatatgaatctatttcatgatttgttgcatgagaattgctcatatgatgcaaatagtattttacgaaatgttatttctaatgcaggccgattctccccaaatataactgtatttaaatacctaaaggagataggtattgttaatgaagtacaatataaagcatctggttataatttggataaatgggttttaaggagtgatacaagttatcaatgtaaaggatattttcgaacgtttgtaaagaaatttaaggataaggacactaaacatattatcgagcattcaacaccagaagcagcagcaatccatttgccttttctgatgaataagctagatctggcattagtcaaagagttcttaattaagaatgaagagaaactgaatcctgataaatctacttatgctagttattttaaaaaattagcttgcttatatgacaagttattacatggttggtag

SEQ ID NO: 182282 - DNA, 555 bp, Klebsiella oxytoca
atgaagagagtcttactcatggctggaatggtattgacaggatgtcagcagctcaatgatggcgttaataaggttaatggagcaatcagctcttcgttatcatcagtaggtgaagttcttggcggacccgccactagttcaggtaatgggcctgcatccgctgttactggtcttggtgctgtttgcaaagactacgaagaaaatgggatggcagcagagaagaaatggacgggcaaaaggatctctatcactaatgccactgttcttgaagttacgaagggcagaagtgccagcgacatgatgacggggatgcccaaatcagtccctaactattacttgctcttcaaaacatccgataccagctattgcggtggcatggtctggatcaattactactccggccttgatgatgcagttcttacctataagaaaggacagaaggtcagtatcgccgggacggtaaacaatttcgaagtccggggattcgctaccgtcaacaacgccgatatgccagttcgtctggttgtattgagaaatggcaccatcaatcattaa

SEQ ID NO: 182283 - DNA, 255 bp, Klebsiella oxytoca
atgcataaaatatcgttagtggcagtgggggctgttttgcttgtcggttgtggagataagggagactttgagaaagcgattaataaaaaaatcagcaaggaacctgtttgttattctttcaatacaaaagaaaacaacagtgatgcttatgaaagcttcagcgaacccggagtttttgtaagagttaatgttcacggaaatgatgtgggtcctatcttggaaggacttaataaatcgggcggctttgttgaataa

SEQ ID NO: 182284 - DNA, 609 bp, Klebsiella oxytoca
atgaaaaaggttcttctctctgcagcaatggcaaccgcgttttttggcatgactgctgcccatgcagctgataccactgttggcggcggccaggttaatttcttcggtaaagttaccgatgtatcctgtactgtttccgttaacggccagggcagcgatgcgaacgtttacctgtctccggtaaccctgactgaagttaaagcggcagcagcggatacttacctgaaaccgaaatctttcaccattgacgtctctaactgccaggctgctgatggcactaaacaggatgacgtaagcaaactgggcgtgaactggaccggcggtaacctgctggctggcgcaaccagcaaacaacagggctacctggcgaacaccgaagcttccggtgctcagaacatccagctggtgctgtctactgacaacgctaccgcgctgaccaacaaaatcatcccgggtgacagcactcagccgaaagcgaaaggcgacgcttccgctgtagccgatggcgcgcgtttcacctactacgtaggctacgccaccagcgcgccgaccacggtaaccaccggtgtggttaacagctacgcgacttacgaaattacttaccagtaa

SEQ ID NO: 182285 - DNA, 702 bp, Klebsiella oxytoca
atgaagcgtattgccctttttttctgtttcatttttagttttgcggcccatgccaacaatattattgttaacggtacccgctttatttatccaggaaatgaaaaagaaataacggtacagctttcaaataacgccgaccgtccggcgctggcgcaggcctggctggataacggcgatgccgatgccacaccggataccattaccaccccgtttattatcaccccgccgatttcgcgcgttgacgccaagagcggccagacgctgcgtattaagctcggcagcagcgccggtctggcgaaagacaaagagacgctgtggtggctgaatctgctggaaattccgccggtggtggccaatcagaaaaatgaaggccagaacgtgctgcagctggcgatccgttcgcgctttaaatttatttatcgtcctgccggactgggcaaccgcgatgcggcggccgagaagctgaccctgaccgccagcggcagtagtctcgccatcaacaacccgacgccgttctacattaccgtcagccgtatttcccgcgacggcggtaaagccctgaacagtaaaaccgtgatgctggcgccgcagtccagccagacggtggcgctctcctccgccgtcaaccgcggcgaaaccctgaccgttaacaacattaatgactatggcgccgatgtcgcagtgaaagtggccgttaaataa

SEQ ID NO: 182286 - DNA, 2487 bp, Klebsiella oxytoca
atgaagcagaggtcattctgcacgggaagattaagcaccgcgatcgccatcgcgctgtgctgctttccgccattttccagcggacaggaaaacccgggaacggtatatcagtttaacgacggttttattgtcggcagtcgcgaaaaggtcgatctgtcgcgcttttcgaccagcgcgattaccgaaggcacttactcccttgacgtctacaccaacgacgagtggaaagggcgctacgatttacgcatcgcgcgcgataaagatggtcggctgggcgtctgctacaccaaagcgatgctggcccaatatggcatcgcggcggaaaagctcaatccgcagctgagcgagcaggagggctactgcggtagcctcaaatcctggcgcaacgaagaaaacgtcaaagacaacctggtccagtcctccctgcggttgaacatttcggtaccgcagatctatgaagatcaacgcctgaaaaactatgtcagcccggagttctgggacaaaggtattaccgcgctcaatcttggctggatggcgaacgcctggaacagccatacctcttcggtaggcgggtcggataacagcagcgcctatctgggcgtcaacgccggtctgtcgtgggacggctggctgctgaagcacatcggcaacctgaactggcagcagcagcagggtaaagcgcactggaacagcaaccagacctatctccagcgccctatcccacagctcaactccatcgtcagcggcgggcagattttcaccaatggtgaatttttcgacactatcggtctgcgcggggttaatctttccaccgatgacaatatgttcccggacggcatgcgctcgtatgctccggaaattcgcggcgtggcgcagagcaacgccctcgtcaccgtgcgccagggcagcaatattatctatcagaccaccgttccgcccggaccgtttaccctgcaggatgtctatccttccggctatggcagcgatcttgaggtctcggtgaaagaagcggatggctcggtagaagtgtttagcgtgccttacgcttccgtcgcccagctgctgcgtccgggaatgacccgctacgcgctctccgccggtaaagtggacgacagcgcgctgcgcaacaagccgatgctctatcaggcgacctggcagcacgggatcaacaatctgttgaccggctacaccggggtcaccggttttgacgactatcaggccttcctggtggggacagggatgaacaccggcatcggcgcgctctcttttgacgtcgcccattcgcggttgaagagcgatgcccatgatgactcgggtcagagctatcgcgcgacctttaaccgcatgtttaccgatacccagaccagcatcgtgctggcggcgtatcgctactcgacgaaaggttattacaacctcaacgacgcgctgtacgccgtcgatcaggaaaaaaatagtcgcagcaactacaccctgtggcggcaaaaaaacggcatgaccttcacggtgaaccagaacctgccggacggctggggcgggttttatctcagcggccgtatctccgattactggaaccgctccgggaccgagaagcagtatcaggtcagctacaacaattcatttggtcgtctctcctggtcagcgagcgcgcagcgcgtctatacgccagacagctccggtcatcgtcgcgacgatcgtatttcactcaacttcagctacccgctgtggtttggcgataaccgcaccgccaacctgacgtcgaacacctcgttcaataactcgcgctttgccagctcgcagattggtatcaacggttcgctggacagtgaaaacaaccttaactacggcgtgtcgaccaccaccgccaccggcggtcagcatgatgtggcgctcaacggcagctaccgtacgccatggaccaccctcaacggcagctacagccagggcgaaggctatcgtcagagcggcattggcgccagcgggacgatgatcgcccacagcggcggcgtggtgctctcaccggaaagcggctcgacgatggccctgattgaagccaaagacgcggccggggcgatgcttccgggatcgccgggcacccgtgtggacagcaatggttacgccatcctgccgtatctgcgcccgtaccggattaacgccgtggaaatcgacccgaaaggcagccatgacgacgtggccttcgatcgcaccgtggcgcaggttgtgccgtgggaaggcagcgtggttaaggtcgcgttcggcactaaggtgcagaacaacctcaccctgcaggcgcgccaggcgaaccacgagccgttgccgtttgcggcaagtattttctcccccgacggcaaggagatcggcgttgtcggccagggcagcatgatgtttatcagcgatgcgaacgccaaacgcgcgattgtgaagtggagcggcgggcagtgttcggtggatctgggacagcaaacaacaaaggatagcgtatgtcgctga

SEQ ID NO: 182287 - DNA, 996 bp, Klebsiella oxytoca
atgtcgctgaggaaattactaacgctttttatcgtcttaatggcgctgggaaccacctcgtcctgggcctcctgtacgcgtctctcatcgccaacggtgatgctggacatggtggtgggcagggtggtggtgcccccggatctgccggtgggctcggtgatccttacccgcgactggacgatgagcgctcccggcggggcaagctatcgctgtacttccggcaccaaccgctttgcggcgaagatcgtgtcgccaggggccacggaccttggaaataaaatctactccaccaacgtgccgggaatcggcatgcgtttcagccgcggcggcgcgacggtgaatatcgtctatcccgacgtctattcgtcccgggtatataacaccaccgactattccctcgaagggtcgcgctttacgctggagattatcaaaaccgcggcaaccaccggcagcggcaccctggtggcgggtaagtacacctcctacgactgggagagcggcggtaacccgatcctcgaaacctatctgagcgccaacgccatcaccgtggtctcgccctcctgttcggtgctgagcgggaaaaatatgaatgtcgatgtgggttccatccggcgcaccgacctgaaaggggtcggcaccaccgccggcgggaaggattttaatatcgacctgcagtgcagcggcggcctgagtgaaacgggatatgccaacatcagcacctcgttctccggtaccctggccaccagcactaccgctaccatgggcgccttgctgaatgaaaaagccggcagcgggatggcgaaaggcattggcatccaggtgctgaaggatggctccccgctgcagtttaataagaaatacaccgtcggccgcttgaatgatcaggagacccgctacatcaccataccgctgcaagcgcgtttttatcagtatggcccgacgaccagcaccggcgaggtggagtcgcatatgatctttaacctgacgtacgattaa

SEQ ID NO: 182288 - DNA, 636 bp, Klebsiella oxytoca
atgaagggattgccgaaaaacactatcgcgtggctgctattttgcggcagcctcgccgccccctcggcgtggggttttgagaccaattacgatcgcggacgggtcgattttgccgggcgggtgacggatatttcctgtagcatcgcgctaaacggcggccagcatgccggcagcggtaatgtctggctggcgccggtcagcctggcggaagtccacgatcgcggtgccggggcgtttatgaaaccgcagccgtttaccctggcactgtcaaactgccagctgcgccatgatggtggggcagcctcgcaggatgaggtgcgtcgggtcagcgtgcgctgggtcgatggttttttactgacggcggtcggtaacgaaaacgccgggtatctggccaataccttgccggatggagcgcagaatatttatctggccctatcgactaacgataataatactctggataagagtaataaaattgtcccggcggacccgcagcaaaatcaggtgcgtttgcaggaaagcgcggtcagcggcggcctgttcacctattacgttggctatgtttcgccaacgccgaaaagcgccaccagcgggccgattaccagctgggcaacgtgggaattagtttataattaa

SEQ ID NO: 182289 - DNA, 717 bp, Klebsiella oxytoca
atgaacactaaaatattcgaagacaacattttatctcgtaatgatatcgctgtacgctacgtctttcagaaaatgttttccccacaaggtactctggtcgcggtggaatgcttaagccgctttgataatctttctatttcccccgaagattttttccgccatgctaccgccgccgttcgtgaacgtatttttctcgaacaactggcactgattgaaaagcataaagcctggtttttacgtaaccatatttccgcaacaattaacgttgatgaccatatcctgaacctgttgcgccagaaggatataaaagccaaagtcgccgccctgacctgcgtccatttcgaggtaaccgaaaacgccgagaatctgctgcataattctcttgccgcctggcagagctcacaggatacctcactgtggctcgacgacttcggctccggctacgcgggaattaacgctattcgcggttatcactttgactatgtgaaaattgataaggattttttctggcacctgatgcgcaaagagtccggccgccagctgatggatgcgctggtgacctttttatcgcgcaaccatcataatgtgattattgaaggtgtcgaaagcgaagcccataaagaatggctgcagggaatggagtggtttgctatccagggacattactggcgggaagtcagtattgaacaactggtcgccgatgatattgccatgtaa

SEQ ID NO: 182290 - DNA, 522 bp, Klebsiella oxytoca
atggaaattataatatcaaaattaaatcagattggagttgttggtgcttatttacttattgttatcatctgttcggtatcattatgtttttatttttcaaggaggagaaaagataacataacctccatgatgtctaaatggacgcatactgccaatgggaacttcgtccttgttggagtgagtataatttgggcatctatcgtttcagtattcggctctcaattacaaaaacaatggttcggcggagctgattggggtattgagacattcatatttggaacttcagtaacgctaacattaatattgagcttcttacattatattcaaagtcaagaaaaggaacttcaaagttatacacggcctacctatgaagctattaaagaaaacagcactcaatgcttaaatttaatgaaagttataaatgattgcgtacaagattttaaattcattgaggcaaaggaaaataataaaaaaggtgttgtttttggtgacgtgagtgaaagggaaaaatttaatacataa

SEQ ID NO: 182291 - DNA, 165 bp, Klebsiella oxytoca
atgatcgttcatatgctctttgaattgaggggactttctaagatcactaatgtaatcatttacagattcaattatattttttatataaacctcatgactattgagggctgcataaggagcaccaaacaagtttgggtgattcatttttgtatcgtgatgttttaa

SEQ ID NO: 182292 - DNA, 207 bp, Klebsiella oxytoca
atgaaaatttcgactccttttgaaggtaagtcagttatatgtattttcaacatatatgctaatagagtgaattttctagagaatgacttaaaggctgagagcctctatgcattattaaaacctatatttcacatgttgggggttttaatttctttaaaaaaattatacattgaaaaaattaaatgctataatgattctaatatataa

SEQ ID NO: 182293 - DNA, 258 bp, Klebsiella oxytoca
atggataagaatacattctggtcatacacaactcctctccccactcatttagatggtgttgaagaggataggttctcttctgcttctgagtataatactgagcaacaacatgtacatcatcaagtagtatatattgttagcgaagatattttgaatattgagattgaagtgcgaaattttaatatagctgattcggggttagatcattctacccgaagttttagagaaagaatctttttaaataagaaagaaaaataa

SEQ ID NO: 182294 - DNA, 1542 bp, Klebsiella oxytoca
atggctatttttcatcttgattttaaaattgtgaaacgttcagaaggtaggtcttccgttgcgaaggctgcttatcatgctcgtacacgtataacagatgaaagaacaggtgatacgtatgattatagccgccgtactgatttatacgggcatttcatattagctcccgctaatgctccagaacatatcgtgaaagactctacagcattgtggaatgaagttgaaagagttgagcgccagaacaacggacaaacagcccgttatttcgatgttgctatccctgccgagttaaacaatgacgacaagaaaaagctagtccttgaatactgccagaaaaatttcgtcaataaaggaatgattgcggatatcgctttccatgatcttgacagcgataaccctcatgctcacgttatgttgacattaaaaaccataggccctgaaggttttggtaaaaaagaaagaagctggaacgatagaaaaatgtcggtgttgtggcgtgaatcatgggcttctatggctaacagatatctcgaatctgctggttcatcagaacgtattgatcatcgttccctgcagacccagcacgaagaggcattagaaaaagcagcagttgctttggataatgaagaaaaagcactatggcttgccaaagccgccgaaacaaaccgccctgcaatgaaacgtatacatagtgccaaatggcgtagtaaagcagctcaagagcaaagagccgcagaacaggctgttcgtgatgaagccaagcaagaagcggttgaagtctataagacattcagggaacttgatcttgaaatcgttgttgatgtcagaagctttactgtggctgttcttgcagaaccagaagagattatattggttgatacccactcaaatacagcaaacagcagagaagccattaccactcagccggatccagtttcacagagaagaccagtagtgaagtcataccgtaatcctgataagatcagtcaggttaaccgagaccccaaaccgtcactggtgatcccaccatcacctcgtactaaactgaaaatcccctcttctccaacaactggagcgattaaacgcgctcctgttaaaagtaagaggaagcaggttaaacctcgtcaggatggaatttttaaacgttttacggcttacattgtcgattttttcaaagagaaattcgtctgggccaagaagaagcccattgctcccatttctaccgatgctgaacatgacaaacatattgccgaaaactacgtattcgatgaggtattaggtaggtatgtaccacgtgctgaacatgaaaaccgtgccagattcaacggtgataatatgttctatgaaaagacacaacaaaaagatctctatgacgaaacaccgacgcagcctgtgatatcgcgtttcccgagtcgtcctctgcaggaacagcaagagattgatcacaaagtagatctctcaccatcgctaccacctgaacaagtgagaaaaatccgtactccaaaattgcgtccaccgggtcatcacgatggtagggaataa

SEQ ID NO: 182295 - DNA, 321 bp, Klebsiella oxytoca
atgagtgaatataattcaaataataatgagaagaaaaacaaaaaacaacttgaacatattaatctatgcattacacgagatttttatttttatggtaagttttatgatgagctaaaaggtatcatcaaatcatataatgatgagataatggaaatcaaaagcgatataggcgaaaaaatatctttaagtcttttgtgtgatcatggtgataaaattaatagcgaaataaaagaggtgatagatgatgctgatatatcatttaaaactgtgactgaacgtttcagagagagtgttttggaaaaaatgggctttgttgaataa

SEQ ID NO: 182296 - DNA, 564 bp, Klebsiella oxytoca
gtggctaaataccagattgactctatccagagctggccttcatttgaatatgatggttctatttattctctttcgcatcttgatgctcatgagatcacgtacaaggggcaaaagcaggactacaaatttgtggtgacctatggtcttcactgctttgcgaaagatgcaacgccttacaacatccctctgatttatgaagatgggcgcgaaaagataaccatctgcatggagcgttacgaggcatcaaagcagctccgtagcattctggcgaacttgcccaatgttctcctgtatcacacagccgctgagaagtatttcaccctgcacatgatgaacagcgcgacaggtcagatggagccgtacaaagtttgcgttgccttctataaagagaagcgcttgctacgaatgcacatcctttctgcattcttcgtccgaactgggccaggtgcgcctgatgtgccgatcccaaacaagtctgtcagtctgtttaaagttgcgttagatacttcgcgaattcctcgaaacactccaggaccgaaagaagcgaacaaccagaaaaagtag

SEQ ID NO: 182297 - DNA, 213 bp, Klebsiella oxytoca
atgcagcgtgagctggtagagctgcggaagctgatcgagaagcaacaattattgcttgaggataaacaggagacagaccggctgcgggaacaggtgaccgggttgcaaaatgagcgtgacgcagcatccttggcgctggaaaaagtgaaagcggagcttgaggcggagaggaagaaagggttctttaggcggctatttaaaaatttgcattaa

SEQ ID NO: 182298 - DNA, 345 bp, Klebsiella oxytoca
ttgaccccaacgcccatgctgccaacgtttgcagccccgaccgatacggaacgcgccagcctcgccgcgatcctgaatgacacgggcctccgtgccacgaatccccggattaacgtcttacactacctgaacgcaaccgacacgcctgtaaccgctgagatgatcagccgctgcgttgacctcccgttatcgactgcgtacaggacgctcacggcgctggaagtcacccacctcgcaggggtcactttcggacgcggagacgtcactcgctggttccggtttacaccggatacaccgcaacattgcccggcctgcggacagagtttttacggcgaatacgcctga

SEQ ID NO: 182299 - DNA, 144 bp, Klebsiella oxytoca
atgaccgtcaccaaaaaggggccaccagcgcccgcacatatcgaaccggaggccctggaaaaggcgatcaccgccgctcgcaaaatccgagaagccaacccggagcgctacaaatccatccccgtccagccgaaacttttctga

SEQ ID NO: 182300 - DNA, 663 bp, Klebsiella oxytoca
ttgactcatgcagtaaccagccattatggcaacggcagatatcatcttatccactcagccaactacaccttcaacgacaaagaatacaacctgaatttcaaacctgacagcaagcgctactcgccaatccgtcaggagataatggacagctttattacccaactctgcgcgatgcagtcccattacagcaaggtcttcgcctttcggttcgacctgtcagtcccggcaggaatgcccgtatcagagagcaacaagttaatcagcgacctgtttacccggttgcgtggcaagttcaccgccaagcgctggaatggacagccgatcaagaaatttgcatatggctgggtaagggaaaaagagaaggccaagcaggttcattaccactgctggatcgccttaccgcactttcaggtcagagttgccggattcagcaatgagggcactttcggactgataagcacactctggagtgaactgacaacccaggctggtcgagtccacctatgtgatgactcgtacactataaatcgtgaagatcactcatcgctggtggaactggttgagcgtgtctcctacctcgccaaatcgcgagggaaatattccaccggggacgggcagcgtatgttttctgcatcaaagttgaaaatactgactgctgcttaa

SEQ ID NO: 182301 - DNA, 723 bp, Klebsiella oxytoca
atgcaggttgttacgtatcgtcgcgtgtctactgagcgtcagggtcgctctggtttggggcttgaggctcaggctgactacattgctcacgctgtctgccaacatggttgggagatcattggtgagttcaccgatgagggtatgagtggttctctggctccaatgcagcgcgaggggctgcgtcaggcaatagaattgtgcaaacgtaccggggcgtgtttgctggtggctaaactggatcgcctgagtcggtcggttttggatatcgccacgctggtggaggagttgccctgcatcaaggttgccaccatgcctatggcagataagtttcagctccatttgtacgcggcgttagctgaacaggagcgcgactttatcaaacagcgtaccagtgatgcgctggcgtcgttaaaggcgcgggcggcggctggtgatgaactgtcacaacaaaaggtgcaaacgtggagtgacaatattgctgctgcacacgccagcgggttaaaccgccagcggagtattgaggccagagccgttcgggcagacaagtttgcggcgactgtggaagataacattcttgccgcccggacacgcggccataccacactccaggctatcgctaattatttaaataagcgcgggatcactacccggcgcggtaaacgttggacacctgcggcagtgagccgggttgagagccggtttcccactccaccagacagatag

SEQ ID NO: 182302 - DNA, 726 bp, Klebsiella oxytoca
gtgatcatggccgatatctttgaggagaattaccgctgttacggctatcggcgccttcacgcgatgcttcgcggtaacaacagggttatttctgaaaaggttgtccgcagactgatggcagaagagcagctcgttgttaagcgcaccaggcgacgacgatacaactcttactgtggcgaaatcggcccggcaccggaaaatttactcgcccgggattttagttcctgcaggccaaatgagaagtggctgaccgatattacggagttccagcttccggctggaaaagtctatctgtcgccggttatcgactgctttgatggcctggttgtaagctggtcgataggaacacgcccggacgcgacgctggtgaatacgatgctcgatgacgcactcgatacgctcaacgaacatgataaaccagtgatacacagcgatcgtggtggccattaccggtggccgggctggctcgagcgtatcaacacctccggacttataaggtccatgtcgcgcaaaggatgctcgtcggataatgctgcgtgtgaaggcttcttcgggcgtatcaaaaacgaaatgttctatggcagagactgggcgggtatcacgctggaaaaatttatctgcttcctggacaagtacatacgctggtataacgagaaacgtatcaagctatcattaggtgcaatgagtcctgtgaagtaccggcagcatcttgggatcacaacataa

SEQ ID NO: 182303 - DNA, 576 bp, Klebsiella oxytoca
atgttacagaaggctattaaaaggggagtgtcaattgaaaatttaagtgaagctttagacatatcagctgatacccttaaagggagattgaaaatattggatgatatttctcaggaagtagtgaatttattttctaaccaacatgtaccgaaggcaacattttatgttcttaaaaaaatgaaacctatgcgacagattgaatgtgctcatttaatgttgaatatcgaaaatttcaccgagaaattcgcattgtcattattgcatgggacagaaccttcacttttaaatatgaccagaaatgataaaaccttacaaaaaagtggacatcgacaaattattgagcggttagagaaagaaatggcacaagctcatgtagagactgaaaagctaaaaagcacttatggtattaatgcattaaaactagtgattattaaatctaacttaaaaaaactattggataaccctaaagttttgcactggttgctggataataattctgattttttatcagaattaaggcttatatctaacatagagagtctatcaaatgttaaacaagaggtgttacgcgaatga

SEQ ID NO: 182304 - DNA, 258 bp, Klebsiella oxytoca
atgttggatctgttgttttgggccaagagaaacaacgagaaaatctcctatgagcagctttcaagacttctctatcctaatgattctgatgtcattagaggaggatcccaacttaaagacactgataagccgtttgccgataaagtgcttactcgtgagttcgagaggctgtttaacatctatctgagcaaaaatgacgatatgatcaatacaaaagtcgctgatgctatgaagatgaaggagaaagaagaggaatga

SEQ ID NO: 182305 - DNA, 240 bp, Klebsiella oxytoca
atgaaaaacaacaacgagcaaagctctatgacaaataaaagagaagataaaagatttattcgtgtacctgaagttctaagaaaggtaggtattagtcgtaccacattatacgagcttataaaaaggggaagctttcctaacaaagtaaaaatcagtttaagatctgttgcctttgttgaaagcgaagttgacgaatggattgaaagaacgatttgtgattcacgtattgtatctaaataa

SEQ ID NO: 182306 - DNA, 321 bp, Klebsiella oxytoca
atgcaagcatatactgtaacaccacctgtagttttaacaataagtaatgatgagactgagatattcctgaaaaaagcagtggaaaatatcaaagaacacgttcaatatattcttgattatgcatttgatgattttacacggcataatgaggaaaaagaatatattgatacacttataacaaaagtaatcgataagacgaaaacagattttgaggagaaagtaatgagtaaaaagttaaaagtatgcaatgtttattttgatgaggtcagtgtaaatctaagaaaactttacaccgtgtttgttatccactggaatgcatga

SEQ ID NO: 182307 - DNA, 294 bp, Klebsiella oxytoca
atgagtcacgatctggtaaaagaatcaaaaaaagtattcatgcatctcgcagaggtattttatgaaatgagaataaacacactcaaagaaacccgtcctgaagaagtagaaacgctgatgaaagatgatgtttttatggagggtgtttataaggagtgtattaaaaatgcaagctcacattttaaaaaagcagccagagctgagtattttgaacaagagcattcagtgaaaatggttgataaggaggtggtattgataaccctgcgggtgaatcataaaagaaaaatagcataa

SEQ ID NO: 182308 - DNA, 291 bp, Klebsiella oxytoca
atgtgtaaaaatattgaaattagaaatacatctactgagttgttctatgatttggcaaagcgttctttcgaagcaagttggaaaacaatgcaagatatgtgtagtgaagacattgcacatcttgtggatgacgccgattttatgagtgcttttatacaaaccacgattaatcatatttgcaataactttgacaagtttactactcaagaaggtaatcaaggaaatattgatgatgtgaactatgaagaagtagcagaacgacttgtacgtaatgcttgggtgttttgttaa

SEQ ID NO: 182309 - DNA, 378 bp, Klebsiella oxytoca
atgaagaaagataaactgagtaaaaaagatgaaacgatggtatttgctatatcagtgacattgatgctgtacataaataggatctatggtatggcaagtataaactatgatgatgcaatggtttatataaaagatgaggatgttgttgagtttgcactacgcatccatatgaaagaagtaatcactgagtttgagtattacaaggtcgtttttggtacagggaaggaaaaatatgaatatatagatgtagaagagttattaaagagggtaatgttctttcatgatttatatatcaaggatatgctgataaaaaatctagaagaaggacagactacagatgaaaatggattgttgaactggaatctgaatctaggttaa

SEQ ID NO: 182310 - DNA, 480 bp, Klebsiella oxytoca
atgaaaaagataaaacttcaaaatggtaacttaaaatcatattttaatacggttgaggaactaaaaaaacatcctacaatggaagaatacatgacaggctatcgtaaactacgtgatgaagatgcatatgcatacgagataaataattatagatcagcacatactgaattgcgtagattagataagaaaagaaagtctcttattgagggttttatcattgagcttaatccaataagcagttcaactgcaacaacagcagcgaaatcatcaggtaattttgatgtaatgcatgagcgaatgctttatgccaaagcactttcagaaaaaagtgatgatgagattgtggctcttgttataaaaaaacgtactgaagcagcgctggagcttaaacgttctgttgaacagagtcttaaagaactatcagacattgcctccaagtatgaaatgtctcataaaaaaatccataaacccggtttttaa

SEQ ID NO: 182311 - DNA, 1359 bp, Klebsiella oxytoca
atgcttgtgaccatgtcagataaagaactcagccggatcaacgtcattcagtcggttgtcgaaaaacgcatgcgccgtcgtgatgctgcacaccaacttgctctgaccgaacgtcagactcagcgtttgatgaaccgctttcgtgaatctggtgctgcaggtctggcaaaccttcgacgaggacgccccggtaatcacagacttcctgagtcactgaagctgcgtgtactttctttacttcacgataactacagcgactttggaccaacgcttgccgcagaaaaattgcgcgaacgccataacatcacggtgtctgttgaaacactgagaaaatggatgacggctgatggactctgggtcccatattcacgtcgcaggccacgtgttcatcaacccagataccggcgtgactgcctcggagaacttgttcagatcgatggttccccgcatgactggtttgaaggacgtgcccccaaatgctgcctgctcgtcttcattgatgatgctactggccgcctgatgcacctccgtttcggcgagactgaatcagcctttgattacatgatggccacccgcgagtatcttgagcaacacggtaaaccccttgcgttttacagcgacaagcacggcattttccgggtcaataatggtggttcaaccacaaccggcgttacccagtttggccgtgtactttccgaactggggatcgagctaatctgtgccaatagtccgcaagctaaaggccgcgtagagcgggcaaatcagacacttcaggaccggcttatcaaggagatgcgtctcgagggaatcagtagtatcgaagcagccaacgcctggctggatacttttatcgctgatttcaatcgtcgcttcgcaagaccagcaaaataccccaaagatctgcatcgaccggtggctgaaagcgctgaagatctggatgatatctttgcctggcaggaatcacgaaaactctcgaaaacactgactttccgttacgataagatgatatatctagttgaaactacggaggaaaacaccaggattgcaggtgaaaaaatcacagtttacgactacccagatggtacgttagcgtttaaatatggctaccgatcactcaattatcaggtcttcgataaactggaatgcatcgatcagggacaaatcgttgataacaagcggctcggcgctgtactgaaactggctcaggacaagatggatgaattggatcgagaaggaaagcgtgataggagtaaaaaaatgcccaaacgacgtgcacaggcccgggttcaggagcaactcagggccatcaaccccgtactggctaaccctgaagagttccgagccagtctgaaacgctag

SEQ ID NO: 182312 - DNA, 708 bp, Klebsiella oxytoca
atggcaagatgtacagctcctgtacgtggacacagctcatcagcagcggcggctgcctgtcctgcatgtcgcaatcgtggtagttatagccgtagtagctacggttatgatagttatccttcatactcctcatcgggcaatagcggcggtgcaagttatggaggcagcggtggcggttctagcagtaactcaaagcctcgctggtcaaaatctggttcttccgtttcttacacaagtgcccaagtgcaatcacttactccaattcgacaagcggtagagaaacttgcggcagaacaaccagatttgcgtgacgtattcctctgccacgcctgggatgaccggcagggcatcgctaaagatctacacgatttactcgaagctgcaggcgtcaaagtatggttcagcgagaaggatcttgcactcggagttcctatgatgcgtgccatcgataaaggattagccaattctcgaatcggactggtgttggtgactcccgcattgttaagccgtctgcctaaagaaggtgttgctgataaagaactttcggcgctattggctggtaaccagctcgttcctatcgtgcataacacgacgtatgaagctcttcgcaacgtcagtcctttgcttgcttcccgaagtggccttgatacgggagaggatacgctggcagttgttgcggcaaaaattgcagagctgattactgtttag

SEQ ID NO: 182313 - DNA, 771 bp, Klebsiella oxytoca
atggcttcttctttgacgattgaaagacgaaacaagcttgcccaaatcctgatcgcggaaggtagcgtgaaggttgggaaaattgcggaaatgtttggggtttctaccgagacaattcgaaaagacttaatttatcttgacaaaaaaggtatcgccacaaagggtcacggaggcgcaatagcctccgggaatattcttgccatcgaacaacctctggccctgaaaaccagtgaacatcttcaaattaaagagcaaattgcacaaattgcaattcagttgatccctgaacggggcgtggtgatccttgatacaggtagtactgtccaatgtgtggcaatggctttgatgagcaaaagtaaattaacagttatttctaatgccattaataccatccagccacttgctcatacagataatgatgtttttctcgtgggagggaaactgcatgcaaacagtcaggcgttggtgggaatgtggggaattaacgcttttcagttgattaatgccgatattgtctttctgggaactgacggattaaaaagccgtaacggtccctgtaccgcctcttatgaagaagcggaaataaaagctgccatggtgaaaagtgcccgcctgaaagtcgtcgtcagtgacagtaccaagttcacaagttccggattgttccagttctgcggctggtctgatattgattacttcattaccgattccgatatatcagaagatgagttaaatcatctttcaaaattgacggaagttatagttgctgattaa

SEQ ID NO: 182314 - DNA, 696 bp, Klebsiella oxytoca
atgaaacgaaaaatcttactgtcaccatctgttatgtgtgcggatttgctggacctgaaaacctctgtcaaagcactggaggaagcgcagatcgatgccctccatattgatattattgatggggtatttagtccggcaatgccgcttggattggatactatcaaacggctcagggatatcactactctggattttgatgtgcacattatggcaagagataatgaattttttgtccagaaaatccttgaaatcggagtacaacaaatctcttttcactatgagaccgctctacataccgaccgcctagtgaatatgattaaaggccgtggggtaaaagcgggactagcactaaatccggctacatcgttggcagcttgcgactttctgctgcctgagctggataatgttctgttgatgctgattaatccaggttatgccgataatccagatgagcagcaggtgagttatgccgccacgaaagtgcagcaattggcagaacgtctcaaatcacttgcaacacctccacgtattcaggtggatggacgtgtttcatttgccactatacctcaactgattgctgcgggggcggacaatcttgtcctgggtagtaccagtttataccgcaagggccattcgcttctggaaaaccgacaggctttgcgaaatctgattcaacaaagtggaggacatgcataa

SEQ ID NO: 182315 - DNA, 558 bp, Klebsiella oxytoca
atggattatgtcactactgaacgtcgtgttgtgcaggaaattagtgatgctatggagcagattaacccggcagaagttgaacttctgattggattgatggagaaggcagataaggttttttttgttggggttggtcgtgtcatgctttctctgcaggcaattgccaaacgtctggcacatctgggcataaatactgttgtcgtcggacaaattacagaaccagcaattactgaaaatgacctccttattgtgggctcaggaagtggtgaaactttgtttcctctgggtatcgcccggaaagccaaaacctataaagcgatggtagtgcatattggagcaaacccggattgttcaatgaaggagtaccgggatcattttattcgtatacccgtttccagcaaattacatctgcctgatgaaattgtttcacggcaacctatgaccagtctctttgaacagtcacttctgctggtcggggatatcattgcgctgatgattattgagaaacgtcaacttaatattcattcgctgtggcagtttcatgctaacctggagtaa

SEQ ID NO: 182316 - DNA, 288 bp, Klebsiella oxytoca
atgtcctgtgagcagatcaccatgcgtaaagcccgattcaccgagaaccagatcattgccgttctgaagtccgtcgaagccggacataccgttaaggatgtctgccgtgaagccggtatctctgaagtcagctattacaactgtaaagcgaagtttggcggtatggaagcctctgatatcaaaaagatgaaagacatggaggatgaaaaccgtcgactcaaacagatgtttgctgatctcagccttgaatgccgtgcactgaaagacgttatcgaaaaaaagctttaa

SEQ ID NO: 182317 - DNA, 1293 bp, Klebsiella oxytoca
atggcatgccagggattatgcacaaccaaaggcctgacggtactgcccgtgcggtatgccgttgtgccggagaatattaatgccagtttacccggatgggcgaatgatccgctcattaccggggtaacactcgctaataatgaaaaatacacgctccgtgcgcttcgtcagggttatctttacgttttctatgaaaaaggaaaacagggcgccagttactggcagtgctacagcgttgcgccggacggttcattgtggctgcagcaggtggcgtctaatcctgccccggtggaaaaggcgctgtgcgaaacgggcgaacacattgcgcaaaacgtcgagtttatgagcattgaatccccggataagtgcggcaatgtgtggtttgcgttcagtcagtatccgtgggagcaggagacgctcgaccggtatcgcaccagacctgaggagcgcatcgcgagaatgcagaaagtgatgccttcggtggcgggggctcagcgcacaaaaacagggaccgatgtcaccgcagcaagcctgaatcaggtgctggactatcaggtgccttctgtttcgggtctgctgcccggtccggatgatgcgaaagtggtaaatgtcagccgggtatcgtcactctgggagccgacggaggataacccctggcgggtcagccatgatgtggtgaaaatgcagtccagcctgtatccgtgggcgcaaaaccgcagtggcagggcaggcgcgacggtcacggccatggaaaaccgaagtgagggaatgacaccgctgctgcttccactctgggatccggtggggattgtccatgagctaaacggctggagccaggatgtgctggggcgccaggcgcagtttctgcaggagcgtgagcttgagtgcgccaccagaacaaacctcgacgccgtcagaacgctgctggaaggcaatgccgaatctctggaggacgcgatgcggagacggagaatggacagtccgttgctgacagacgaatatctggatacccgtctgcaggcgctggagaaaaggtataaggataagcctgatgtgctggcacaaatcagggcagatgacaggttagtcaggaagtggcatgcgcagaacgtgacggcatcatacccggagagcgtgctgatgagtccacctgaaccgctggctgctcaccagcgccgggttgccgcgataggcagccctgatgcagcaggtcagcaatatgaaaaaactggaggagtactaccagaaatcgctgtccgcggtggtgaaggggctgcgggaaaatgccggtaa

SEQ ID NO: 182318 - DNA, 1008 bp, Klebsiella oxytoca; identical to SEQ ID NO: 180159

SEQ ID NO: 182319 - DNA, 258 bp, Klebsiella oxytoca
atggctggtaataaaatttcagattttacggaagaagaatttactgcttttgttagtaaaataatcgctgctgattttccaactgacaaagagaacgatgatgctatttattcgttcgcccaactaacagagcatcctgctggttggaacctcatcttcaagcctaaggtaggcgaagattcttcggcgaaaggaattgttaaaaccgtaaaggaatggcgagctgctaacggtaagccaggttttaaaaaagcgtga

SEQ ID NO: 182320 - DNA, 483 bp, Klebsiella oxytoca
atggcggatgacctcgattttgacgatattattctggtgtttcctccggaatccggcctaaaaccgctgtatgtgatgtaccgtagccctcgtaacatgcccggtacagtgagcggcaaagggcagaacgttggcaataactggatggggggggccagtaccggggatggtgctcctgttccttcccagattgcggataaattacgcgggaagactttcggtagttttgattctttccgtcgggcgttctggaaagcggttgctgacgattctgcactgagcaagcaatttagtgaagctgatattaatcagatgaaagctggaagggcacctactgcggactttttagaatcagtagggaaacgtgttaaaattgaattacaccacgaaaaagaaatatctcaaggaggggctgttatggatgtcgataacattaaggcgctaacacctaaaaatcatattgagacacataaaggaaaataa

SEQ ID NO: 182321 - DNA, 510 bp, Klebsiella oxytoca
atggaaaataaacaaaaacaaacaagaatgggatggatacaaaatcttgctgatgatgaaaagaagattattgatgattttctggaagaagccgctaagttaaaaggtaaggcgctaaataaaaaagaaaaacaaactgtcaagtttattgcgcgagatcgagttcgctcgatgagaagagaacaaaagataaataaatcccaaaagattagagttaatatagataaaaaagaggatgaaaaaactaataccatatcaaataatgttgataaccgaggaagattacaaatactaacaactagtgaaaacgattttatcaataatgctatatatgaagaaatgaaaattaaaggtagaaagcttttacaaagtgaaagaaaagaagttttaaaagtggctcgtaagaaaattcttaatcaacgtatatcggaccagattaaaaaagatagaaataatgaaaggcaagaagctgagttcgaatggaaaaagcctgaaccatttcgtcgttaa

SEQ ID NO: 182322 - DNA, 204 bp, Klebsiella oxytoca
atggcggttctcaaggaacttcaggccgacctgcgggaacagggccacggtgagcacgtcgtcgatggcgttatcggcaagctgaatattcttctcctgcgcctggcgcttcacgtcggcttccagctgcgccagttccggcttcagcaggtccgccggacggcaggtgatggcctctgctccgtccagcacgcgcgcctgtaa

SEQ ID NO: 182323 - DNA, 378 bp, Klebsiella oxytoca
atgcagaaaaatatgactcccggcaggcgtaaaggctgccctaattattctcctgagtttaaacagcaactcgttgctgcctcctgcgaacccgggatatccatctcaaaactggcgcttgaaaatggcattaatgccaatctgctctttaaatggcgccagcagtggcgcgagggaaagctgctattaccttcctctgagagtcctcagttacttcctgtgactctcgatgccaccgccgtacaaccagaaccgcccgctgaggactcagagctcagcatcagctgtgaggtaacgttccggcacgggacactccgcctcaacggcactgtcagcgaaaagcttctgactctgctgatacaggaactgaagcgatga

SEQ ID NO: 182324 - DNA, 348 bp, Klebsiella oxytoca
atgatcccgctaccaacaggcaccaaaatctggctggttgccggtattaccgatatgagaaacggcttcaacgggctggctgcaaaagtgcagacggcgctgaaagacgaaccgatgtccggccatgtcttcatcttccggggccgcagcggcagtcaggttaaacttctgtggtccaccggcgacgggctgtgcctgctgaccaaacggctggagcgcgggcgcttcgcctggccgtcagctcgcgatggcaaagtgttcctgaccccggcgcagctggcaatgctgctggaaggcatcgactggcgacagccgaagcggttgctgacctccctgaccatgctgtag

SEQ ID NO: 182325 - DNA, 1539 bp, Klebsiella oxytoca
atgaatgacatctcttctgacgacatccttctgctgaaacagcgccttgccgaacaggaagcgctgaaccgtgccctgctggaaaagctggcagaccgggagcgcgaaatagaccatctgcaggcgcagctggataaacttcgccggatgaacttcggcagccgttctgaaaaagtctcccgccgtatcgcacaaatggaagccgatctgaaccggcttcagaaagagagcgatacgctgaccggtcgggtggatgacccggcagtacagcgcactctgcgtcagacccgcacccgcaaaccgttccccgaatcactcccccgcgatgaaaaacgcctgcggccagcgggttcctgctgcccggagtgtggtggtgcgctgagttacctgggtgaggatgccgctgaacagctggagctgatgcgcagcgccttccgggtgatccggaccgtacgggaaaaacatgcctgcacaaaatgtgatgccatcgtgcaggcccccgcgccttcgcgccccattgagcggggtatcgccggaccggggctgatggcccgcgtgctgacctcaaagtatgcagagcacacaccgctgtatcgtcagtctgaaatatacggtcgccagggcgtggaactgagccgttcactgctgtcgggctgggtggatgcatgctgccggctgctgtccccgctggaggaggcgcttcaggactatgtcctgactgacggtaaactccatgccgatgataccccggtccaggtgctgttgccgggcaataagaagacgaagaccgggcggttgtggacgtatgttcgtgatgaccgcaacgccgggtcagcgctggcaccggcggtgtggttcgcctacagccccgacagaaaaggcatccatccgcagacccatcttgcggggttcagcggtgtgctacaggcggatgcgtacgccgggttcaacgagctgtaccgcgatggccggataacggaagccgcctgctgggctcacgcccgccgtaaaatccacgatgtgcacgttcgcacgccgtcagccctgacggaggaagccctgaagtgtatcggcgaactgtatgccgtggaggcggaaataagaggaatgctggcggaacaacggcttgctgaacgtcagcggaaaacgaaaccgctgcttagtaccctggaaagctggttgcgtgaaaaaatgaaaacgctgtcgcgacactcggagctggcaaaggcgttcacgtacaccctgaaccagtggccggccctgacgtactatgcagaaaacggctgggccgaagccgataataacatcgctgaaaatgcgctgcggatggtcagtctgggtcgtaaaaactggttgttcttcggctcagaccacggtggtgagcggggagcgttgctgtacagtctgatcgggacgtgcaaactgaacggcgtggatccagaaagctaccttcgccatgtccttgacgtcatagctgactggccggtcaaccgggtcagcgagctgctaccctggcgcatcacactgccaactgaataa

SEQ ID NO: 182326 - DNA, 1080 bp, Klebsiella oxytoca
atgagtaaaaagatactttttgttacaatgcacttgcctagtgtttctgttcctgaggcgggtcagaagctagcttattcacgtctatgtagcctttctgaaaaaaataatgcgaaagatattgatctaatatctatttataatgaaagggaggagtgttatattaatttggctgattatcagcgattaaattcgactaatcttctcaaaattaccaatattagaaggcttattaattttttatctaattgttacctccctgttaatatagccgcaaaaactgactctagaataaagtcgttggtaaaacgcaatacttatgattatatccatatcgaatttgagcaaggtatatcaaatattcctgtagagctatggtcgaaatgcaatctagttctgcatgatgtgctgtcacaatcattatatcgattttatgtaggtgagaaaaattttctaaaaaaaatcatctattatgtaagatatctgcaaatgattaggtgggagcgaaaggtatttaaacgagtaggtgaaattacggtacttaacgacaaagataaaaatatagtcaaagaaataagtaataattataacattaaaataaatgttgattatccaaaagtttcggaaatgtttcattgtgtcaatagagataatataataccaaataacatcattttttggggagcaatgaatcgtaaggaaaatattgatgctgttttgtggtttttgaatgatatatttcctattgtaacccaaaaaatacctgactgtaccttttatatagtcggagccaatccccctgaagaaatagtacagatgcagtcgaaaaatataaaagtaacaggttttgttgactcacctattcctttttttgagaatgcagcattatctgttgtaccgctccgctttggagctggtataaaattaaaagtactagaaaccttaactgctaaaatacctactttagctactgacgttggtgctgagggtatagataatataaatcagtgtcttttcgttgaaaatgaacctgaaaagtttgcagcaatgattgttaaaattttaaaaactaagaattag

SEQ ID NO: 182327 - DNA, 1398 bp, Klebsiella oxytoca
atgaaagatgaaagccaaaaatatatctcgattatttttaaggagtggttgccgctgtacgacagcctgacgccggaagtgagggcggtacttaaaaatattgccgggcagcaggcggaggcgttagcgacccgtttttatgattttattttccaggacccggacattgcgcggcaccttagctatgacttagttcaggagcggctcagcagctcgctggccgggtgggtgaaagatatcctgatgtgcgataaggaaaatctgcaggcgctggcggagcggcagtacctgatcggcagcatccattcgcgcatcggtatcccggcagaggcggtactgcgcggcgcgcgccagctgaaagccgggctgattgaaaatatccgcgatagccagctcgatcgcgagaccagcgttgccgccatctactacgccatcatggccattaacatggcggtagaaatgatgtgccacgcctataccctgtcgcactatcgggcgacgaaaaatgaagaagcgtaccgcctgtatagcctgatggataacgtgccgctggaatatggcaaacagcaggcctcgctctccggatgggaaaataccgctatttttaatatcgttagcgataataaaagcgatattaacggagcgttattatctgattctgaatttggcctgtggttccgccataaatgcgtgcgttattttaacaaaaatccgcaaatgcaggaaatcgccgacttaattagcaaggtggatgcgctgttatccgcctggaaatcctcgtctgagggttctgagtataaaagcacgcaggctttgctgcaggggatccatatccattgccagcagatcggcagccagatgggggtgctgtttagcagcctgtcgcagatgcaaagcggtaaggatacgctgaccagcctgcttaaccgccgctatctgccggttgtcctcaagcatgaagtgacgctggcgatggaatatgaactgccgatgacggtggcgattatcgacatcgaccactttaaagagatcaatgatagctgggggcacatggtcggcgaccgggcgattaagcacgttgcggagctgctcagcgataatattcgatccagcgattatatcttccgctacggcggcgaggagtttctgctggtgctggtggagaccggcgccgcggaagcctttactatccttgaacggctgcgtaaaaaaatcagccagctggcgtttagcgttggcgctgacaatgagatttcgattaccgccagcatcggctacgccgtccacacaggtcatccggattacaatctgctgctgcgcgatgccgacagcgcgctgtacgtcgccaagcgcgatgggcgcaactgcgtgaagctgcatgaaggcgacggcaactaa

SEQ ID NO: 182328 - DNA, 744 bp, Klebsiella oxytoca
atgtcatccagtaatagcaatagtagttcaacattttcggtattaagctttgtagatggattatgggatttagcgaaagtagcaaaattaatttatttcacactatgttttgatgttctatttttctatctaaaaggaaatggtttatttggcataaaattagggaaagaattcgatctttcacttgcagatttggcggggatgattattgctttaggaattttctcatcagtaatattagtaacaaccctatgctttaatctacttctgatacgaattaagtatagtaatctactacaaagtaaagatgagaggatctaccaaaaatcatctactgaagtttttatatcagaactacgagatgatgctttagaaaatggcgacgacatgtcattaaaattgtatactgaagagcaacgcaaaagagagaaaaattataaagaagggagagccgctgaaataatctcttttggaacaatttttgttttctcaatagagtggtatttatctgcatcagacggttccagtaagatgtttattgactggttatgggaacaatctaaacatcgcgacccaacaactccgcattaccttattggtcttttagtttcgttagcattactattctatgccgtagcagtttgctggcctaaagaggataaccgcaaaatatattatcctaagcttgctaaaaaactgagaaaaaaagaagaagactggaagaaaaaatttgagaacatgtaa

SEQ ID NO: 182329 - DNA, 1539 bp, Klebsiella oxytoca
atgaataggtttggtacaaaaaggggattttcactattggagttgattcttgctctaggtatcggcagtgcaatagcattgataaaatttcaagatatgaaagttcaacaagaggatttagttgctaagactgctggcgatcaaatcaaacaattgggcgaggcagttaatggttatatcagtatgagatatgataagttatctacactgacatcaagcagtaaccaaagtagcgatccgggaccaagaacctgtaattctacaggctgtgaaattgattaccatactcttgttaatgagggattattacctgcatcatataacgggaataacatatataagtctccctataaaattatacttaaacgtgaaggaaccgcgcctaactatgttattaacggtttgattacaacatcatcagcatggatcgaaggcggacacatccgttatgaccttcttggtaaagcaatgcaagttgctggtgttgacagtggtatgacaaaggatgcgacctctgttgctggattccaaagtcagtggaaggaacaaaatactacattcaataatattaccagagatggattacttgccttcagagtagggtataacagctcgttatatgctatctatcttcgtcgcgatggaacattacctatgacgggtaatctaaacatgggtgggaacgatataaataatgttaaaaatattactgcatcgggaacgggtagttttggtggtaatattactacggcaggaagtgtaactgcccgtggtgaagtaatagcgcataacggctatggtgatactattacaatgggaggggatgcaggtaataatgactacgagataaaattaaatagtgcaaaaccattggttgtttattcacctaatgcagggcaatacaccactgtactaaatgtaaatagaaatgctgttgtccaagaaagattagctacaaatggtttaaatcctaatgatttacccgcaggctggagtggtggtttaagaactaatgatgtctatgctgctggtacggtgggtgctggttcaggtggtgctgttaatgcctatatgaacagcagcggtaatatatacgcttccaatgatgttaatgttgggcatcaggttaatgctcagtatgtctgggcttcaggtaatcttaactctaactatattcattccaacggaaatgtcgatgctgatggtagactgaatgcaggggagtttctctatattaatgggaaagcaaatgtaggagcaagctgctctccaaatggtttacaggcaacatcttcaacgggattgttgttgtcatgtgtcagtggtaaatggatgaagacatcaggtacagcaggtttttttacaaaaaaccaaagtacttgtttgattaagaaccctgatacaaatgcttgttcatgttcatctggagcaacagcttatgaattattttatactacatctactgaacaattaggtggtggaagtcatggaggaggaacgacagtggttaaagacaaaatattataccaatgtaggtga

SEQ ID NO: 182330 - DNA, 582 bp, Klebsiella oxytoca; identical to SEQ ID NO: 101188

SEQ ID NO: 182331 - DNA, 201 bp, Klebsiella oxytoca; identical to SEQ ID NO: 101187

SEQ ID NO: 182332 - DNA, 1116 bp, Klebsiella oxytoca
atgtctgttaatgatgcaaaaaagcttgcggacaaacttttcccggcatttgatgacgatgatgttgccatagttgatattcctccagagcaacgccggttgcatacagaaacttacgatttttcaatatcaacactagttgattatttgaaaagtggcgctgtttttattcctgactttcaaagaaagtatgtttggaatagaggtcaggcatcaagattgattgagtctttaataatccaatgtcctattcctgttatttatttgaaccaagagaaagatgagagtttatctgtaattgatggcaatcaacgtttgacttcaattaaacttttcattgaggatggttttgaattacaggggttgacagcatacccagaattagaagggaatttgttttcatctctagatgcgagatttcgtagacatattttaaatagaacgttgagatgtataaccatattaaaagaaacccatcctcaaattaaaattgatgtttttgaaaggattaatactggtgctgtgcaattaaatcctcaagagatacgtcatggcgtttatcatggtccattatttactatgattgatgaagtaagtgaagaaaaagtttggaaagagttgacagggattaaaaatgatacacgaatgaagaataacgaactcatattaagagcatttgcactttcattttctgccacaccatataggaaaccgttaaagaaatttcttaatacctttagttctgaaaatcaatatattgagcctaatcttgcattagaatggcgtagtagatttcttagggcactgaactgcattaataaattatttggcaagaaagcatttagagtcctaaacgataacctagagccccaagtgaaaaactttaactctgcattatttgatgctcttattgttggctttatgacctcaagatttaatcaggacttagtaaatgaactcaatggaataaggcttaatgattttttaataaacttccagagaataacatctgaggaacgttttaatgagtcgattgcttctggcacatcagcgacgcaattagttcattatcgtattggcacaatgaaagcattcattgaacggtatttcaactga

SEQ ID NO: 182333 - DNA, 390 bp, Klebsiella oxytoca
atgatcaaacaaggttataaactacctcatgagtttccaaatgaatcttttattcaggaacagttagaagagtatttcatacggttaggatatttcgtaatcccggagaaaccgatagatttaaaatgcgttcatagagcgaataatgagacatggatcattgaagtgaaagggagaacaacgcaaattggtctcgatttcaaaacatgcttaggacagttgttaatgagaatggataatcccgaatacaaatatgctatcgcaatgcctgacattattggctatcaccagcaaattaataaggtacccaaagcagtcttgaaacaacttaatttacactggcttttaatttcccaagatgggatggtgactttaatatcgaacacctag

SEQ ID NO: 182334 - DNA, 408 bp, Klebsiella oxytoca
atgaacgcattatataggatctggcataaggctaagtggctaacaggagataaaggccacacatctattcaggttattttctccactggttcacgaaatgagatcttcgagttcataaggactcaggtgttgtctgaggtagccgatccaatctggcgtagcaaggggctatgtctgttgaatacagtcgtggcagttttggttcatctacgtgataaacaacatattaaaatagattacgaactgattgttcagacaatggaaatatcgaatcttaagaaattgacctatatggatataccgaggggattaagatacgatattgagtattatatcagtaggcttccattcgaaaataaagatgctattcatgattttatactcactcaattttcgaaaaataaataa

SEQ ID NO: 182335 - DNA, 1359 bp, Klebsiella oxytoca
atgttggtgactatgacagacaaagaactttaccggcttggcatcattcagcgagtatttgaccgggctttgcttcagcgcgacgcagcagacatacttaagctcagtgttcgtcaggtgcagcgtcttgtgcgtctgtaccggacagatggcgcaaccgcatttgcatcttcccgccgtggacgtcctgcaaacaaccggatcgatgaagaaacacgctgtaaagccctggatttgatccggtgccactattcagattttggcccaacgctcgcaaccgaaaaactggctgaacgccatcatatatatctctccgttgaaaccatccgtaactggatgacagccgacggtctctggcgtcctcattcccgccggcgaacccgggtttaccagccgcgctatcgtcgcgactgtttcggcgaactggttcagatcgatggctctcaccatgactggttcgaaggaatagccccaaaatgctgtcttctggtcttcatggatgacgccacaggtcgcctgatgcacctgcgattctgtgattcagaaaacgcgtttgactacatgatggctacccggcaatacattgataaacatggtaaacctgtcgcattttacagcgacaagcatgcggtgttcagggtcagcggacccgagagccgacgtaccggcacaacccagttcggacgggctctccgggaactggcgatcgaattgatttgtgccaacagcagccaggcaaaaggtcgcgtggaacgggtaaataaaacgctccaggatcgcctgattaaagagatgcgcctgcagaacatcagctcggttgctgaagccaatcagtggattgaacatttcatgtctgattttaaccgtcgtttctcccggccggcaaaataccctaaagatctgcaccgtgcggtcacacagagtccactggagctgaatgatatcttcgcctggcaggagctacggaccttatcgaaagcactgacttttcagtatgataaagtcatgtatatcattgaacccaccgaacaaaatacgcgcatggcaggtgaaaaaattaccgtttatgattaccctgacggaagcattactttccggcatcagcaccggccactgggttataagattttcgataaactgacctgcgttgatcagggggcggttgttgataacaaacgactgggtgccgttctgaggctggcacagcagaaacaggacgagctggaggctgaaggaaagcgaatgcgcagtacaaaaatgccccgcaggcgcgctcaggagcgtgcactggaagagctcagggcgatcaacccggtgctggccagtccgcaggattttatccccagcctgaagcgatga

SEQ ID NO: 182336 - DNA, 522 bp, Klebsiella oxytoca
atgcgtggccagcacctccacaacattcttatcctcatcaagctggataatcatgtcaatgacctgacccgccgtgcgagagccgtgagagccgaaatatgttaccgtatcacccggatcgactttcaggtataccgcgtgctgctcaccgctggcaggggttttggtaatgctcgtcccttcaatgacggtattatcaatccgctcatagtcagtggtctcacctgctgcgatattttcaatccagctctgctgctcttcccggtaaatggtaatatccgtcgagtacgccgtgcgggcgttaatccagataaagccatcctgttcagcagtgaagatgacgccatcccgccgggtgacttcgccggtgccaaacacaggatgaagtacgctggcaaagctacctgcactatcaagttgaatagccagtccgactatgaagcccacgacattacttccgtaagggccgtcatacatcaggctctgaccttttttcacaggtattttataggaccgccatga

SEQ ID NO: 182337 - DNA, 741 bp, Klebsiella oxytoca
atggaatctcaggaacagcgagctgctgaacaagctcaacgcgatcagcaaattaaagaggccaataagatctacaccacattcaatgagctaccactggaaatcgttgttgatgtcagaagctttacgatatctgttcttcctgaacctgaagagattgttctttcagacttcccggtaaaagaaaaacagcagcctactatggcgacaccatctataagcagaagacctgcagcaaagtcttaccgtgatcctaataaggtcagtaaagttggtgccacagggaagaaatcccctgttctggttgttcctgaaccaaatgcatccactaaattgaaaaccccatatcttcaaaacaccagagcgataaaccgtcttcccatgagcaatagaaagcaggttaagctgcgtcagaatggtatctttaagtgtttcaccttactggtggtgagtttcttcaaagagaggtttgtatgggccagaaggaaaccggacaccactaatgctgatcatgataggcgcatggctgaaaactatgtctttgatgaagtgctggatgtcaatgttccacgttcagagtttgataacgcgctaaatttaacagtgatgaaaagcaacaacgaacagagttctatgactacaagtcaacaccggatgagatcagacgttttccaagtcgtccgaaaggagaacaacacaaaacatataatgttctggactatacccaaacttcaccgctag

SEQ ID NO: 182338 - DNA, 675 bp, Klebsiella oxytoca
atgaataatatcaatttaattagaagtgaaacaaccaaaggtattcatgtaattaaaggtaaggcactcattgatgatattttgagttattctattttgcatttgtcgcgacacattcaactttgtcacgaattctttttgaagaaacatagccttgtcttcataaatacccctaacctctggactgaattgccatcgttagaagaaaagattaaaagaagagaatatgaagttgttattattttagtggatagtgattatattgatttttatcgctcattaataaatcacccatacgtcattgcaattccgatgagtgaatctctggaaaacataaagagtatgatttccagagaaataaataaatacaccccacaaagagcaaataaaaaagaaaagctaacaccaagggaaaaaaatattttgtatttaacctctcttggttggagcaacaaagaaatagctctcatcttagacgtttccaataaaacgatattctctcataagagaaaaataatggataaagttaatttaaaaagacccaatcaaatgaataaggtcttatcggaattaatgcctgctcagcatagaaaaaacataaccactaacatctgcgatattgagggagtggatgggggcaaactagctccccacccggctttgttgaataaataa

SEQ ID NO: 182339 - DNA, 267 bp, Klebsiella oxytoca; identical to SEQ ID NO: 180228

SEQ ID NO: 182340 - DNA, 621 bp, Klebsiella oxytoca
atgagaactttaattacagcgataactttatcgcttttgacggggtgtgctggacatacagaatacagtaaagaagcttttaaaagaacagatcttcattttataggtataccaacaatcttaggtcttggtatgaccggtagtagtgtccctattacacctgagtatagccttaccgctgcgcatgtcgctaaatttatggtgtatcgtgttaaagcgtatcatccaacttgcgatcttgcattgatatatcacaagaataatgaaataagctatccaacccttagaaatagtggcatgggtgaaaatatcactatgtatggacatagttttatttctgcactacctgttgaatcaaatggcaaggtactagctaattcgtctactattaataagtggaataaagaggaatgtccactttatgctacttctgctgggattgtagcaggtatgtcaggtggggctgtttataatacgcaagacaatacacttgcgggtattgttgaaggtcatgcgaaaagtataaataggaataataaagttgtatataaagatacatccctttatgtgccttacgaacaatttgataaatggttaattgctgaattacaagataaataa

SEQ ID NO: 182341 - DNA, 633 bp, Klebsiella oxytoca; identical to SEQ ID NO: 32308

SEQ ID NO: 182342 - DNA, 924 bp, Klebsiella oxytoca
gtggcaaagcaaaagttcagaatcaccaactggtccacctacaacaaagctctcatcaaccgtggctccctcactttctggctggatgatgaggcgattcaggcctggtatgagtcggcaacgccttcatcacgaggaaggccccagcgctattctgatctcgccatcaccaccgttctggtgattaaacgcgtattccggctgaccctgcgggctgcgcagggttttattgattccatttttgccctgatgaacgttccgttgcgctgcccggattacaccagtgtcagtaagcgggcaaagtcggttaatgtcagtttcaaaacgtccacccggggtgaaatcgcacacctggtgattgattccaccgggctgaaggtctttggtgaaggcgaatggaaagtcagaaagcacggcaaagagcgccgtcgtatctggcgaaagttgcatcttgctgttgacagcaacacacatgaagttgtctgtgcagacctgtcgctgaataacgtcacggactcagaagccttcccgggccttatccggcagactcacagaaaaatcagggcagccgcggcagacggggcttacgatacccggctctgtcacgatgaactgcgccgcaaaaaaatcagcgcgcttattcctccccgaaaaggagcaggttactggcccggtgagtacgcagaccgcaaccgtgccgttgctattcagcggctgagcggaagcaatgcacggtggaaatggacaacggaatataaccgtcgctcgatagcggaaacggcaatgtacagaatgaagcagttgttgggagattcactgacgctgcgtgactacgatggtcaggtagcggaagctatggccatggtgcgtacgttgaacaggatgacaaaggccgggatgccagaaagcgtgcgtattgcctga

SEQ ID NO: 182343 - DNA, 651 bp, Klebsiella oxytoca
atgaactctatctattgggtgcttatcatcagtctgctgatgaacataccatcattggtaccggtgctttttctcaaaaagacacaaaagagcgtgaaggtatcgatggcggtcaggctttacctgcttaacattttcttggtactgtcgctggtgacgttatcgcaaaatactacgcaaaaatacgggctgtttccaatatggctggtgttagctgctatcggactgtttgcggtcacgctagtgccaacggtaaaatttgtgcgtaagcatttaactgttgggaaaagtcgagcggttatcctgtcatcattcctaattgtttacgccatcagatttcatggcgtgttttcagatgttaatggaagtggatatacgattaacggctacaacactgtatggacattcttcttcctgttcgcctgcctgttggcttatatcggttgttccgggaacagaaaaagctatgagacatctattcctctagctaatgcgcagcctaatggtcataaagcctatgctccccaatcagagattgataccgatattgctgtgaaaggatcaagtgtgttattcgatccaaatctggatattgtggaacagcaacgctatcgggatgctattgaaaagcggaataatgatagctggtaa

SEQ ID NO: 182344 - DNA, 201 bp, Klebsiella oxytoca
atgaaccgtcttctgcaggacgtgaggcggtcccacttgctttcctcatcgcctggctgtattgccaggtggaaacagaaaaccaggaatcttcgggtgattcaacttctgttgggtcataagaaactggaaagcacagtccgttatctgggcattgaagtcgatgatgcgtcagggatttctgaatcgatagaggtctaa

SEQ ID NO: 182345 - DNA, 726 bp, Klebsiella oxytoca
atgaattcagaagagcagaagcaaatatgttcccggtttatcaaaccagaaaaattagccgatttacggacaaaacaggaaattgaggtgatgaacggcaggccgtggacgcgtgagcttcctcctccgccggtattgccgccttatggccctctggaaaaaatcagcgggcggctgcagtctttccgtagcgaatattttcgggaatattttgatgcagatgcctaccggaccagcacgttgccggagatatcagatggccagcgcggagctgccgctgctgccgcgatagtggcaggaagtcctggcgtcggggctgtaattatggctgagagcgaatcatcgaataattcggcggaatatgtgcagggagagattaatggcaggccatttcgcggctgggtgggtgtcacccggcttcaggctggtgataaggtggacatgattgttgagtggcaacacgatcattacgaggtctatgccattgcgttaccggaagagcggatagtgtctgtatgtccgaaatgtgatatggggcatatcgcgcatatgctgtggcggattaaaaatatggttattctcacggggatttttttcttctcggtgctttttgcgggagttctgagtgaagtgattgaaggcacctggaagagccttgagtcatttatcaccacatacttttggttgtatgttatagcattgttgggggggggctttcaggattaa

SEQ ID NO: 182346 - DNA, 141 bp, Klebsiella oxytoca; identical to SEQ ID NO: 36145

SEQ ID NO: 182347 - DNA, 1269 bp, Klebsiella oxytoca
atgagcagtgatgtcctttttaccccgatgaccgaaaccaccgactgccgggttaacggcgagcgtctgtgggagtcgctgatggcgctggcggaaatcggcgccacgccgaagggcggctgctgtcgtctgacgctcaccgatctcgatcgccaggggcgggatttggtgattagctgggcgcaggcggcggggatgcgcgtcaccgtcgataaaatcggcaacgtctttatgcgccgggaagggcgtaatccggcgctgccgccgattgtctccggcagccatattgatacccagcccaccggcggcaaatttgatggcaactacggcgtgctggcggcgctggaggtggtgcgcaccctgaacgatcggcatatcgaaaccgaagcgccaattgaagtggtgttctggaccaacgaagagggctcgcgctttgtgccggtgatgatgggctccggggtgtttgccggagtattcccgctggaaactgtctatgccgcgcaggatgcggacggtaaaaccgtgggcgaggagctggcgcgcatcggctatatcggcagccagacgccgggcgatcatccgattggcgcctactttgaagcgcatattgaacaggggccgattctggaagatgaagcgaaaattatcggtatcgtgcagggcgtgctggggatccgctggtatgactgcgtggtgactggccaggagtcccacgccggaccgacgccgatgcgcctgcgtcaggatgcgctgcaggtggcgacccgcattatgcaggaggtcgtggcgatcgccgggcgcagcgaggaagggcgcggtacggtagggtgggtgcaggtctatccgaacagccgcaacgtggtgccgggagaggtcactttttcgattgatatgcgtaatctcagcgatgcgctggtggatgagatggaccgccagctgcgggcgtttatcgccggggttgagcgggagagcggcctgaaggtggcgctgaaagaggtgagccactatccagcggcgccgttccacccggattgccaggcggcgatcgccgacgccgcgcagcggctgggctatccggcgcgggagattgtctccggcgccgggcacgacgcggtgtatatgagctacctggcgccaaccgggatgatttttatcccctgcagggacgggatcagccacaacgaaattgagtatgcgtcgccggagcacgttgaggccggcgcgaacgtgctgctgcaggtgatgctgcagtacgcgcgggtggtataa

SEQ ID NO: 182348 - DNA, 1011 bp, Klebsiella oxytoca
atgtcgcatgaagcctacgtccatatccgtgacctgcgggttgagtttcgccgcgacggtcagacggtcaacgcggtcaacggcgtctcctttgatgtgcaaaaaggcgaggtgatggcgctgatcggcgagtctggctccgggaaaagcgtcactctgcgcgccctgatgcggctgcacccgccgaaaagcagcgtgctttccggtaccctgagggtcggggaagaggatgtgttgaacatgagcgccgggcagctgcggcgctaccgcggcgcgcgctgcgcgatgattttccaggagccgctgctggccttcgacccggtctataccgtgggccagcagattgtcgaggggctgcgtcgccatgaaggcctgtcgcggcaggcggcgcgggaaagggcgctggaggcgctgcgtcaggtgcgcattccgagccccgagcggcggctggatgcttacccgcacgagatgtccggcgggatgcgccagcgggcgatgattgccctcgcgctctcctgcaacccgcaactgctgctggcggatgagccgaccaccgccctcgatgccacggtgcaaatccagatcttgattctgctgcgtgagcagcaaaagcagcgcgatctgtcgattatatttgtgacccacgatatcggcgcggcggtggagatcgccgaccgggtggcggtgatgtacgccgggcgcatcgtggaggaggcgtcgatcgaggagattctgtatcgtccgcgccatccctatacccaggtgctgctgggcagccggccgaaagaagggttgaaaaagggcgacgcgctgcactgtattcccggctcgccgccggatctctcgcgcctgccgccgggctgcgcgtttgccgaacgctgtccacacgcgcgccccgcctgcgcgcaaagccagccgacgaccgaaccggccgggctgcgtcacgtggtaagttgccatcgctggcgtgagctgagcccgtccgttgaaaaccaggcgctttacgcctga

SEQ ID NO: 182349 - DNA, 1029 bp, Klebsiella oxytoca
atgaaaaagattggctttttgtcatttggtcactggacgccgtcgccgcagtccgggacgcgttcggccgctgatgcgctgctgcaatccatcgatctcgctgttgccgccgaagagctgggcgcggatggcgcctatttcagggtgcatcatttcgcccgccagcttagctcgccgtttcccctgctggcagcggtcggggcgaaaaccaaacgtattgaaatcggcaccggcgttattgatatgcgctatgaaaacccgctgtatatggccgaggatgcgggcgcagcggatttaatctccggcggccgtttacagctgggtatcagccgcggctcgccggagcaggtgatcgatggctggcgctattttggttatgttcccggcgagggcgaaaacgagtccgacatggcgcgccgccacaccgaagtgctgctggacgcgctgcgcggagaggggtttgcgaaacctaacccgcagcccatgttccccaatccgccgggactgctgcggcttgagccatattctgaagggctgcgcgagcgaatctggtggggcgccggttcgaatgcgacggcaagatgggcggcaacgctggggatgaacctgcaaagttcgacgctgaaagacgatgaaaccggtgagccgttccatatccagcaggcgaagcagatccgcgcctatcgcgaggcatgggcagaagcgggccatacgcgcacgccgcgggtttcggtcagccgcagcattttcgctctgatgaacgatcgcgaccggatgtatttcggttcaggccgtgacgagagcgattcgataggttttctcgacgagaagacccgcgccatttttggccgcagctacgccgccgagccggataagctggtcgaacagctgaagcaggacgaggcgattgccgaagcggatacgctgttgctgacggtgccgaaccagctgggcgtggagtataacgcccacgtgattgagtccatactgaagcacgttgcgccggcaatgggctggcgcgacgcataa

SEQ ID NO: 182350 - DNA, 717 bp, Klebsiella oxytoca
atggcatacattaaaagcgcatctagaaaacaattcgagcacatttatttaagtttgctcgaacaggttcgctatgtatcaaagataaaagaactaagatcagatatcgtacatagcgtttataataatgcgatattcagagcctccgctgcattcgaagattatattaaggaggttttggaggattggattgatatgcttagcaacaataacggatgtctgtcacacctgcctgatgaaattatattattttctttattcaaaaaccaagagaaaaatttcataaattacgtctcacatggatcggagtcaacgatgatgaacgacttgaataaatgtaagaataaacttcaggcgttatcgtcacctcattctccggttaggcctgttattgtttcaaaacaattgataatggataagaaatatccatccaaaaaaaacattaaactcctctttaataggtttggtattaaggatatattcaaggtaatgactgctaaaggtaaaaaagattatgagtttatgcttcagtctttttctgatagccgcacagaattagcgcactcttattcttcgactaatcttacgaaagacacagttattgataacttaaattatgtaaaagagattattcaagttctagatagaattttatatacccatgtttgcgctagaagcggtagtgaatactggaaaacagagttgttaattatttag

SEQ ID NO: 182351 - DNA, 162 bp, Klebsiella oxytoca
atggacgccggagatcgcgttaatgtaatcgcgataatcggtggacgccatgacggaccagaaatggccatcggcggagagcgttctgaaggcctgaatatactcctgtttataaagaatattagctccggcagcaacgatgtcgaccagcttgttgcttaa

SEQ ID NO: 182352 - DNA, 702 bp, Klebsiella oxytoca
atgcgcgcgcttaccagcattaaactcgacggcgtttctttcgccttcggcgctcacaccgtgcttaatcagatcgatctgcatatcgatgcgggcagcattgttgcgctgctggggccttctggctgcggtaaaagcacgctgctgcgcctgctcgccggattaaccgtacccgccagcggcagcattcactttggcgatcgcctggtggcgaaaaccggctggggcttgccgccggagcagcgcgatctcggcatggtctttcaggattacgccctgtggccgcacatgacggcggcgcagaacgtggctttcccgctgcgtatgcgcggcgtcgggcgtcagcagcgacagcaacgggtcgaggaggcgctggcgatggtcggtctcagcgggttcgccgaccgcaaaccgtcgggtctttccggcggtcagcagcagcgcgttgcgctggcccgcgccatcgtcgcagaaccgcgcgtgctgctgttcgatgagccgctctccaatctcgacagcgagctgcgcgagtcgctgtgcctcgaaatgagccgcctgctgcgccagctgggcatcactgctgtctacgtcacccacgaccgtcgcgaagccgaactgctggccgacaaaattattcatttatctgcgggctgcattgccgccgtccgcgacgtgacttcaacctcaggggaatccgtatga

SEQ ID NO: 182353 - DNA, 396 bp, Klebsiella oxytoca
atgggcaaggatgcgaataccctcgacgatctgcgccgcgcaatcctgcatcagacggtcgtcggcggtaatatagggttcgcactcggcggcgttgataatgagtgtgtcgattttgtcgccgccgccgcgcagcttggcgccggtcgggaaacccgcgccgcccagtccggccacgccaaactggtgaatacgctcaatcagcgcttcgcgggatttattctggtaatcgttccagccatcgcgttcaatccagcggtcttcgccatcggcatcaataatcacgctcatttccgccagcgcggaagggtgggcggtagagtggggagcaatggccgccaccgtaccggacgtcggggcgtgcaccggcagcattctgccccagccgcgcgttaa

SEQ ID NO: 182354 - DNA, 552 bp, Klebsiella oxytoca
atggctggtggctttgtcgtgctgctggcctttgctgaaccaataaagctgctgcggcagaagatctgccgggcaggcgtccgcgcaggcgctgcagcggatgcagcctttttcctcttccggctcgcccatttcgctcgccgacggcgccagcaggcagttggtgattttcacgaccggcacgtcgagccacggcagggtgaagcccatcagcggcccgcccataattaccataggatcgccgctcggacagaaaccggcatcgttgagcagatggctgaccggagtgccgaggcgcgcccagacgttgcccggacgcgagatcgcttccccggtcagggtgacgacgcgctcggtcagcggctcgccgtcgattaccgcgcgtttcaccgcataggcggtgccgacgttctgcatcagcacgccgatgtcagaggagcgtccgccgtgaggcacctgcttgccggtgaggatctgcgtcagctgtttcgcgccgccggagggatatttcgtggggatcacgcgcagggaaataccgtgcgtgtcggctaa

SEQ ID NO: 182355 - DNA, 189 bp, Klebsiella oxytoca
ttgggctttacgcgctttggcccgggcgatggcggcctcgacggcggctttgcgcgggtcactggcggcgggctgctctgctggagcgtcttccgcaggaaccgcctgctgttcgactttgcgcgctttggctcgggcgatggcggcctctacggcggctttgcgcgggtcaacggcggcgtcagatga

SEQ ID NO: 182356 - DNA, 123 bp, Klebsiella oxytoca
atgattaattatcttttccaaagcgatgcgataagattcaatcttaatatgttaaatccatcaaaatcattacctttaaatattcagcagagtaaaaaattctctcaaataaaaaaatcataa

SEQ ID NO: 182357 - DNA, 363 bp, Klebsiella oxytoca
atgcagccggttattgctgcccatgaactcggcggcaaacagcgttctcgggctaccgtacatctcctgcggcgttccctgctgctcgatcaccccgttattgagcagcagaatgcgatcggaaatcgccatcgcctcgttctgatcgtgcgtgaccatcagcgccgacagccccagcttgacgatcagctcgcgcaaaaagacccgcgcctcttcccgcagcttggcgtcaagattcgacagcggctcatccagcagaatcaccggcgggttgtaaaccagcgcccggccgatggccacgcgctgctgctgccctccggagagctggtgcggatggcgattgccaagatgccccagacctag

SEQ ID NO: 182358 - DNA, 843 bp, Klebsiella oxytoca; identical to SEQ ID NO: 182146

SEQ ID NO: 182359 - DNA, 963 bp, Klebsiella oxytoca; identical to SEQ ID NO: 180336

SEQ ID NO: 182360 - DNA, 282 bp, Klebsiella oxytoca
atgacacatcatctctaccgccatgttaatggccatgatggcgtagtagatggcggcaacgctggtctcgcgatcgagctggctatcgcggatattttcaatcagcccggctttcagctggcgcgcaccgcgcagtaccgcctctgccgggataccgatgcgcgaatggatgctgccgatcaggtactgccgctccgccagcgcctgcagattttccttatcgcacatcaggatatctttcacccacccggccagcgagctgctgagccgttcctgaactaa

SEQ ID NO: 182361 - DNA, 447 bp, Klebsiella oxytoca
atgctatttgatagtcaagaactaacccctaacgctatagaggaacatgagaaaaataaatctgacattttctttatgcaaaatgcagaatatatttccaagaaagagtattatgatgagctaattattaaccccctaatgagtcttggatattcactaattattaacactgaagactatgggccttacaatgataaatccagcatatatatgtccatagacaacgacaaaccgctaacaacaggagagaatggagcgctatatttacaactaatattaaaaaccaatgaggatatattttttaatagcaaaaatatatcgtcagacagatgtttactatgcgtagatgacttcaacagcataaaaattgataataaaaagtatactaatgaaatcaaaaaaaccttgcattctcttatagaggaagtaaaaaaccaaaaatattaa

SEQ ID NO: 182362 - DNA, 801 bp, Klebsiella oxytoca
atgcattcatacgaggaccggattcgggccgtcgaactctattaccggtacggaaagaaagcctccgttgtcgtcatggagctgggatatccttccacaaaacagctgggccgttgggttcggatttatgaagagaagggcgatttacccagggaattaaagacaagagaacgctattcacgtacacagaaaattgctgctgttgagcattatcttactcacggtggttgcctgtcgtacactcgccgagccatcggctaccccagtaacgaaattataaagcgctggattgaagagttttacccaaatgcgcgtcccctggtcattcgctcaggcacaagcaaatgcttcagcccggaagagaggtctcaggccgtccgggagctctgtaaccgacgtggaaccgcgcgtaaagttgcacaaagcataggcgtcagcgtcccggtcctgtacaaatggaagaaagaccttatcagtgacgaggcttatcaatccatgcgcaaacgaaagtcagcccctcaggataaaaatcaggatgctttactcggtgaaatccagcgtctcaggaagcaggttcatcagctgcagctcgaacgtgacatactgacaaaggcgaatgaactgataaaaaaagatctgggcgtcagctttctgaaactgaaaaacagggagaaaaccctgatagttgatgcccttaagaaaaagtaccccgttgctgagttgctaagcgttctgcaacttgcccgcagctgttatttttaccaaaacgtctgtacgataagtatgcggaaatacgcgtga

SEQ ID NO: 182363 - DNA, 483 bp, Klebsiella oxytoca
gtgggatgtataactgcgcccgagccgttatccagcgcccatcaactggcagagttcgtcagtggggaaacggtactcgatgaatggttaaaacagagaggtttaaaaaatcaagctcttggcgctgcacgaactttcgttgtttgcaagacgggtacgaagcaagtagctggtttttactctttggccaccggtagcgttaaccatacggaagcgacaggcagtcttcgacgtaacatgccagatcctataccggtgattatactcgctcgcctggcggtagatgtttcattgcacggaaaaggggttggcgccgatttacttcacgatgcggttctacgctgttatcgcgtagctgagaatattggcgttcgtgcgataatggttcacgcgcttactgaagaagccaaaggtttctatgctcaccatggatttaaggcatcgcaaacttatgagcggactctgttccttaaacttccatga

SEQ ID NO: 182364 - DNA, 1359 bp, Klebsiella oxytoca; identical to SEQ ID NO: 182311

SEQ ID NO: 182365 - DNA, 1266 bp, Klebsiella oxytoca
ttgcattggatattgtcttttttctgtattggctggtattcaatgagattgcgacattatttttacagaaaaacattttggtttgagttaaaagaaattctacgtacattagtgattttcgcaactattgaaattgctgtattagcatttaccacttggtcttttcctcggatagcctggattctaacatgggtgttggtgttagttcttgttccaacgttgaggatggttgcaaaattaattttagataaattaaatttatggcaacgtgacacatgggttattggttgtggagcgaatgcacaagaagcatatttagcaataaacagtgaacggaatctcggtttaaatattgtgggattcgtagcaagtgatggattatcaacttcagggaaaaaaattaatgggctaccagttattgctgagtcccctaaatggctaaaaggtataaataaaaaaactcaatttattgttgctgtagaatcagatcagagcgatataagaaataattggctaagaaacttcatgattcaaggatatcgttatgtttcggtcattccaacgctacgaggcatgccattggatagtaccgatatgtcttttatttttagtcatgaagttatgatatttagggtacaacagaatttagcaaaatggtcatcccgctttcttaaacgttcatttgatgtaataggctcattggcaatcattacagtgctttctcccctgctaatttatattagtcaaaaagttaaaaaagatggtggtcccgcaatatatggacatgaaagaattggaaagggggggaagccatttaaatgccttaagtttagatcaatggtaattaattcaaaagaggtcctggatgacttacttgagaaagatatggatgcaaaacgagagtgggattcaacatttaaattaaaaaatgatccacgtgttactaagatcggtagtttcttgcgaagaacaagcttggatgagttacctcaactgtttaatgttcttaagggtgaaatgagcttggtaggtccaagaccaattataacagctgagcttgcgagatataatgaagaggtagattattaccttctcagtaaacccggcatgacaggtttatggcaagtgagcgggcgtagtgatgtcgattatgaaactcgtgtctatttagatgcttggtacgtaaaaaactggtcaatgtggaatgatattgctattttgtttaaaactgttggtgtcgttttgaaaaaagatggggcttattag

SEQ ID NO: 182366 - DNA, 717 bp, Klebsiella oxytoca
atgaatatcgtcaccgtcgcccgggttgaacgcaatccgacggtgaaaaatgaaatcgcccagaagggattttcccgctcgctgccggtgggatttttagcctatcccataagccaggccgccgatattaccgcctttaaggccgaactggtgccggtcggcgacgatcagctaccgatgattgaacagaccaatgagatcgtgcacaaaatgaatagcctgacgacgacgccgatcttacggcactgcaaagcgctgctcagcgacgtcagccgcctgccgggcatcgatggcaacgccaaaatgtcgaaatcgctgggaaacacgctcaccctttcggccagcgaagaggagatccaccgcgcggtcagcgccatgtataccgacccgaatcacctgcgggtcgccgacccgggtcaggtagaaggcaacgtggtcttcacttatctcgacgcctttcatgctgataaggctttcgttgccgagatgaaagcccactatcggcgcggagggctgggagacaggcagtgcaaaaacgcgctggagacctgcttacaggagctgctggcgccgatacgcgaacgccgggcgacctatattcaggataaaggcatgctgctgacgctgctgcgccggggaagcgagcgagcgcacgaactgacacaacggacgctgcatgaagtgaagcgtggcctggggctgccggtgctgttttga

SEQ ID NO: 182367 - DNA, 966 bp, Klebsiella oxytoca
gtggctgaacggaatattgacgttgactgccagcatctggtcgcgcccctgctgccaggcgtttttggtcaggctgtagctgagcgtccagttgatatcattgacggcggtgttcagccccgcctggagctgctgatcggccttgccggtgccccagtaggtctgatgactgccgttcaggtaaagagtcgcagtacgccccagctgctgggtgatgctggcctgtattttgccgcgcttgttgtaagcgaggttgtagtagtcggtgaatttaggcttcacttcaatcaccccgtcctgggtctcgacgttgtagccgctcatccggctgtaggtggtatcggcgaagctgaagtagccgtgcgtggagtagcggtaacccaccagctgaatattggtgccggtatccgtcagcgacttgttatagaggaaacgcaccgactgcccctgatgctcgctgtcatcgggcagggtggcgttggcctgggtgatatccagcgacagcgcgcccaggtcacccatgtttttccccacgccgaggttaaaggcgcggtagcggtccgccagctgggtgccgccgtacagcgtccagcccgccggaaggccgtgcagcagggtgccctggaagaacttcggtttctcctgctgattgctgccgctgcggtactcaccggcggtaacggcatagcgggtatggccctcgcgctggagcaccggaacggacgagtaggggacggtgaacacctggctgctgccgtcggcctctttgatggtcacctgcaggtcgccgccgttgcctgcggcgtagagatcgttgatggtaaacgggccgggcggcaccgtgctctggtagatctcatagccgttctgtttgaccgatacctgagccgtgccccgggcaatcccgtgaatgaccggggcgaaccccttctggctgtccggcagcatattgtcgtcggaagctag

SEQ ID NO: 182368 - DNA, 924 bp, Klebsiella oxytoca; identical to SEQ ID NO: 99214

SEQ ID NO: 182369 - DNA, 924 bp, Klebsiella oxytoca
gtggcaaagcaaaagttcagaatcaccaactggtccacctacaacaaagctctcatcaaccgtggctccctcactttctggctggatgatgaggcgattcaggcctggtatgagtcggcaacgccttcatcacgaggaaggccccagcgctattctgatctcgccatcaccaccgttctggtgattaaacgcgtattccggctgaccctgcgggctgcgcagggttttattgattccatttttgccctgatgaacgttccgttgcgctgcccggattacaccagtgtcagtaagcgggcaaagtcggttaatgtcagtttcaaaacgtccacccggggtgaaatcgcacacctggtgattgattccaccgggctgaaggtctttggtgaaggcgaatggaaagtcagaaagcatggccaggaacgccgtcgtatctggcgaaagttgcatcttgctgttgacagcaacacacatgaagttgtctgtgcagacctgtcgctgaataacgtcacggactcagaagccttcccgggccttatccggcagactcacagaaaaatcagggcagccgcggcagacggggcttacgatacccggctctgtcacgatgaactgcgccgcaaaaaaatcagcgcgcttattcctccccgaaaaggagcaggttactggcccggtgagtacgcagaccgcaaccgtgccgttgctaatcagcggctgagcggaagcaatgcacggtggaaatggacaacggaatataaccgtcgctcgatagcggaaacggcaatgtacagaatgaagcagttgttgggagattcactgacgctgcgtgactacgatggtcaggtagcggaagctatggccatggtgcgtgcgttgaacaggatgacaaaggccgggatgccagaaagcgtgcgtattgcctga

SEQ ID NO: 182370 - DNA, 219 bp, Klebsiella oxytoca
atgaataaaaggttattaatgttgtctgttgtgttgggtttttcagctatgtctcatgctagtgaaccaaaatatgctttcccacaatcggataaacctgttgtatcaaaaatgaaaatccagaatgctccatctggttatgataaatatggcaatggacaagtgcttgccaatggtgtgtgggttaaaggaaattctggcagtcaaaataaaaattga

SEQ ID NO: 182371 - DNA, 279 bp, Klebsiella oxytoca
atgacggaagcagaattatctaacatacaagctcagtattgccgcagtgatattggaatagctaggaggattgaagatattgttgagggattgattaatggtgttcaacataaaatccggatcacatcatatactactgaaataacgtttgatcttatgaaagagaatgtatatggccaatcatactttagcacaaaattttatgaaatgatctgggatgaaaagcacaacaaactgacaataagagactcccatatatcatttgatatttatttctaa

SEQ ID NO: 182372 - DNA, 225 bp, Klebsiella oxytoca
atggattttaaaacaaaaattagttcaagttgtgattatctatttagtatttccaccaaagctaaatactttgctgagaaacctgaactatttgaaaagtatcgtgatgcgagattaatccgcctttcaattaaaagaccagatggaaaagttggtaaagttgaaatctatactgaagacggtgaacttatattcgaacagtataaaacccttagattagtttaa

SEQ ID NO: 182373 - DNA, 192 bp, Klebsiella oxytoca
atggcggtctctccccggctcgcgctgcgcttagccgggctacaggtatacagccgtctgctggcccttagcccgggcaaggcggtttgcgccaccccggggctcatcagaggccacattagatatggtttcccggaggcgatgcggcacatctgtccgggctaccgcttgcagacggcgatgggcccgtag

SEQ ID NO: 182374 - DNA, 138 bp, Klebsiella oxytoca
atgcacatcttaactaaggcggcctgcgggctgccgctcttgctgtcgctgacgtccaccagcggctgggcgacgacgctctcagaggccctgtcggcggcggaaagctactctgccgagctacgatcatcaggttaa

SEQ ID NO: 182375 - DNA, 525 bp, Klebsiella oxytoca
atgcagccgggcagcgtcgcccgggcctgcaatggcctgacggtagagatcaataataccgatgccgagggccgtctggtgctttccgacgccattgcctgggccagccagcggtatccgcaggcgcgctatattattgatattgcgaccctcaccggcgcggtggttaaggcgctgggctatgatttgagcggtttgatgacccaaagcgacacgctacgagcggcgttgaccgaggcggggttaaagagcggagatgaggtctggtcactgccgctggatagcaggctgaagaaacagaccgcaagcgcaatcgccgacctgtgcaacacgccgggcaataacgcagcgatcagcgcttcggctgcctggcttttgcagcatttctgtccgccggagatcccgtgggcccatctggacgtcagcggtacagcgctgtggcgagaaggtggtaaaagcgtcgcttccggtcggcctgttccgctgctggtgcagcatctgctcgacgatatcggagagagttaa

SEQ ID NO: 182376 - DNA, 666 bp, Klebsiella oxytoca
atggagaggcgtttgacaaacgggagtagggccagtgaagcggtgcttagcgtcaatattgcatcgctaccgcgtcctggcggcggcgcgcttcttacggatattcatttccacgccagaaaaggagagtgcctggcggtgattgggcctaacggcagcggcaaaacctccttattacgggcgatagatcagcagctgacgacgcgggagggcgagattcgcttgaatggccgctcggtttcagcgttaacccgccagcagcgtgcccggcagatcgcggtccttgcgcagaatgatgccccggatatgcggctggcgcttgaggattatgtcgccctcgggcggatcccccacgccagggagatgtcgcgtcgtgaccatgacatcatcgtgacccgggcgattaatgatacgggactgcagaggctgcgaacgcgctcgctatcggcattatccggcggtgagaggcagcgcgccgcgctggtggagtcctttgccgaccgggttttgcttttatcgcaggggcgcgccgcagcctgggatgtgcccgagcgcgtccttatttcggaacagctctatcccgtcttcggcttaaccagctttaccgtgccgcatcccgagaccgggaaggcgctgcggatttttgaagttccaggctatgcgtaa

SEQ ID NO: 182377 - DNA, 801 bp, Klebsiella oxytoca
atgctaagtacgttacccgatttacacagaagttttgcagagcaactcaagcttaagtttcagtctgactcgcggattcactcccttctcgctggcggctcgattattcatggcggatttgatcaatactccgatctcgattttatcgttgtcgtagaccctggctattatgacgaagtcatggcgcagcgtagggagctcgccggaacattaggccatctgttacatgctttcaccggggaacatgtcggagaaccccgcctgctaatatgcctgtacgggcctgaactcctccatgtcgatctaaaatttgtcactctggaaatgctcactcaacgcgttgaggagccagcagtattatttactcgtgataacaccgctctggagcgacaacgggtaaaatccagcgctcgctggcccaacatgacgccggagtggtttgagtcgcgagcctggatctggcttcactatgcagtggttaagctgggaagaggcgaactgttcgaagcgataggtatgctggcattctttcgagagcaggttctgggacctatgctgtatcgtcgggcaaatctaccgcaacgtggggttcgccgcattgaattccacagcattgattctgacggcctgctgacctccacgctggcaacgcacgatcgtgactccgtcagcgttgccatcagaatggctgctgatgcttatatcaatctgcgagctgatgctctgcctgaaaatatcgctgacgacgcgacacgttgggcggtccttgccatgctgagaaaggtttctgaccgaggttaa

SEQ ID NO: 182378 - DNA, 705 bp, Klebsiella oxytoca; identical to SEQ ID NO: 101494

SEQ ID NO: 182379 - DNA, 1359 bp, Klebsiella oxytoca; identical to SEQ ID NO: 101495

SEQ ID NO: 182380 - DNA, 165 bp, Klebsiella oxytoca
atgccagaaaaagtgacatcactaaatgggttaaaagtgacattagaatatgggagctacatcattggtgcgcataatgtatattatgttaaattgcagaccaaaacgagtaaaccgcttgttatgcgcgttaatctcagaaaacccttgttctccgtgccttaa

SEQ ID NO: 182381 - DNA, 501 bp, Klebsiella oxytoca
atgctgggtttaattgctgccggggcaagcgctccggtattgatggcgcagtttcagcacgaaaaagaaggaaccagcctgacagcttaccaggacaaaagccgggacatatggactatttgcggcggtgtgacttacgttgatggtaagccggtaatcaagggcatgaaattgacgcgagcacagtgcgataaaattgataaagccgaacaagctaaggcgctggcatgggtggatagaaatgtccacgtgcaattaacggagccgcaaaaagttggaattgcttcattttgtccgtggaatattggccccggtaaatgttttccatctggtttttatcgtgacctgaattcgggaaactttaaaggagcttgtgcgcaaattaagcgttgggtctgggatgccgggcgtgattgtcgcatccgggagaataattgctatggtcaggttatccgcagagaccaggaatcagagctaacttgctggggcatggacaaatga

SEQ ID NO: 182382 - DNA, 267 bp, Klebsiella oxytoca
atgccaaagaatgagtttaaggattttgcaaccttcgaaactctcataacaccaaaaataatcactgttgtttactggttagttacagtgcttctcatcctcggcagcattttaagctggttacgtcaaagcgaaggtatgagtatcagttttgctgtatctctagtggctacgagggtgatttttgaattaatcatggtttcattcaaaaacaacgagtatctacgccgaatttgtgaagcggaagaggcaaaaaagagcgattaa

SEQ ID NO: 182383 - DNA, 1887 bp, Klebsiella oxytoca
atgacagaccagtcagccgatctcgtaacgaaaattgacgttattccagaccttgacgggctcaacagctttgatgctgcgattgataaggctatagcaaaggttaatcagcttgacgccgctatcaagcgcgtcaacaacctgaagcctgcaagcccatacgcgcccagcagtgcatcaacagcgccgacagccgccgctacagcagcaatagccacagtagccgctacaggctcgaatttgattgctcgtacacctctggcggagactgtgcgccgagagtctcagaaggtcgcacgtgcagccgttcagggcatgggtaacggtattggccttcctcttctgggcggaggcggttctggaggcggaggtctgctattgccgccgccccgtgctggtggttttaacccgttcgacgcgtccaatttttccggcgagccgctaaataccaggaagaaacctgttgctgatgccgtacagagcgggatacgtaacccgtttggtgttgatacaatgctggcaggtgccgggcttactgttggcattatggcagcgggtaatgcactggctgacagccttgattcaatccagcggcagcaggcgcagattgcgaggttgacgcagacaaccggcgacgcaagagaggcgttctttgcacttaatcaggccgcgagtgatgttcgaagcgacagtggggcgtttatctcaacctataccaatatggcaaccgccacgcagaagcttggaaagtctcaggaggaaacaatccgggcaacgcaggggctggtaggcgcattgcagctaggtggaggcagtgctgaagcggtaaatgcagcgctttaccagatgggccaggcattttcttctgaccggttcggcggggatgagtttagatccttcatggaggccatcggtacaatggccccggaagtggcaaaggctttcggcacggatgtaaaagggctacgggcaatgtcagaggccgggaagctgacggcggaaaccatgattaaagcttttgagaaaatggcggcgagtaatgccgacctgcttaaaaaacagggctggacgtggggccagacaatgaccgtcatgaaaaatgactggcaggcatttttagcgcaggcaaccatcggcggagaatggcgaaaattcactgattgggccgcaaatacacttattcctttagccagaagcgcagaaaaagaggttgccgcgttctggtcaacgctggcagatgaaagcaagtcagcgattctgataggtattctgggtgctgttggggcggcttttaccgcgttagctattccggtcatggctgctatatggccttttctggcaattggcgctgctgtatgggttgtttatgaagcgtttgtagaatggaaagcatggttagatggcaagggaggcaccatttttgatagtgtttttggcagttttgacgaatttgagcggcgttacccaaatcttatagcagccctcagaacgattattgatttggctggaaaagctgcttcgggtatagacaacgcaactaagcaaaatggcagcaacgggattatatccgatgctattgaaaatccgtggatgacggcttttaaggggctttataaccttacgccgctgccgaatacattcaggtcattgggtgggttaagtgatatgtttgacctcaatcccttaccgggcatagaaagcgctcttggtatccttccgtcaacggctacaggtacaccaaacattagcaatagtggaaataaaacaactaccattattgttaatagtccaaaagaggctgctgatacggtaaataatattgatgagccgggtactctatctggtgatattggtggtaatatcgctgagtcaacaggggcaagataa

SEQ ID NO: 182384 - DNA, 246 bp, Klebsiella oxytoca
atggttttttacctggaggattcaaaagatgatgcgagaggtaacgccaaagaaaagccgcccccgaaggagcggcgtttaaaggtgctcaggccatgccagacaaccagaaaggcggggacggatccccgccctgatttagcgactctccttagcttcgtaggcaaactttgccgctacctgcacacctccctgacctatggacgcttcgcaaagcgtccggttaagggcggtatacgccagtaa

SEQ ID NO: 182385 - DNA, 1833 bp, Klebsiella oxytoca
atgtccgaaaataattatggtgcgctgatgatgaaatcgtcactaagcgcagctattgacatcgatactattgttttacccggcatataccccattccgtctaacaacaattcatcaccagacccaaacggtggtgtgctaattgttcactccggcacagtgaagcaacgtacttttacatcaggttcgataatatctgcatgttcttattatgacgataccacgtccaaatggagtgaatggttgatatctgtggttcaatctgagcttgcagcctctgatggcttaaaactggttggcggctttggattcgtcaatccacaaatgtttgggggtcttagcagtagtcctgatgcagacaataccgcacctgtaatgatagctatttccgaagcgatatcaaaaggtcttggtcttgatctaaggggtggcccttggcgtgtgactcgaacgcttgatttgacttatgttaagcacgttattactgattactcagggcgcattcttgttgacccggagaattttattgcggcgcataataataattacgcagtcacattcgggaatcctgatacgatttttagggatgacagatgtaatcatacctgtgttgcagggacgctttttgttctaagcgataaccgtaatgcgccgcttaatggcgttttcataaaaggcgccctacttaattttggctctatcagagcaactaactttaatggttacggtatccgtttaggtgctgtttgggatactacagtaagcagcctttcatctgaactttgtggaaatataacaactcatgcccttgccattgacccattcaatgacacatcaaactgcctgaatatcggtagaattcaatgcgagcgggcttaccacaaagggctgagaattaatgttattcgctcagaaatccataatatccatgctgaacgcttgtacattttgactacaaacgatggggctacggatttaccatcaggactcaattatgaaaatagttacttcctgttaagtaactcagaaatatcacacatgatacttgatgcgatggattcctcgtcagaaggaacagttacgacaactccgtccgttcggttgagtttgtatgcctctcatgcggcaacactcgctatggggacttgtattgtaacttcaacttatgggctggcttcaacaattgacaactcaaacttttataaatattacaataacctctaccctgtaacgttaacgtcatgtcaatttacatcacaaaatagcgatggattactacagcttggcggttctggttctgtagcaataaattgtgttgcagataccattcaacctgattataacacgacaaaattactcttatcttcctgcacaataaataatgcgtactcaaataccaggacaaatgtttcaggtgttttatttgatgcctgtacctttaataacgacataaaagagactggcccaacagaagtgaaggaacctactgaattccgaaattgcacagtcaaaggaagtatcaaaggctactttcagcagagattcatcatgaacggtggatatgctgaatcaatcgacctggtaagccgtgcttatgctgacttgagaaatgttagcggtaatgttttcaaccctgccgaaaatggcgacagagcatacatcacaaaacactgtaaattcaacactgtaacaaggtgggggcctcctgcctttggagtttataagataggtgagcgcactcagcgaattggtgcgttaggtagtgggtctgttatcgaatatgttaacacctcagaccaaggggcggaattcaaagcagcaatcacaatttaa

SEQ ID NO: 182386 - DNA, 276 bp, Klebsiella oxytoca
atgaatacagataatatcgagtatatcaaatccggctcaatgtggtttatcaaatgtaatcatgaattcattggtggacgttatgactctcagcagacagcaacttatgcggcagaaaaccttgacttacctgacatggacgaagtctggatgattaaatgctcattaaaccccgatttaagcggtgatgatttacttcttcatcaatcagacatttcagagttcattttgcagaaaaatagccacaaaaacattcagggaaacacacaaaactag

SEQ ID NO: 182387 - DNA, 756 bp, Klebsiella oxytoca
atggagccatcaatcaaaaaaccgggtcaactggcaactgaacgatttacctcaaaggtcaggttacagagaaatatcgacctcgtttccggcatcaaggccaaccagcaaggtatggttgatgcactggactatctgaaaaagggtttctcaattacagattcttcgggccttttgcttgacgcatggggggaaagattcgccataccccgagaaggccgcgacgatgatagctacagaatagccctgttgcagggggccgggacgcaatctgtttcgcttcagtcgcgccgtgctgtcggtggattcatccagttagcctatagccttacatggttgcgcctgaaccgtgtaggactatctacaggtgctgtaggtgcggcttttaaccgcgtgccacttcgcgctgtttttgtccagtgtggcgcgatggctccagatatcgaactaccggaaacactggttgcggcaacctttgccggggatatatacagcgctgcaacacctcctaacgtcaagctaactcaccacgcaccaatgtttcccggcaatgcgtttccggctgtgtggggcggtatcaagtacgagaaaacgcaaaaaacagtgatggctacagcaactaaagggatccgcgtaaccgcgaaaaagtcccttttgacgcggatagaaggtacgaaaacggttaacgggaatgagcttctggagccattcaacacgcttgtaacagtcaaaaagatgaaggtgacaaatggatag

SEQ ID NO: 182388 - DNA, 219 bp, Klebsiella oxytoca
atgaacatcacaacaactcagtatcgacagggtttaaagggctgttttatttcggctgagaggccgcaggctggcgactctctgacgctggtaatgccaacatgcagagggcggcgcattatccctgttggcgaggttcagcgagtcgaggctgtaggcactagccgttgcctcgtatgggtttcaaagctggcatttgttgaggggatgaattactga

SEQ ID NO: 182389 - DNA, 345 bp, Klebsiella oxytoca
gtgggcctgtttattctgtgtaatatttttctggttgcccgctatttcagtaaccatttattacttttcctcggggaattaatgcgccgttacatcattaccgataaagacattatcgaggctttccagagatggtctagccctgaattaaaaaaccagaaaatgcataccagcttcatacgtgaggctgtatgccgcgcacatcctgacaaggtaattcttcagtatgacgttcgccaaaagctaaaaaatatggcctcacgtggtttagttactgaggtgcgtttaagtcctaacgcaacagcctggatgataataaaaggtgattcaaatggacaaaattaa

SEQ ID NO: 182390 - DNA, 723 bp, Klebsiella oxytoca
atgaaaaaaaaccagaaagtcattcagtttcgtggtgacgaagatatgtatcatcgggcacaggaaagaatcaccagtcaggagattcttttccctgatgttatgagagccgcgcttagagccattgctgagggtgatgttgcgccgtttgccgatatcatcaatgaggccggtcatactggcgatgaaacaaatcaggcatggctttatcacaaatgtcatgagcttttcgaataccgtgatggtcagttattacgcaaatcacgtaaaggaatgggtgagaagggaaccccagcatatatccgtatccgggaaggtgaagaacatgtattaattcaggggaatcattatctgctaaaagatatcgtctggttaatggctaacggaagcattgccggagaggttatctataaaaaccctcatcgtggaaccaataaacacgcaattgaaaacctcattttaaaccctgtcgaaattaggcaggtgacgataactaaatatttaagtggatctgaaaagatcgacatttgtagaggtaagcagcgagctatagctattaataccgaaagcgatataagcgcagccagagcaattgagagactcattaacagagggcaaacaatcccgttacttttgcgcggtgatgatggttgggttgcatcacgaaccgccattcacgctttcaaattgggtgataaccagtacgtagtaagcattacataa

SEQ ID NO: 182391 - DNA, 435 bp, Klebsiella oxytoca
atgttcgatcccgtaaacctgcaattgtttgagttaatttgccacctggaagttagcctgcatcaggcatcaacacgccgcagcgcgcagcttttgcagcagttgttgcatgacgaatttctggagataggccgtagcggagaacgttacgataaaacgcagaccgtagcagcattaattaacgaggacgtggaggccatcactgcttacagctttcagttggctttactaaccaaagattgcgcgttgcttacgtaccgcagcgaggttatcgattcagacggacgcgctgctaaaaaaacgcttcgttcgtcaatctggcagaggagccatatttgtgcaaatcatcaggaatgctggcagctcagatttcaccaggggacgccagtgaaagaagttcaggaagaagagcaggcgagcaagacggcgaattaa

SEQ ID NO: 182392 - DNA, 714 bp, Klebsiella oxytoca
atgaataacgtattaccgtcaatcagcccacaggtgtcggggctggctcccggctttcgcgccctgagcattgatgttatctctgctcccgtacgcgcgccgcaggttggtgcagaagcgctccattccgcctgccgtgcggttatcgccggtgagccgcagtgggcggaagcacatttgcaggcctggaacgaggtattccgcgcctttggcgcaaagcctaagcgcacgccctgctcggcggaagccttgcgcaggcgggtgctgcgcgatggcgaaatggcatcgctcgatccgatcgtcgatctctataatgcggtgagcctgcgctacgccgtgccggtcggtggggaaaacctggcggcttacgttggcgtcccgcaactgaagatcgccgacggcagcgagccgttcgataccgtcaaagagggaaagatcgtcttcgaaaaccccgacgcgggtgaagtggtctggtgcgatgacgcaggggtgacctgccgacgctggaactggcgacagggggtacgcactcgcctgagcgtggagagtccgcggatgtggtttattcttgaaagtctgccggaaatgccgcttagcgcgcttcatgaggcgggagaaatgctgatggccggtctactgtcgatgatgcccgaagcgaaaatgcattcgcagttgataacggccgacgtctggctgacagggggcgcccggtag

SEQ ID NO: 182393 - DNA, 627 bp, Klebsiella oxytoca
atgtctaaagattcagaaacgtaccataaactgatcgtcgcggctgcggcctgtttctctgaaaagggctttaacggcaccagcgtgcgggagattgctcagcgggctgggatcagccagggggcgatgtacacttatttcaaaggtaaagatgagctgattgaagccatcattctggaggagcagaaatccgcgctggcaaagcagcaagaatcgcagaagggaacctgctttgaactgatttgtcgtcttgccatttcctgtatccaggatgtcggctatccctcatcccattcgctgtgggtggagattattgcggagtcagccagaaaagagaacctgcgcgcgacgtttgtcgccagcgatatcgtgatgcgtgagggcattgggcagattattcgccagggcatcgctgccggggagttcagcaagcaggtcgatcctgaagaagccacgatgaccctttttgcgctaattgatggttttatcggacgtaaggctatgacgccttcattcaacgttgaaacggagattccccgctttagcgaagtaatggcggcgattttacagaaaactcccggaaccagcgacgagagatatgggggattaaagccccagcgggcgtga

SEQ ID NO: 182394 - DNA, 702 bp, Klebsiella oxytoca
atgcgtggcattgtggggcgcagtcaggttgtcgaacaattgcgccacgcacgcgaggaaatcgccgaatatcgtccggacactatcgtcacgctcggcggtgactgtctggtatcattggcccctttcacctggttgctggaaaaatatggcgataaactcggcgttctgtggatagactcccaccctgatgtgatgaccccggctcaatatccccattcccacgcgcacgttcttggcgctctgatgggggtcggtgatagcgaactgacctgcagcgttaaaactccgttgtcgccagacaaagttatgattgcggggattcatcgtcctctggaatacgaagctcagtttattgccgaccacgcaattgcctattgcgagccgcaagcagtgagagaaggcgctcagacggtggatgaatggataaggcgcgaagatattcaatatctggcaatccatcttgatctcgatgtgctgaatcccgagctattccgctcggtgctctttgccaaacctggacgcggtgaacatgatttcggcgatgtagcggaaggaaaactgacaatggcggaggtggtcaggttggttaatcaggctatcgcgctggcggcgcccgtcggcgttaccgtggctgaacatttgccctgggacgccattaaccttaagcagatgcttgccgaattacctttgatgaaatag

SEQ ID NO: 182395 - DNA, 1164 bp, Klebsiella oxytoca
atgcccggatatctggtacgaataacgttgatcatggcttttgttcaattcatcaacgcgctcgaatatatgatttttaatcccttatttgcctggatggcggcgacgtttcaggtgccggtaagccaggcgggttacgtcaccggcatttatacgctggcttccgtcattgcgggggtcagcgtctggcgatgggtcggtaacgttaaaccgcggcgctttttgctctgcaacatggccctgctgggagggttaacgataatgacgctgaccaccaccagttttagcggattgttgttttggcgttttctcgccggtctggtcggcggaacaacgatgggggtgggcagcagtttgctggtcaacattatgccagcacacctgcgtcctcgggcgttggcctcaacgattgccgcattctcgctggtcagcatcgtcggcatgccgacgatgttatttctcagtgaaaaaatcggctggcagatagcccccgcgacgatcggcggactctgcctgattgcgttgccactgataaaactcgcgctgccggaacagcccgttgcggcgaaccgtcaggcagatttgcgctggtcttcatcggtgctgttttacgcctccggcaacgccctcgcgcagttcagtgcgatgttaatcattccgctgctggttccgttactgacggcgaaaatgggggccagcggcgatcaattaccgtggttctttttcgctggcggactggcggggctgtgcgccactaaactcaccggcaagctatgccagcattacagcggctaccgcatcagcctgctggccagcctgctgtttatactgagcctgagcatcgcttttaccttcaaccacggcggcgggctgtttatggtgttgtttctggcggccgcctactgtcgcctggtggcctcatcggcagtggcgatgcgttttccagaggatggcgccagggcggggtttacccttttacaaaataccctgatgtcattaagtacggcggcggcttttctgctttcatcatggttgttatcggttgccgggaatggcgagcgggcgatgaatgggatattgctgttctgcgccctgagcgcattgccgctgccgtggctactacgggttcaggagaaaaaattagccgcgcgcgccgccggttaa

SEQ ID NO: 182396 - DNA, 969 bp, Klebsiella oxytoca
atgaaaaccgttattaccgttaccaaaggagctgcgctcgcgatgatgctgtccgccaccacgatctcctgcgcccacgcgctcaccgtctacaccgccgggccgggctcgctggcgaaaagcctcgccagcggttatgagaagaaaaccggggtgaaggtaaatattttccaggctactaccggtaaggtgatggcgcgtcttgaggccgagcaggccaacccgcaggcggatgtgctgatttccgcttcgtgggatacggcggaggatttgcatcaccgcggctggctgctgccatatcagagcagcaacgccgataaggtgccggcgaacctgaaatccgccgattacgttgcccaggggatttcggcgctggggatcgtctggaataccaatagcggcaccccggagccgaaagagtggcgcgacctgaccgaagcggcgttcaaagacaaagtgacgacgccggacccggcgctttccggcgcatcgctggatttgctgatcgggttacagaatggcatgggcgaccagccctgggcgctgtttaaagacttgaagaagaatggcatggtggtcagcgggccgaatgcccaggcggtgacgccggtgatgcagggcgcgaaagcggcggtattcggcgcggttgattatgtctcttacggcaatatccatcagggcgaatcgctaaaggtgatttttccggccagcggcacggtgattgcgccgcggccgatgatgatcctcaaaaccagcccgcatgctgacgatgcaaaggcctttattgattatgtgctgtcaccggaaggccaggcgctggtcgccgacgcctggcttatgcccgcccgcagcgatattccggcgaagcgcccgctgctcaacgagctgaaaattctgccgaccgccggcgaaggcactagcgaacgtagtgcggtgctttcccgctttaatacgcttttcgcccagtaa

SEQ ID NO: 182397 - DNA, 222 bp, Klebsiella oxytoca
atgcagtcattatatctttggctgcaacttctcaaaagagtgggtgatgtgtatgatcgtggattctcaaaatatccaaaatataaattattatattgtatgcccttcaccgaaagggtgttgtttttaaattttgtacttaagttgatagtagtgaatataataataaaaattgtcaggtgtggttcgatgttatttaatcaatctcttcgtttattttga

SEQ ID NO: 182398 - DNA, 1347 bp, Klebsiella oxytoca
atgttcccttgcattgtaacatcaaattctcagttgaagtttacagtttgtaagtgtactatacattcacccttctatctaagtacacgtttacttccagggaagataatcatgaagaataacctcccttcacttttacaccatgcctgttttgtatcaagcttatgttctttgccggtagaactctcattaatagatcttaaccagttctggtgtgatattaaatctgtccataccccctttatttcagaaggtaataatgatagtgacaaacgcaatgttacttttttttggcgctcagaagaaattctacaaggggtatatgttcgtctgaatcgggttactgacaaaaaagatgtcaaaaaaggattaatgactcgcgtcccttcaacggatatctggacactgactctggagttaccagcgacatatcgcggttcatactcgttcatagaaattccgccaggaatgacccccgatgaaatttctcagcttggaggacgattctcaccgctccccggtcaacccgatctatttaataaagcatccgaaataaacgtacgggggttcggcgaatcaatactgtctcttgaccaggctcctgaacaaaaagaatgggatgatatttcccacacatgccgtggaaccctctcaatatcatattcctttgttgccgggtgcaagcgccgggtacgtttctatttaccggagacccccattgcagaccctcttggattacttgtattacctgacgcagaaacctggtttggccgtctagatattactaaggcaatagacattgctatcactaatggacgtattcccccaatggccgttctgggtatagacaatattaatgaatctgatcgtgtgaagacactgggtgggaacaaagatttcattctcgatatcgctggaaatctgctaccacaaatatataaggaccatccgaatataatatgggcaggccgttctaagaccgtttttgccgggcaaagtcttggcggtgtctcagcactgatggccgctttatatgccccccaaatttttggcatggttatcagccattctccatcaatgtggtggagccctgaaagaaaaaccccggtcatgtttagcgagaatgatagttcgtgggtgagcaaacagatgctttccatgactaaaagagacgttaacattcggttaggcataggatctttagaaggttcaatggtctcccatgtaaaaaatctacataaaatgttgcgcgccgctggtatgaaaagtgaactctcaatttatactggtggtcacgattatgcctggtggcgtggagcgattatcgacggattgacagatgtataa

SEQ ID NO: 182399 - DNA, 2097 bp, Klebsiella oxytoca
atgagtaacggaaatttcagacgaatgataaaccagcttgatatgcgatggcgtcatcgggtcccggttattcatcagacggaaacctccgagtgcggcctggcctgcctggcaatgatatgcgggcatttcggaaagagtatcgacctcatatcccttcggcgacagtttaatctttctgctcgtggagccaacctcgcagggattaatggcattgcggaacaactggggatggtgacacgggcactttctctggaactggatgaacttggagcgctcaaaactccgtgtattctccactgggatttcagccattttgttgtactggtcagcgtgaagcataaccgttttatacttcatgacccggccagaggaaaaaggacggttggacaggaagaaatgacccgatattttaccggagtagcgcttgaagtctggcctggcagtgagttttcggtagaaaccgttcagaatcgtatcagtctccgttcactgattaacagtatttatggcattaaaagtacactgacaaaaatctttttcctgtcggtggttattgaagctattaaccttgtgatgccagtgggtacgcaactcgttatggatcatgcgatcccggccggagacagaggattgctgaccctcatttccgctgggttgatgttcttcattctcctcagggctgcaacaggtatgcttcgggcatggtcctccctggtcatgggcacgctcatcaatgtgcaatggcaatcaggcctgtttaaccatttgcttcggttgccattggcgtattttgaacgtcgtaaattaggtgacattcagtctcgtttcggctctcttgataccctgagaactactttcaccaccagtgttgttggtgccatcatggacagtattatggtggcaggtgtgtttgtgatgatgctgttatatggaggctatcttacctggattgttctggcatttacggcagtctacgtgttgatacgtctggtaacttacggttattaccggcaaatatcggaggaaaccctggtcaggggagcgagggcaagttcctattttatggaaacgctgtacggtattgctacagtgaaaatccaggatatggctgagcgaaggggaacacactggcttaacctgaaaattgatgccatcaattcaggtatcaagttaacaaaaatggatttgctttttggcgggataaacacttttgttgcagcctgcgatcaggtggctatcttatggctgggaaccagtcttgtgatcgataatcagatgacaataggaatgtttgttgccttcggatctttccgggggcagttttcagaccgggttgccacactgacgaactttctacttcatctgagaatgatgagtctccataacgaacgtattgccgatatagctttacacgaaagagaagagagaaaaccgcatcttgatcttcagaataatttgcgtccggtatcactggaaactaatgacttgagctatcggtatgacagtcagtccgcaccgatattcagcggcctgtctttgtcagttgctccgggagaaagcgtagcgataacgggtacatccggagcaggaaaaaccacgttgatgaaagttttgtgtgggttgtttgaacctgatagcggaaaagtactggtgaatggtactgatattcgacaactggggataaataattatcatcggattattgcctgtgtgatgcaggatgaccggctcttttccggttcaatcagggaaaatatatgtgggttcgctgaggagatggatgaggcgtggatgacggagtgcgcaaaggccagctatatccatgatgtgataatgaatatgccaatgggctatgaaaccctgataggcgaattaggtgaagggctttcaggtggacaaaagcaaaggatttttattgcacgggctctttatcgaaaaccatgcatattatttatggatgaagcaacaagttctctcgatacagagagtgaacgttatgtaaatgtagcgatcaaaaagcttaatgtaaccaaggttattatagctcatagggaaagtacgcttagaacagttaacagaattattaacatataa

SEQ ID NO: 182400 - DNA, 1275 bp, Klebsiella oxytoca
ttgtttcgtaagaatgctttagaaaacaggaaaatgaaatggcggggacgcgccattttacttccaggaattccactatgggtaatcatgctgggtagtttgattttcattatagcatttctgacatttattattacaggctcttatagtcgtcgtgtcaatgtcagtggagagatttctacctggccacgcgccgtcaatatatactcgggagtgcagggtattgtagtcagacagtttgttcatgaagggcaacctcttaaaaaaggggatccgatttatcggattgatgtcagtaaaagtacaagtaatggtgttgtcagtgaaaatcagcgcagagatattgaaaatcagttggttcgcgtggctaatatcatttctcggctggaaaaaagcaaaaaaattacgctggatatgctggaaaaacaacgtctgcaatacagtgaagccttccgtcgatcatcagatatcctacgacgggcagaagaagggataaagataatgaagaacaacatggagaactacaggagttatcagtcaaaagggctgattaataaggatcaattaactaaccaagtcgcgttatattaccaacaacaaaataatttactcagcctgagcgcacagaatgagcaaaatgttctgcagataaccagtctggatagtcagattcagattcaggctgcagattttgataaccgcatatatcagatggaactacaacgttatgaattgcagaaagaactggtcagtactgatgtaggcgaagaaataattattcgggcgttgtcagacggaaaagtagattccctgagtgtgaccatcgggcaaatggtcaatgccggagacagcctgcttcaggttatccctgagaatatagagaactactaccttattctctgggtgcccaatgatgctgttccttatatttccgtgaacgataaagtcaatgttcgttatgaggccttccctgcggaaaaatttgggcaattctccgcgaaggtggtcgccgtctcaagaacccctgcttcaacgcaggaaatgctgacctacaagggagcgcctcagaatacgctgggaacctctgctccctggtataaagttattgttaaaccagaacaacaggtggttgtctatgacgggaaatctcttccacttgagaatggaatgaaggcagaaagtaccttgtttcttgaaaaaagacgtatttaccagtggatgctttctcccttctatgacatgaaacacagcgcgacaggaccggtaaatgagtaa

SEQ ID NO: 182401 - DNA, 468 bp, Klebsiella oxytoca
atgtcacacatacgagaaaccatcaggggcaaagaagaatggaccgtctatgaacagattggttttgcagttacttgcatgctctataaccgtaattacagcttgtatcctgttctgaccattcagtactggaccgagtatgctatccagcatcaccagattaaatttctttttgatactcgcggatttccactggcctatattacctgggcatatcttgaggctgatacggaagaacgtttactcaatgatccacagttcatgttgcatccttctgaatgggatgaagatggaaggacatggattttggatttctgttgtaaacctggttttggacgaaaggccatcgaacgttttattcatcttcgtccttggggagaagatgaagtgagttggttgaacagaaggaagaaaatcatgacattcaggccagctcagctgaataaagaacagggtattcagaactaa

SEQ ID NO: 182402 - DNA, 1551 bp, Klebsiella oxytoca
atgagtaataattttaactttaatagactaactgataaccttgttccttttactgcccataaggttatgtcgtcattaatatggagtgcttcggatgtggaggatattcaagaattacaaaaaaactgcagttatataatagatccaaatagttcagcctctaccagaaagttttatgccgagcgctatggcggcagtggtatacagcgcaatggtggcggtgcccgatgtggtttcaatggatattatcaggtcaagggcattggggcgaattgtctggtaggcgaaggaactgatcagcgtcattccaatggcgcacttggtgcagttcacgctatttatgaagctatgtggggggagattctgacacaaaccttaccctacggggctgtgcgggcacgggctgttttacttacgaatatttataccgaaaaatcatttgatcgttcccacggaaaatcccgacgtgctctgttaatccgtgaacctgtggtacgtcctgcacattttgaacgcgctccttacttcagacctttgccggaatatgcagaccagttaattcatgatgcccggcgggtcagatctgtgatccgtatgctgccagagtatctacctgtatcctcagaagggattagcgaagaagcgagacgtgatttacggaattattgtattgaggggctatgtgagctgtcccgtcgtgaagcatggcagatggcatattgtcggacacgtttcctgaggctgacaacatctccatccaatattgcgatagatggcaggttaatggattttaacggactcagttgtttattcccgggagactctcccgttgattttgggcagcaactcaggcttaccgagctgttgaaagaaccaatgttacttcagcagggggtatcggatatatgtctttatctggggaaatatctctttgatgccgaatttacaacggtagctcgccagagagtagaagagacgttccggaacgtattccacgaagcctgttattacagttatctggagcaactcggtatacccacgaattttctggaggataaaggggtcccggatactttgagggaaatggtcaacagtttcgttgtgttaattaataaccgctacgaatcattgtatagcccgaacgttgacagtaagggatattcacctttgcaaagtctggtggcagaactgatctgccggagccaggagcaattctcacccaaaagcctgaattcgcagtatgatgttcatttcactgaggcgttacggtgttttgccagggggctccgctggttgattcaaactgcgaataaaaggcagattaataattcgactctcctgaatggaatggaggagcatgcaaggaaaagactccaacccagaaaaaaacttgcaaaagaattaatgtatcaggaaatagcttttttgctggatgaacatggtgatgctccccaccttcttcaggaggcattttctgatatggaattccgcatgaagcaattttccagtgaagcattaggccatttaaatcctgtaaggtttacggtttaa

SEQ ID NO: 182403 - DNA, 210 bp, Klebsiella oxytoca
atggatcataagactaaacggggatggatagataaagctgctgttgttctaaccgttcctctaacaattatctttgtttctttttcctctttacaagttatcggtaaaggtaattcatttattgatgttttcctggcctgcatggtttatttgggtttgtttaatttcttcagggtgctcaaaaaggcattttatttctttgtcaagtga

SEQ ID NO: 182404 - DNA, 261 bp, Klebsiella oxytoca
atgagccttcataaagagaaaaatcctaacttagaaacaaaactgtatatttcaacagttgaaaagccagatttacattcaagaatcgtccatcccaaccccctggaacgcaaaatttttaatagcacatctcaaaccattaatattattaatgccccagacggaagcaccatttataaagagggcgaatcagataattatagcgaatatatctgtggctgtggttgcgcctgctgttgtgggtgtggacatgatttctaa

SEQ ID NO: 182405 - DNA, 1107 bp, Klebsiella oxytoca
atgcgtgttctttttattggcccaccgctgtatggattattattcccgatgctttcattagcacaggcattccgtgtcaacggacatgatgtcgttatcgccagtgcaggaaaatttgcatttctagccgctgaagcaggtcttgttactttcgatgctgcaccaggactcgattcagaagctggttatcgccatcaggaagatttgagaaagaggacccatatcacaggaaacttctcattcttcagcgacgagatggctgacggcttagttaattttgcaggtcaatggaggcctgacctcatcatatatccaccacttggcctcgcaggcccactagttgcggctaaatatagtattccaacggtgatgcaaactgtaggatttgcccatactcctgctcacataaataaggtgaatacttctctggcaaatgcctacaagcgccatggagtcactcgaccacaacaagatctcgtatggattgatatcactccgcccagtatgagcattcttaaaaataatggagaaccaattattttaatgaaatatgtaccctacaatggcggagctgtatgggagaactggtgggacaggataccaaataagaaacgcctactggttagcctgggtaccgtcaagccaatggttgacgggctggatttgattaagtgggttatggattccgctggagaggttgatgcggaaatcatcctgcagcttgcagcaaacgctcgctctgatttacggcaattaccaccaaatgtacatcttgtagactggatccctatgggggtgtttcttaacggcgctgatggttttatccatcatggcggcgcaggtaacactctcacagccctctataacggtataccgcaaatcgtattcggtgaaggcgctgaccgtccggtgaatgcaaacgtcgttcaaaaacgtgggtgtgggattatacctggtgaaaaaggattgaccagtgatctgatcaatatgtttctcaatgattctacgttacgatccactgctgcccaagttgcagcagaaattgcattacaacccagcccatctgaagtggtagacatccttgcaactaaaattttgtatggctaa

SEQ ID NO: 182406 - DNA, 480 bp, Klebsiella oxytoca
atggcagactttcccggaggtgatgctgcgcatctgtccgggctaagcatcctcagcagtctgcgggcctgtagcccgggcaggcgctttgcgccgcccccgggaaaagagcgcagagtgacagactttcccggaggtgatgctgcgcatctgtccgggctacgcatcctcagcagcctgcggcccggtagaccggcgccgcccccggggaaagcgcgcagagtggcagaatttcccggaggcgatgctgcgcatctgtccgggctacgcgtcctcagcagtctgcgggcctgtagcccggctaagcgcagcgcgagccgggggattatcggctattctgccgaagctcgcgcaccagcgcctcggtctgctgctggttgcgtaagcgcacaaagcgaatatgtcgatactgcggatcctgcatatccgccagatagcggcggcgattattgcgccaggtttttagcgtccagagaataa

SEQ ID NO: 182407 - DNA, 711 bp, Klebsiella oxytoca
atgagctcatcgaagaacgcagagaaccttcctgttgtacttattccaggatttatgcttgatgaaacgttgtgggacgattttatcgcggcatttcccgacagcaggccctttatacctgctagcctgaatgagggaacaacaatccaggatatagccgccagtatagcccagaaactacctgagcgttttgtcctggtcggtttttcactgggtggctacgtagccagagctatttatgaagctattctggaacggacagcggctatgatccttattgccacttctctcagagaagattcggcagaacaaaacaaaacacgtgtagtggctgcgagtactccttcctccagagaattccgtggactgagcacaatagcaattaagaaatcgattcatgaggatctcgccgataatatcaccatcattgagaaaatccggaacatgggaaagaggctgggagcaaatgcgttcagagtccagtcagggctaaaccgtgagcgaataacgttaaaaccagtttcatgccctgcatacgttattgctgctaaacatgaccggctgcgttcaaaagatgaggcagaagagttggccaggctaaccggcacctgtgcggattatgttgacggctgtgggcatatgattcctctggaaaaaccggatgaactggcccaacttgtattcacatggctcactaaaaaaggcctttaa

SEQ ID NO: 182408 - DNA, 639 bp, Klebsiella oxytoca
atgactccttcgaatgcctctgcgccgcaggctaatcaggcggcgcgacccaactggtcggcggtttttgcggtggccttctgcgttgcctgcctgattaccgttgagttcctgccggtaagcctgcttacgccgatggcgcaggatttgggcatctcagaaggcgttgccgggcagtcggtcaccaccaccgcgtttgtggcgatgtttgccagcctgtttatcacctcgatcatccgcagtaccgatcgtcgctacgtggtgattctgttttccgtcctgctgaccgtctcttgtctgctggtctcctttgccaacagtttctccttgcttctggtggggcgcgcctgccttgggctggcgctgggcggtttttgggcgatgtcggcgtcgctcaccatgcgactggtgccgatgcgcgtggtgcccaaagcgctgtcggtcattttcggcgcggtatcgatagcgctggtgatcgccgcgccgctcggcagcttcctcggcgcagcaaaatatgtttggcctgttaaagcgccccggcgtaatggccgggatgtgcgccatctttatggccttcgccggccagttcgccttctttacctatattcgcccggtgtatatgacgctggcgggctttga

SEQ ID NO: 182409 - DNA, 1014 bp, Klebsiella oxytoca
atgaaactctcccgacttgctctgttaaccgttaccgtactcgccagcgccccggtgtggtccgctgacgttgtcaccgtttattccgccgacggcctgcacgacggcgacaacagctggtatcagaaccagtttgccgcttttacgaaggcaacgggcatcaaagtgcagtacgttgaaggcggctccggagcgattgtcgaacggctggcaaaagagcgcaccaatccgcaggcggacgtgctggtgacggtgccgccgtttatccagcgcgccgccaaagaacaattactggccgaatttaagccgcagggcagcgaccagatccccggcgtccacgaccgctactcgccgctggtgaacaactatctgacctttatctataacagcaggctgctgaaaaccgcgccggccagctggcaggatttgctcgatagccgcttcaggaacaaactgcagtactcgacgccggggcaggcgggtgacggtacggcggtcatgctacaggcgtttcacagcatggggagcaaagaggcggggttcgattatctcggtaagctccaggccaataacgttggtccgtctgcttccaccggtaagttgaccgcgctggtcaataaaggcgagctgtacatcgctaacggcgatctgcaaatgaacctgtcgcagatggcgcgtaatccgcatgtgcaaatcttctggccagcggacgcgcagggcgaacgcagcgcgctggcgctgccctataccatcggcctggtgcagaacggtccgaacggcgaaaacggtaaaaagctgattaacttcctgctagataagcccgctcagtccagcgtcagcgcgctctcctgggggctgccggcgcgcagcgacgtgacgccggaagacgctaactttaaagcggcgaaagcggcgcttaacggcgtgaaaagctgggaacccaactgggacgaggttgcggattcactatcggcggatattgcccgctggcatcaagtcaccgacagcgagtaa

SEQ ID NO: 182410 - DNA, 1347 bp, Klebsiella oxytoca
atgaaacaaatcggtgaagcagttaatggctatataaatatccgttatgataaattgtcaaccttatccaatgctgccggaacaggaaccgatccgggaccaagaacctgtagcgggagcgtgtgtgaaataacctatcagacattaattaatgaaggattattaccaacagcttatactggtataaacgctaaaaaatcgccgtataaaatactattaaaacgtgatggaactgctcctaactatgttattaatggtatgattactacggcaatggcatggatagaaggtggtaataccagatacgatctcttaggacaagccatgcaaatagcgggtattgatagcggaatgaccagaactacatcaaatgcttttggttatggtggtcaatggtcagaaacttctgccaatttcaataacattacctctgcagggcaattagctttccgtgtaggatttaatagcgcgttatattctatctatcttcgtcgtgatggaacgttacccatgaccggaaaccttaatatgggtggtcaaagcgtttataatgctcaggatataactgcgaatggaacaactacaacaggaatattaaaaactaatgctgctgctacagttggaacaacattaaatgtagcaggcgtaactactttaggatctgatttaaatgtttctggaaatggacaaataaatggtaatttaaactcaaataataccgtttctggaacaactgtaacatctcgtggcgaaacctatactcaaaactggttcagaacattaggtgatggagggatttatttccagaaatatgggggaggattatacatgcgagatactgcaactataagtgctggaggatctaaccttcaaacttcttctggattatatggagcatatgtaaattcttctggtaatatagatgctgctggaacagtaaatgctgcttacgtatgggcatcaggaaacctcaactctaactatgttcattctaatggcaatatagatgcaaatggtcgaataaacgctggtgaatttgtttatataaatggacaagcgaatgtaggatggggatgttctcctaatggattacagggaagaacgccagaaggggctattttatcttgtgttaatggtgtatggaaaagtagttctgcaagaattgagagaactcaatttttagtttctagtggtagtaattatggagatatttgtcaatccaacattaatagtaatggaatggcagcacaaggttgggtcgcaagtgggtctgatgcttgtactgaagacgggaataattgttcagtggacaatgttagatgttttgcaataagaattgtaaattaa

SEQ ID NO: 182411 - DNA, 177 bp, Klebsiella oxytoca
atgtttaatactttgccttcaggttctcccggcgagttagcgaaaacgtatctcctgccgcacaccagcgtcagcgtaaaattacctgctaaagcgggagcggatacgaaagtcgagtttttcccggcaagccgctatggatataaaggagatcgctacatcacctcgttgcagtga

SEQ ID NO: 182412 - DNA, 636 bp, Klebsiella oxytoca
atgtcatcactgatattttatacagacgaagcacaagcactgattgtaacagatacccttgccgtcaccgataatggggagccgttatcttttgtttccaaagcaggttacatcccccagctaagaaccatcatagcaggtacgggggcaggtggattttctaacacctggttgcttgaagcatcaaccagaatggtcgtatcaggtatacaaaatctcaattatcatacatcggcctgtctaaggaggctgtggaaacaatacaagcatgaccatgcaattccctcttcttcaacggtgacaaccagtgtttatcagttcgcaatttgcgaggaaacaggaaatatcgtttcgttcgcctatcgctcagtccatgatttcgaatcagagcaattacaatacggaacaggagtaaaacctgagtgccaaatcctggatggggatttgttgcagacaattcctgtaatgatgaatgaacaaagggctatacaggcgacatactcacacccggaacggatccatattggcggtgagatgattgcgcattatctgacatcatctatgtatcaatgctttaagattggggaatttgaggatttcagaactcagggagagtatatattgagcaggatttag

SEQ ID NO: 182413 - DNA, 1248 bp, Klebsiella oxytoca; identical to SEQ ID NO: 127352

SEQ ID NO: 182414 - DNA, 1767 bp, Klebsiella oxytoca
atgagccggagtgaaacgcagataacgtggatggccgaaaatgtgctgtcatgggagacggtcagcggacacatcactcagcgggatctgaaccgatattatttacttgacgtttatcttcaggctcatttttcagattatgtgttgctccccggatggtttagtgaacattcgcatcttgcccgccctgaaaaacgcgattttattgcctctctgaaacgatttcttctgtcttaccgtcccgccggaaggttaaccattttccgttatctcaatatgttttttatatggcagtcagtcaatcagtatgactatggcacggctgaaggcgttgaaatgtatattaaacatctcatgaacgatattcgtcggcgaaaaatttcagtcaggatggcaagacactacttgtccgtggtcaaccggtttttgcttacgggcgggcagattcagaggcggtatgaatatgaattcttaccgaaaggaacgtatcagcagcagggaagggatagctataccaggaatgaactttccgagatcctgaggcagttgtcatccatgaatgagttccttgcgggatgtatccgggagcatatcgctaaatcggaaaaaggggtgcggcatttctcaccgtctttgctggcacctgtttatgaagcgtatttccggtatccgggagagaacggggtcagcagggcagagatcatcatcagggacgttctggaaaattactttcttacttctttttttctgttctgttaccacacatggggaaacacctctcaggttctgggtctgacgcgggatgatatacatctggatgaaaagggtatcagcactgattatgtttataaggggagagcgaataagtatatacgtctgacgataggtaaatcggagtatgtgaccaaacgtgcgggctattactggtttctgtcttttatcaggctcagggacgacatcgttaactatctggtttccgcagataacttccctccggtacaggcgctgtttctgagtgagccgcaggtgaaattccgtaagctttattctcttaatcccagtcatctgactaaattttctaactctgagggggcgtgggccacgatgcggcagcttaatccctcgcttccatcaattaccgtttctggcttgcgcaaaacgtctgagcagtatacggacagaacattaaagaatggtctgattacggcggaaaaagcacagcataactggggcacttacaggcggaattatgctgcaggtaacccacagggggcgaaggaaaacttcagtgctgcacttgatacgcttatgaatcaggggattgcgacacgtgcgttatccgagcgggtaaaagttgctgatgagctggggatcgatctgcgtggaagcgatgagggtgtggatcttttattgaatggcctgggatgtcgatcgcaggagccgcctacagatattgaattgcgctttataaaaaagcaaaaacgatttggccggacaccaaaggcttgtgcggatttttctcattgtgtcgaatgttcaaaaagttgcgttgtggaaacgctggagtctgtatggctcctgctgtcattcaggcatgctatcgagtatggaaaaccgttgtacatcggttcggtcaatgctgtggagcgttatgaaacgttactcctgaagattgatttacggcttgggctggtagatgaggcgatcctgaaaaaagcgcgcgttaaacttcagcgagaaggtgtggctccggtatggcagatttga

SEQ ID NO: 182415 - DNA, 2118 bp, Klebsiella oxytoca; identical to SEQ ID NO: 127351

SEQ ID NO: 182416 - DNA, 429 bp, Klebsiella oxytoca; identical to SEQ ID NO: 26632

SEQ ID NO: 182417 - DNA, 279 bp, Klebsiella oxytoca; identical to SEQ ID NO: 141626

SEQ ID NO: 182418 - DNA, 330 bp, Klebsiella oxytoca; identical to SEQ ID NO: 119501

SEQ ID NO: 182419 - DNA, 1125 bp, Klebsiella oxytoca; identical to SEQ ID NO: 119502

SEQ ID NO: 182420 - DNA, 795 bp, Klebsiella oxytoca; identical to SEQ ID NO: 119503

SEQ ID NO: 182421 - DNA, 876 bp, Klebsiella oxytoca; identical to SEQ ID NO: 119504

SEQ ID NO: 182422 - DNA, 852 bp, Klebsiella oxytoca; identical to SEQ ID NO: 119505

SEQ ID NO: 182423 - DNA, 837 bp, Klebsiella oxytoca; identical to SEQ ID NO: 119506

SEQ ID NO: 182424 - DNA, 660 bp, Klebsiella oxytoca; identical to SEQ ID NO: 119507

SEQ ID NO: 182425 - DNA, 582 bp, Klebsiella oxytoca; identical to SEQ ID NO: 119508

SEQ ID NO: 182426 - DNA, 327 bp, Klebsiella oxytoca; identical to SEQ ID NO: 119509

SEQ ID NO: 182427 - DNA, 1134 bp, Klebsiella oxytoca; identical to SEQ ID NO: 119510

SEQ ID NO: 182428 - DNA, 309 bp, Klebsiella oxytoca; identical to SEQ ID NO: 113671

SEQ ID NO: 182429 - DNA, 2652 bp, Klebsiella oxytoca
atggcaaagaaacttttcggttatcatcccatcctgactgacgacaacaattcagttgtgattcgcggtgctcgcgagaacaaccttaaagaggtggatgtttccattccgcgcaacgcattggttgttttttcgggtgtgtcaggctcgggtaagtcttcactggcctttggcaccatttatgctgaggcgcaacggcgctactttgaatcggttgccccctacgctcgtcgcctcattgatcaggtcggggttccggatgtggatgccattgacggactgccgccagccgttgcgcttcagcaacaacgcggtgccagtaacgcgcgctcctctgtcggcagcgtgaccaccttatccagtctggtgcgaatgatgtactcacgggcgggcgcttatcctgccggacaaccgatgctgtatgccgaggatttttctcccaacacgccgcagggggcatgcccttcttgccatggtctgggccatatctatgaggtaactgaaacactgatggtgcccgatccctcacttagtatccgtgaaaaggctattgcttcctggcccccggcctggcacggacagaatctgcgggatattctggtgacgctggggtatgacatcgacactccctggaaaaatctgccagcggaagaccgtcagtggatcctttttaccgaagacacccccactgtaccggttttcccgggactgagtccggaagatacgcgcgaagccgtcaggaaaaaaatgacgccgggttatatggggaccttcaccggggcacgtcgttatgtgctacataccttcgccagcacgcaaagcgcgttgatgagaaaacgagtctcccgttttatggaaggcaagctgtgtccggtctgtcacgggaaaagactgaagtcagaatcattgtccgtcacctttgccggtgtggacattggtgaatttatgcagatgcccttagaccagctggcggaattgctccttccaatctcccggggggatttcagtgcccaccacgccggcgcagatgccgacagggatatcacccgtcgggatctgacagagcgtgctgcatccggaaaagcggtccattccgataacgccgatgtctgccggacatcggcgttatcggaagagaaacgactggcggcacaacggctgaccggtggtgtcatggcccggttgtatcagttgcagaagctggggctgggttatcttacgctggacagagcaaccccaactctatctgcaggagagcttcagcgactgcgtcttgccacgcaactcagttcgatgctgtttggtgtggtctatgttcttgatgaaccgtctgcgggtctgcacccctcagacagtaaagcgctttacgatgcgcttgagaaccttcgtgatgccggcaactcggtgtttgtcgttgaacatgatcttaacctgatgcgacgggcgcaatggcttgttgatgtgggaccgtcggctggtgaacagggaggacatgttctctacagtggtattcctgaagatctgaaagccgtcacccaatctcgtaccgcgcgttatttatttgatgaagtccggccaccacaatcttttgcccgtatcccatccgggtggctgaaactgcaggggatccatcgccacaatcttaagtggatcgatgttgatattcctctgggtgtgctgacagccgtgacgggagtctctggctccggtaaatccagtctgattgcccaggccttaccggaactggtgctttcttcacttggcggtgagccagaagacgtgctttccgaagccagcgacgctgaggggccatccgtaacggagaaaacgtacggtaccctgaccggtgataccggactggtaaagcgtctggttcaggttgaccagaaaccgataggcaggaccccccgttcaaacctggcgacatataccgggttgtttgatcctgttcgtaagctctttgccggaacgactgacgccaaactccatcattacgatgcgggtcaattctctttcaatgtggcaaaaggccgctgtgcaacctgtgaaggtgaaggattcgtcagcgtggagctgttgtttatgccgagcgtgtatgcaccgtgcccgacctgccatggcgcgcggtataaccgggatactctcaggatctgctggcaggacaaaaatatcgcggaggtcctgcatatgacggtggatgaagccagtcagttctttgcgactgaagaaccagtggctcgtcccctccgtctgctgagtgaaattggtctgggctacctgcgtctgggacaaccagcaaccgagttatccggaggggaggcgcaaaggatcaagctggcaaccgaactacaacgtagccaacgtggccacacgttgtatatcctagatgaaccgacaaccggcctgcatgcttcagacgccgaccgcctccttgtgcaactgcagcggcttgttgatgcagaaaatacggtgataatgattgaacacgatatgcgggcggttactcaggcagaccaggttatcgacatcggtcctggagcgggacatgagggaggacgcctggttgccgcaggaactcccgaacaggtatcgcaggtcaaagaaagccgtaccgcacagtatattgccagggaactctcacggaacggttaa

SEQ ID NO: 182430 - DNA, 426 bp, Klebsiella oxytoca; identical to SEQ ID NO: 129404

SEQ ID NO: 182431 - DNA, 489 bp, Klebsiella oxytoca
atgaacaaattctatcagttgaaaatcaccctcaaagatgtcagtccgcccatctggcgttcttttgtcgtgcccgcaagtatcacgctcgatcgtcttcatgatgtgattcagattgtgatggggtgggaagattgccatcttcatagtttcaaattcaaaaaaacgatctggcttgaagagcctaaatccgccgatgatgaagatgaagcgttgacccgcctaaatgaactcctcaagaaaagcggtaactcgctgatctataactatgattttggtgatgcttgggtgcatgaaattgtcctcgaaaataaaaacttcatcaaggaggacgctatccccacaccttttggctgtattgaaggcaggatgcgttgcccgatggaagatagcgggggcccagccggccatatgcatttgcttgatatcattagtgagcctcataaaaataaagaggattttgaggcgctactggattttattgagtag

SEQ ID NO: 182432 - DNA, 2976 bp, Klebsiella oxytoca
atgaagagtcttgatatacgcgttgctttcagcgcgatcgacagatttacccgccccgttaatgctgcccgccagagtgcgggcggcctatccgactccctcagaaaaacacaatccaccctgaaagggctcgataagagcagtgccacttttcagcgaatgaccgcggccgtcggcaaaaccgaccgttccatctcacgtgcccgtgcccgctttgatggcttgtcagaagcacaacgtaaaaacggaacgctgacggaaaaacagcaaatactgatgtcccgattgggtgagcggcttgatcggttgaccgcaaaacgcgtgacggaagtggcccgcctccgtgagagtgcatcagccctgcgccagcatggcgtcatgctttccggtagtagcgccaccatcggtaacgcgatacgccgcacagaacaatacaaccaatcccttgaacgggaaaaacggcaacttgctgcggtcactcaagctcgtaaacgttacgagggtgcacagcagatggccgggaagttgcgctctggcggtgccatagcattaggtacagcaaccgctgccgggtacggtgccgggcgcttcctgtcgcctgcggttggttttgatgaggaaatgtcaaacgtccaggcgctaacgcggcttgataagggcgattcacagctggccgccttgcgcactcaggcaaaaaaactcggtgctgaaaccgccttcaccacacgtgacgccgccagcggccaggcctttctggcaatggcgggcttcacgccagatgctatccgtgccgcactgcccggcgtgctcaatatggcactagcgggcagtatggaactgggtgaaacggcagacatcggctcaaatattctttcacagttcgccctcgacgccggggaaatggaccgcgtcagcgatgtgctgacaggtacatttacccgtaccaacaccacgcttagcagcctcggcgagacaatgaaagttgtcgggccggtagccgcgggacttgggataagcctggaagaagccgcagctatgaccggcacgctggcgcgcgtgggtattcgcggtagcgaggccggtacggcaatgcgtcgctccctctcccgcctggcctcccccactacggcagccaaaaaggcactcaaagagctgggagtggaaactgccgacgcgagcggaaagatgcgacgtccgttcgatattcttctcgatctacaaaaacgcgtttcccgctttggcgaggtggatcaggtttcatttttcaaagatatcgccggagaagagggttttacgagcctccagtctttggtcaacggcgcaggtgatggctacctccagtcactctatgaacaaattgctgaagcacataaaaatcaggaggccttcgccgtcgctaacaagaagaaagacaacctgggcggcgatttgaaggagctggacagcgcgtgggaggcgtttcgcatttctgtggctgagacagtagacggcccattgcgcaggctgacacaggggcttagccgggttattggcactattcaaacctggatagaagaaaaccccagactttcacgaacgttgttactcgccggtggtactgcactggcattaaccgcagtatttggcggtatgtcattagctgctggtctacttttagggccgcttgcaaagctcaggctggggtttgcgctgctgtccggcgggagcggcatcggaggtacggtatcagcgttccgcatattgagtgctgtgggcggcagttcactggcaaaaatcagcggatggcgtgccttactcggcggtctggctggacgcgccagcgtattaaccaggttgatggtaaccctgcgcggcgcgttacttggcgccttttcctctccggggacggcgataagcgccctgtcaaaaggcgttggcgggctggcgctgcggctaaccgggctccctgctctgctcggtattgtgaaaggtggaattacgacactgggcggcggattatcaatgctcttgagcccaatcggtttagtgggtgctgcgtttgtagctgctggggtactgatctggaaatactggggaccaattaaggccttctttagcggtttttttacaggcgtcatccaggggttagcgcctgtttataacgtattttcccggctggcgcccgttttcggggtcattggggatggcgtcaaaaacgtctggaactggtttaaaagagtattaacgcccgttgaggagagtcgcgaggcgctaaacaagtgcgccagcgccgggcagacctttggcgaggtcctggggaccgcacttagcgttctgctttggccccttcagaagttaatggaaggcgtcggctggttactggagaagctcgatctcatccccgatggcattgaaagagccaggctggaagcggccagactcaggtctattccggttatgtgggaatgggatgaaaaatccgggcgcatggttaaaagggagtggcaatggtcatctgaaaaacctgcaagcaaaggcagcgccccgccgcccaatgtgctcgggggcaactcaggaacagagcggcggctgggccaaatcgcggataacaccaaaggccttttagatgaggaaaagcgcaaacgtatcgggccgggtgacattgtatttaaaaatctccctccagcccttgcagtacgtggtgaatggcaggagtcgaagcttgtccgccagtctgtcagctctcgcccggttattgccgctggcgaaccattgataaaacatacgcaggcatggcaaccggtacgccgaaatcaaagcacccacacggcggctgcggcttcaggttatagtttttccggtgatattcatgttcatctgcatgacattcagagcagcaatccgcgcgaactggcgcgacttgttggcgaggctgtccgcgcggaaattgataaaaggcaacgtgctgcccggggttcgttccgggaccatgattaa

SEQ ID NO: 182433 - DNA, 1611 bp, Klebsiella oxytoca
atgcggataaaaaaattgagattgtttaatggatacaaacgctttcatgacttgaccatagatttaggcgaaaatcccgctaggattatcgcattggtaggaccaaacgggtgtgggaaaagcagtgttttagatggtattcttttccaccataatgcgttcggcgcattgggtaacaaaggaagtaaaaactatctttatcactcaatgcataatgaccctgcatttgactatcaaagcatttcgattgaatttactagtggcacttattacaatgcaagacaaagtaggaagggtaaagaaaatacattattttccttccggagtccttacagatacaattctaatttaaacgtaactgaaagtagagcagttggtgagatatatttaaataattatggcgcatcttcttcttcagatcttgatgataagatggaagaaaactaccgcagactaaatattaagtttattaaatatatgaatgctgaggattgtaaaccaagtgaggccaaggaaaagattataggggatttaaataagtcaataaaaaactgcttgaatctcgaaattgacaatctcggaaatatagaaagttctcagggaacaatatatttcaaaaaacctgaccatcccaaaccattttcattcaatgtattatcatcaggagaaaaagaggtcatagacattttacttgatttatatttaaggcaagatgaatattgtgatactgtttatctcttagatgaaccagagttgcatattaatacatccattcagaaaaaactcctcattgaaataaatagacttattggcgaacaatgccaaatatggttaacaactcatagcatcggttttatgcgagccctacaagatgagctcaacgaaaaatgccaaataatatactttgatgaaaatcataatcttgctgctgagactaacgttttaacacctactacgaaaagctctgtcatgtggcgcaagattttcggtattgccttagacgatctcactcatctactaagtcccagacgaatagtgtactgcgaaggtcgtgatagcccaggcacagcaggaagagagcgcgggttagatgctcaagtttataatgccatttttaatgataaataccctgacacattattcgtttcaagtggcgggaatactgaactagataaaagaagtgatattgccatagccattttatctaaagctctacctaatttagaagtattggttctgaaagatagagattctggatcaggccgttgcatatcgtctaaagatagagaactctacctcgaaacaaatcctaaaaatcatcgcatgttgattcgctgggaaatagaaaactatctttttagcaaagatgtgctagttagtttttgtaaaaaaaaaaaacttcccttcgacgaagctcagtatgacaaaattattacagacattgagaatcaaagtgtaaaggagctaaacaaccatattagaaatatttgcggcataaaaaccaatataaatcccgaagtttttaaattgaagctatccgaaagtttccctactgactctgttacatacaaagaacttgagaggttaattttctcacataaaacaacctaa

SEQ ID NO: 182434 - DNA, 336 bp, Klebsiella oxytoca
ttgcgcgcaggtgacggggggcaagcccccgcaagcgatacctttgctgacagagttgtacgtattggttccgaacacagcatgaccgggggcagaaataaagtcaaaattgcagccaacaacctcccaccgcactggcaccgctttggcgaccggtctccagggactaaatgggatccaaccacgacacatggtacagacaaccagaaaagtggtccgcttgcccttactgatgggacttacatcgatgcggagggcctgaccgagtccgcaaacgagccggttgatgtgactaacgaatatgttactctctgcatgtggaaacgaacggcataa

SEQ ID NO: 182435 - DNA, 792 bp, Klebsiella oxytoca
atgcaacgtgacatggttgatgttacggatgataggactttaacccaagggacaatttttaattgtgcttactcagcctcttaccctaacaatgaaaccttaggtcttgtgatcaccgcaagatgtgatattgcaaataaagaaaaggttaagttttataattttattccagcagttccattcagcatctggagagataaagaattacaaccaatagtaaaaaagcaagtttttaaaaacttaaaaaaacaatttcttgagctacttgaaaaagcatctttctcagagctcaatgttacaacctatggttatcacaggatatacgccataataaaagaaaagaatttactaaataacagggaattaatacgcctagaatcacttcaaactaaaataaattgcttagatgaaaactcagcatatgaaaaaattattatccattttcgagatgaatgtgaaaaggccctcaaagatataattgaaaataaaaaccctgactatttttttattgataatgttgatggttacaattctgttgttgtcaacctaagagaaatttatgaattggacatctccatagcaaaaaaaataccaaatggtattgaactagataatggtgaaaattatgcaggcctaaacatgaatgtaacaaataagctttgcagtattataggccaactcaagtcaccatttattgaattacttatgcagcgttttactaataatttcgttagggttggcgttgcaaatcaccatagtgaattattaacaacaataatggatgccaaataa

SEQ ID NO: 182436 - DNA, 2271 bp, Klebsiella oxytoca
atgaactttattgctatagaaagtaatgcagcgcggaaaatagtatcagaaaggatgcttcagtctgcagattacgacaagggccaaattttggcacgcttattaaaagatggtaaaatatccgacttcagtttagacattaaagccttgtctataaactccgggatttatattttaagtaaaaacccaaataagaaaaacctgttgatattcgataccactacatttaatggttttcaaaggagtagtagtgaagtcgttaccattcttcaaaaatcgtgtagattagctattaaactatgggataaaattggtcatagtccctgcgaaaaaataattaatggtacatcattaattgctcttttaccgctctcatttactactggaaaatcttataaagtaatacttgataaatctccggataaggaaaggcaagaaaaaaggaatgaaagtagcttcttaatttttcaagatgggtatgatacagctgagaacgaacccaagctagctaatttccgaaaggcaaaagaaggatttttggatatagacccccacactttatttaaaagttctgaaaaccaatcagacccatcaagttcttatttaagtgtaagcgagattcatgaagcggggaatttaaacaaccctcatatgggcttagattactggacaaaaaacctaacagaaagccaaaagaaatttgttttcagcgaaagctttggaccagacattcttaaaggagctgcaggaacaggaaaaacattaagcttaatcctgagatctgttgttcaactcaaaaatgcaaaaaaaacggacaaccaacttcgagcgatcttcataactcacagcatagcgactaaaaataacattgaaaatttaatagcgtctaacggtggagatgagttcattaactctggtaaattacagtcaatcgaagttactactctacaagaatggtgcataaataatttaggtaatagaatatctgcaactgaatatcttgatagtgatgcattagagtcaaaacagttgcaactactttacataaatgaagcactagaggattttttcatcaaggattatgctggttcacttaatttcatttcgcctaaacttaagaagttctttggcagtaacgatccctggggcatatctatattactccaagaggaaatatcaacgtatattaaaggtcgtgctggtgatgatcttaagacctatatgtcgcttcccagaaccaaaaatatcatcccaatagagaacgatgatgattttaaaactatattctcgatttacaataaatatcaagaaaaacttatagcattaaacttgtttgatagtgacgacattactctgtccgcgcttaaagaaacgtcaactccgatatggaaaaggcgtagaataaccgctgggtttgatattatgtatattgatgagacacatctttttaatattaatgagctaagtttattccataatctcctcaaacccaactctaatcatattgtatttacaatggatcgaagtcaagcaaccggagatacgactataaccaaagaagatgtagccaaagaacttgatgccaacttagcaaatgagcatggtttaagtgctgtatttcgttcttctgaacatatcataaatctagcaagttgtgttttagcatctggggctacattatttcaggagttagaaaatcctttggcagaatcgatgactggccatacatccttgattgaggataaatgctgtgtcccatatataataacaaaacaaaatgcttctgaagtttacagagcatctttctcttttgttgatcatattgctcaagaattagatatttcaaaaagtgatgttttaatagtcccatgtacagatcaagtcttcaaggaattaaaaaattttgctgaatcgaatgataaggaatatatatcaattgaaaggcgtggtgataatttagctgtagaagctgcagccacaaacaacctttatgtaataggagggatggattatataggtggtttggaattttcagtcgtagtgattgttggtgctgattctgacaaattccctgaacaatcgacttatactggagaatctctgcacttcattaattactcatcatttaataaattatatgtagctataacacgggctaaatatcaaattgcttttatagctgaaaagactcaaaaaataagtccattactcgaaacagctgtaaccgagggcttattgacttacaatgatgaactttcaaacagactataa

SEQ ID NO: 182437 - DNA, 312 bp, Klebsiella oxytoca
atgcgcatcgtcggttttgacgacggacatcaacaacgccgctttgacggaattaatcatgcgcagcgcataatcactctcacctttaacgggcgcggatttgaagaaattaacgcaatctgcgactttctcgatacacagcaggataaggctacttcattcgatttcactgggcttgatgtctcagtaatccgcgttgttgttgacctggataatggctacaacctcacagatcacaacaccgttgatgacgtgtcagttactttcagtaaggtattcacctgggcctcagcttttcataagcacaggtga

SEQ ID NO: 182438 - DNA, 480 bp, Klebsiella oxytoca
atgaaatttatacctattgtgttaatgacacttaccttaagcggttgcgcttcaatcatgggagataaaacacaggcccttcctattgatatccaacccgaagggacaaaaattacagtcaaagacaatacaggaatgaccgtttacaccgggactagtccaacaacggtcacactgaataaaagcgatggttcatacttcggcaaaaaaaattacaccattttcgctgaaaatgatggctattcatcccaatccatcccaatcaccgaatctgtcaacggctggtatatcggcggaaacatcgtttttggcggtttaattggatggttgattgtcgatccgtggaacggcgggatgtataaacttgatatggataaaatccagaccaagctttacaagccagatgaaacaccaacggcaccactaaaaatagccagcgccccggcaccgaaaaccgcaagagcaagttcttttcattaa

SEQ ID NO: 182439 - DNA, 198 bp, Klebsiella oxytoca
atgcccggactattaggctactggaaacaacttccaaccagagaggaatatattaaaaagcacaatctaagtaaaatatcctgctacagttgtggtcatgaaaaattcagcgatgttggtttgatacaagtgtgggataatcacagaagaattctttgtgctaaatgtaagaccacgctgttcagagaagaagattaa

SEQ ID NO: 182440 - DNA, 315 bp, Klebsiella oxytoca
atggcctcaacaaaaaaatatctggagttcatattaggacagttatcatcattagaagaaataacttcacgcgcaatgatgggggagttcattatttactatcgcggaaagattgttggcggtatctatgatgatcgttttcttatcaaaccggtccgctctgcaatagcttatatgcctgtcatttcttatgagttgccttatgaaggggcgaaagaaatgctgttggtggataacgtcgatgataaagaatttttagcaggattacttgatgcaatgtatgatgaactgccagtgcctaaagccaaaaaataa

SEQ ID NO: 182441 - DNA, 912 bp, Klebsiella oxytoca
atgaaatatgaattttccatatgcttggtgaatgttttggacaacaatatatataatatccttttcttcatctttctttcaatagtaattccatcccttttattcctcgcatggaaacagcaccaaaaaaccaaagagattcgttcatatctattgaaagagggatataatattattttcaacggagaaggtaactcatacctcgcgtttaatattagtaatgcgacatttcgtgcaggtaatttaatttccaataattattttcaagcatcaatttcttatatccacgattatagatgggagtggaaggaggttgacgcaaagaaaataaacaatatatttattatttacatttcggatattgatttcccttctcaaaaactattttatcacaataataaatctttagctgaaatagactgggcaaaattacaagctatttttcatcaaccatatgaaataaagaatgacgtcatgctagataacaatgatacgcactatgattttttcatatctcatgcaaatgaagataaagatacttttgtcagaccattggtagacgagttaaatcgacttggtataattatttggtatgacgaacagacacttgaagtcggcgatagcttaagaagaaatattgatttaggtctaagaaaagcaaattatggcatagtcatactttctcatgactttctaaacaagaaatggacacagtacgaattagatagtttaattaatcgtgcagtgtatgatgataataagattatattgccaatctggcataatatcaatgctcaagaggtatctaaatacagccattatttggcggataaaatggcactacaaacttctctatatagcgttaaggaaatagcaagagagttggctgagatagcatacaggagaagataa

SEQ ID NO: 182442 - DNA, 510 bp, Klebsiella oxytoca
atgagttatcgtaataagacatatgtagcttttgcaagtgaagatataaagctttatcgtctaatggaagcatggaaagcaaatgaaaacatagattttaacttttttgatgctcatgatctctttatttcaagggatacaagtaagcctgaaaccataaagcgaaacctccgcgaaaggatgaaaaatgctaaacaagtagtactgttgggaagtagtaatactaagagaaaaggtagcgatggagtatcgtttcttgcccatgaaatagatcttatcgtagaatttaaccttcctgttgtaatagctaatttagacggagatagaacagtcgataagaacttcattcctaaaccgcttttagattcagagcattatacagtgtctgtttccttccaacctaaaattattaaatatgcattagataattactgtgttaactattattcaagttcaaatagtggtagttatctataccctgcatctgtttatactaagttaggtctgtaa

SEQ ID NO: 182443 - DNA, 837 bp, Klebsiella oxytoca
atggcaaaagttaactttttcgataagcgtatacttaaaaaattttcagactacacatcaactataagtaccatattttcactttttttgatttttgtagacattccaacagaaaacaaactaacacttggcattatatttttaattattttgttcttgttgtatttcggcatatggtttaaatcaaataatctttcggaagttaatttagatgttgagggcagtattgttactgtaaaagcaggtgatttattcagacaagatggattcaaggtcattgcttttaatgaatattttgacacgcaagttgatgatgttgtcatttctcataactcacttaatggattatatattgataactatttagcagggtccgtatctgatttgaatcatcgtatttctaatcatcagtttgaagaagatgaacggcttgagatcaaccataaaagaaaagagggtaaaacacaaaaatattcgctaggaactatctttgttaataatgattatctattaactgcattttcaaaatttgacgataaaaatagagcttttcttacaatgccggattacttagcatttttaataaatttttgggacaaagttaatcgtatatatgcacaaaaaagtgtctctgttcctatctttggctctggaatcaccagaataaaggaacataaaaatattagcgatgaggatttacttaaaataatgttatggacttttagaataagtgaaatgaggtttaaatttccggcaaaacttactatcgttatccacaaagataagatagataaaataaacttattggatataaaatcagcgagaaatggtctttag

SEQ ID NO: 182444 - DNA, 276 bp, Klebsiella oxytoca
atggaaaacaataccatcaaatgcccgttttgcttcaaagagagtcagcgtggggttcacgtctgtacaggctgtttagcgacggtgttatatggcacctttcccggctggtatgctttcgtgatcatcctgttgtcttttggcatgtcttttctcattggcatgtctacaggtatggcaggagctactatcagcctcccagtaatcgctgttgttggatttgtcgctggtaaggctattttctctgataatgttgtgtttaggcgaaggatgtaa

SEQ ID NO: 182445 - DNA, 870 bp, Klebsiella oxytoca
atggctaattcaggaaaagaatatgaagaacttgtcagagatatccaacgttctttaattaatgcaggaaatgtccctagccttaaaaatataaacattgagaaaaataaaaagatcaaagaccgttcaggtattgacagagaatttgacatatattgggagtttgaaatcggaggccatacctatcgttcagttattgagtgtaaggactattcctcccgggtgtctattgaaaagatagatgcttttatcagcaaaacaaatgatataccgggtttaaacttaatttatgcaacacggacaggatatcagagtggcgcaaagataaaagcagagcaacataacattcaactgcttgttatcagagatcagcaagaacaagactggacggatgaagatggaactccatatttaaagacaatcaactttaatataccattccaaatccctccaaaaatattcagtttcgagttaaatattgatcaggaatggttgaaatcacaaaatacctatacagcacaaatcataggaaatatttttaaaactgaaaagtcagattccattttcatttgtaatgtaaacaacaacgagcgttacagtattcataatctatcgaaactacttcacaaaaaagataataacatgaaatacggagaaaacgcatatactgaagaaattgaaaatggtcatattgaaaacgcagactcaagcattaaaataaaaattaaaggttatagttgtaaatatatgtactacaggccaatagcgaacatttcccaagtcgatttctctgaacaaatcaaggccattgtagaagatttcataacaggaaagaaaaaatgggtattgaaaaatggcattgtaaaataa

SEQ ID NO: 182446 - DNA, 792 bp, Klebsiella oxytoca
ttgctatccatccagaacacgatagccaataccgatcccttctttcttcttcgcttcttccaccatactgttctgattgaagaaggaacaacgctggcaagtatctttctggcaatagaaccgtggaaggcactgttagcagcttatctggacagagatgttggtgcttatatagatgaggttagaaaaccgtctgggccaacgacagggaatattgaatggattgggattgaccgtcgtagctcggtttatcgcgcttacaagcgtcaggatatggaagaaggggaggatttttcgacctattttaatcgcgagcggttcccgactgatgagtttgacatagaaagtagctgtgatgcttccggctttataaaaggagataaagaacgctggagtatcagtggtgatgttcatgagataaagaatctgcctgtaatcctctatagcaaacagacattgatgacttcatcgaaagacggtttgctgaagaaaaacgtatcgggtgtgaagagttccaagcacagttgctttgtttatggcgatacctcgttttctttcagtgaggtaatggaagctatcttcatcagtgggctgttcttctatgcgccaagagacgccgccagtagtcttgatgaactgaaagcgagtttggccggactggaagaagaactgaccgaggtacctgaaacagaatcggttgataatggaatagataaagaacctaccatagttgtagctgaaggtgcttttgattcggccactgctcacatggaaacagaagctgaggagtag

SEQ ID NO: 182447 - DNA, 1821 bp, Klebsiella oxytoca
atgaacgctggagagattggaactgaagccggacgtatttttgaatacaacttaccaagccattggattttccgaagccaagaagatcaaaatgattttggtattgatggagaaattgaactcaaagatggtagtggcaaagctcttggaaaagagagtgttttcaaagttcagattaagggtgaagagaactcaacttttattcatgataatagcttattatcatttaccctgaaaacagagcgtttgagatattactttgaatttaaagtacctgttattttagctgtagtagaaatctcctctgagaaaatattttggctacccttaactaacaatgaaatattaagagaaaaggcatcaaaatctaatcaaaatgaaaccattcaagttcatattccaattgagaatacgttagtaagaaaagatattgcttcagcaaataaaatattagatgctgtcatggattgttgggatcacttgaatattaagggacttaaggattctgttgtcagatatcctatcattagtccgtcgtcactcgataagaaaattgaagatataggtgaagcattatataaagcgtatcaccagcagctggataatcttttatctgaaagaaaatatgactcggtttttgaacgttctaccgaaataagcaattcaccaatagttccagcaaaagatagatttatcgcagtattatattacttgcaagcattccaaatttctccttatactaatatcaagagagaagtttacagagaaaattttcatatttgccagcatttgatactattagccagagagcaaaaaagtcggattcacagattaattgctttaggaaaatcaaggaaagcaaaatttaaggctcagctggatcagcttcatgcaagtcatcattcagtcaatcacttcgaagaaaaatctttagaacgttatattttcaatgatcaaactcaaataatgtatagagattgttgtatctccctacaaaagatcattgagttatgtaatcgtatgacaagagatcagcagtatcacatactctcagatttttttgttgatatctatgcatcaattttaatattcaaaggaatccatgaagcacgaggttctaaggaatccattgattttctagatgattggtatgaaagaatgtcattattagtaatgacatattgtgtattatcaaaagatattgaaaaaattgaaaaattatacttccttactgccaccttactaaaacaaaatcctaaagcaacccaaccccatcggaaaatgattctttcaacttttccagattttgagaaagccctaacagaaatagaaaatcatgttatcagtcttgacagtcaaaaagatttttatgatcttacaactgaagagcaaaaagaatacttcttgagtatggccaaaaatctaggaatggaccctgatgacccacaaggagaacatcatgagttccttaaaattggatttgctaattatgatcccacaaatataatgaaaaactgtgagcatttattcgttcattatcgccccggaggaatatttgcccaatcattgagaatgcactctctcggcgggatgcatctcttaatctgcttaaaacacggacatgctcaaggaacaggaaatttattaagtcaattatatgacagtactggcagttatgattttggtaatagcttcaaacaatcaaattgtgataaatgcgcggattgtaaaccaagaaaggagagttgggcatggagtctcaaatggtatttaaaagaagttgaacatcataaaactcttcttaagaagtatagattctaa

SEQ ID NO: 182448 - DNA, 1446 bp, Klebsiella oxytoca
ttgaaagcaactacggagcctcaaaaacaacgattaattgctacattgcttagtgatttagcagaagataatttggctatttttgcaggtgcgggcctgtccgcccccgcaggctttgtaagctggactgaattactccgtcctatagctgaagatcttgaacttgaaattgaaaaagaaacagatttagttgctttagctcaatatcactgcaattcaaactcagcaaaccgaggtaaactcaatcagctcctgataaataagctatctgatgatgttgaaataactgcaaaccataaaattcttgcaagacttccaatatctacatattggacaactaactacgataaacttattgagaaatcattaactgaagcagggaaaatacctgatacaaaatatcgtgtcaaacaactgagctttacaaaacggggccgagatgctgttgtttacaaaatgcacggagatattgagaatccagatgaagcagtgctcacgaaagatgattacgagagttatcatgtcaagatgcagccgtttattaatgctttaagcggtgatctcgtctcaaagacatttttatttttaggattcagttttacagatccgaaccttgattatattcttagcagagtacggattgcttactcaaatgatcaaaggcagcattattgcattcagaaacttgtggcctcagctgccggggaatctcaagccgacacagaatatagaaaacgtaaacaagagctctttattcaagacttgcttcgatttggaataaaaacaatacttgtatctgactattcagaaataacagatattcttcataaactggaatgggcatatagaagaaaaacaatttttttatctggatcggcacatgagtatagtcgatggaaatcagatgaagcccaacactttatttactctttgtcgaaagatatagctgctttaggattccgaatagtatctggatttgggttaggcgttggtagctccgttattaccggtgtattagaaaatgtatatatgagcggtaggcgtttagactctgatcagttaatattaagaccttttccacagtatgaagttggtaaacgacctatttcagaaatatggaatgaatatcgtacagatatgatttcgcatgctgggatagcgatttttgtttttggtaataaaataaaagatggcaatgttgttatcgctgatggtttaattaaagagtttgaaatagcaaaaaataacggacttttgttaatacctgtaggcgcaactgaatatgcgacaagagaaatttataataaactttctcgggatggatactttgatagtgctgaattccctaaagagtttaaagaacacataaataaaatttctgatcaaaactcagatctggaaacgattaagggtgttttaatcgacttacttagagcattgaaataa

SEQ ID NO: 182449 - DNA, 501 bp, Klebsiella oxytoca
atgactaaacgtaattgcttctacagttttcattatataccagataattggcgtgctgccacagttcgtagtatcggagccattgagggtaatagccctacttcagataataactgggaaacagttaaaaaaggcggagaggctgcgataaaaaaatggattgcagacgaaatgtatggtaaatcatgcattgttgtgcttgttggtagcgatacagccaatcgcaaatggatcaatcatgaaatcattaaagggtgggatgacggaaaaggtgtcgtaggcatttatattcatggcctaaaagatagcggtggaaatacctctactaaaggtgataatccttttgattatattgggtatggtaatacagggaaaaagctttctactatcgtgaaatgctataatcccacgggctctacaagccaagaaaagtacaattggataaaagagcatctagcaaatgctgttgaagaagcaattacaataagaaaaaataactag

SEQ ID NO: 182450 - DNA, 1479 bp, Klebsiella oxytoca
atgaaagggaatgtggctaaaacagggagaacatttaaaaatagggtctattatatattaaaagatgatcacagttttatttgtagcaatatgtcaagtgattataataatgttagtgatttaactgatgaatttaaaagtgtaagcagctttagacaggatataaaaaaacctgtttttcatgcgtttttatctcttccaaaaggtgatcatttaacagatgaacaatggcaagagatagcaaaagactatttgaaagaaatgaatattgatatagaaaaacatcaatatatttgtgtgcgtcataatgatacagatcaagaccatatccatatagtagccaaccgcatcggtttaggcggttccgtatggcatggtcagcactcagcatttaaaacaatagccgcttgtgaacgtttagagaagaagcacggcttaactattacgaatggcttaaaagggcagaaatcagacgtatcggccccaaccaaagcagaaattgaaatggcattgagtacaggtgagaaaccagcccgtttagtgcttcaagcctctctacaagcggctatggcaggaaaaccagatttaggtacttttgtagaaagtctgcaggctgtaggcatagagccggcttttaacgtcgcttctactggcaacgtcgccggagtgtcatttggtatcaaaaataatgaaaaaaacattttcttcaagggatcatctcttggtaaaaaattcagttggaacacaattaaggcaaaggtgaaatatgacaaaaatagagatgatgaactcattagaagattcgcagcaagaaaaacagatgacgaaaatagtattggacgattacctattgaaccaaatatcaatgacgatagaaccattatcagaatcgatgatgattctttcggagtcagtcagcatagcattaattcagacgcaggaagtattagagaagacagagaaaacggcttcaaagatatcatcattactaaatctgtcaaggaatatgatagacaaacaaatagacgatttagaaatacaaaacagaaaaatacacaaatactcaacggagttaaaaaacaatacaatcaaaaatcaaacaaaattaataatcaaggtggcttcagtcgttggtgtaataaatatgatggtagttatattaataggatacttgatcatgcagaaacagctaccacagccacaaataactttagactcaaaaaacgtagcaacatcaatagtggagcaactaagatcgaagaaatgagaaaacgattaggaataagtaaaaccaatatagtccctaaaaataaaggaatagtcattcatgaggatattaaaaaacagctagttcgtataactgaatatgaaagtatatttaaaatgaaattgaaatcaagcttgaaaaaaggcacgttaaaactacaacaagaagacgcagagcaggttgctaaacataaaatctctaaaccaaaataa

SEQ ID NO: 182451 - DNA, 270 bp, Klebsiella oxytoca
atgattatggaatatgaaatgaaacttaacatattagcgcgttttttctattatcttgaacaagataaagatgtatattttgattactcaagctatgacgaacaatgcttatgttattttgttgctaatagatacattaacgaaaataaagctgatgagcttatacaagcattgatagatactaatgacgatgattatattaaagctataagagattatgttcagtatacagctttgaatgaaatgagaaagaaatatgaaaacagatag

SEQ ID NO: 182452 - DNA, 174 bp, Klebsiella oxytoca
atgattatagcaatagcaatgatgcttctttgtattcttttaggtgtgtttatgatccgtagttgtatgggtaaaacaaacacttcaagcgaagcaacgcaagcaatatcagatgttagaaaaataatagataaaaaagaacttataaaatacaaaaagaggcatcaacaatga

SEQ ID NO: 182453 - DNA, 303 bp, Klebsiella oxytoca
atgtcgcacgattttagtattgaaagaaaaaaagataaaaaagtagctttcttttttggttatgctgacgctgttttttataagagttttcattgtgaaaagtataataatcatttttcaggtagcaatgaaggtaaaacaataagtaaaaaaggagcagaaagcgcattaaataaaataataaatagcgaagaagtaaagaactatccagatcctgagcgtatcaatgacattaaagatttttataataatgttgttttaaaatcaaaagaagaagataagttttatattcattttagttga

SEQ ID NO: 182454 - DNA, 276 bp, Klebsiella oxytoca
atggaaaacaacacaatcaaatgccctttttgcctaaaagaaagccaaaaaggtgttcaggtatgcacaggctgccaagcgtcagttctgtatggaacatatcccggttggtatgcggcggtgatcatcctgttagcttttggtctgtcagtgctgattggaatgtctactggcatggcaggagctacaattagcttaccaataatagctattgtcggttttgtcgcgggtaaggcaattttctcagacaacattatcttcagaagaagaatgtaa

SEQ ID NO: 182455 - DNA, 288 bp, Klebsiella oxytoca
atgcgtaaacttatgatggtggcagttttagtgacgctattgtctggttgtggcgatgatggcatctatggcaactacgttaatcaacaatacggtgtcaggcttgatgttcagaaagatgtgatcaagttcagaaatggcgtttttactgttaaaagctgggatgaaagcaagaaacccatctatatagccaaaacgcaaaacaaagatcttggctcttggacttttaaaatcgaaaaagtcaaagatggcgtcgtctatcaaggtgctgtttttaaaaggaactga

SEQ ID NO: 182456 - DNA, 846 bp, Klebsiella oxytoca
atgtatttaaaacaagatatatataatgcagataaatttaaaagtcaaattcaaaaatacgcattaagcacagatgattttaataatggtgtgtatcgaaaccctaaagaaaaggcattgctaaagaaatatattggatttaataatcgttctttcattaacggtcttgtattcgatgtagaccacgaatacggcgctattgcttgggatctagctgatttgccgaaacctaatataatcatacagaataccagaaatggccatgcacacttgctgtatgctttaaaaaatccagttcttaaaacagactcggcaagaataaaacccttgaaacttgcgtccattgttcaatgtggttttatagaaagattagatgctgataaggcttatgctgatatattaataaaaaacccgttaaatgaagctgaatggcgcacaacgtgggctgtcaatgaaacctatgatttaacttacttgtctgagtttgtgcctgaagttcttacgacgaaaaatattaaaagcaaaagtgaaatatatggtttaggtcgcaacgttaatttatttgaagatctaagaataatagcttataaagaagttttgaaatataaagcaaataaaacatataatgatttttatcttgatatgttttcaaaagctacaatactgaatgattacagtaataataataatccattgacatacagtgaaataaaacagattaataccagtatttgtaaatggacgtggagaaactttacggctgaaagattttcttcaatccaatcagcaagagccaaaaaaacaagaaaatcaaaatcattaataaaatttttggagaatttatga

SEQ ID NO: 182457 - DNA, 276 bp, Klebsiella oxytoca
atgattataaagaaaagaatgaaaagaccaatgacacaaaaagcaatggcagaaaagtttggcgtatctgtttctactgtgaaaaactatatatcccttcctcgtgaagactatttaaaagaagcagaagaaaaacgccttattgcatttaatctaagaacatccggtttgaaatggaaagaagtagctgaaagaatgaatacaaccgaatatagtgcgatagcttattatagaagatatttatcattacagaagaaacaatataagccgcgctag

SEQ ID NO: 182458 - DNA, 228 bp, Klebsiella oxytoca
atgaaaacaaatattgaaaaatgcacaaagaaaatggattcatttgattggggaactttagatattcttgaagaatatttatacaatgattggttgcttgaatgctatgataaaggtcctttttatatcatacttaatacgtacaaaaaaagtaatcacgaaacgcaggaagcattaaagcattacgctctttttagaaagagaaagatacaagcagaagagtggtaa

SEQ ID NO: 182459 - DNA, 426 bp, Klebsiella oxytoca
atgtttgaaaataatactggcgtctacaattacaaaaataaaaacattgatttaaaatccaataacgctaatttatatagagataaactaaggcaacactgtgttagtgttagacttaataaagaggaattacaatttttaaatgaaaaacgaggaaacataagaaaaggtgaatggcttcgaaagagctttctgaacacaacccccaccctcattcctccaatcaatctcgatgcctggaaagaattagggaagatatcgcaaaacctaaataagctcaatatccatcttgacaacaagagtgatggaagctgtttgacaaatacagaactttttgccgttagacgtcaaatctctgagcttcgtttgcatctcataaatattgatctttggaggatatctgatgaagggaatgcagaagattaa

SEQ ID NO: 182460 - DNA, 504 bp, Klebsiella oxytoca
atgcgctcaaccgcgagattgaagcccttatttgttgccctctttttatgcgccagtctggcaagctgcgataaaaatgaagataaaacgtttgtgcagaagattgctgaaagtgatgccccagaacaacaccagaccttcacgaacaatcttaacggcgttgatgtaaaaatcacctattactataaaggcgatgtcatcctgcgccagacggcagaaaacaccctgccctatgatgttcttgccgccaaaaataaagaacatgccagaatgatcatcgagcaaattgccggggcttatcgggaaactgagggtgtcagcgatgttattgagtattttgacgatcgcgccagcgaacatatgacgattgatttcagcaaagcaaaaatcagcgagctgtgtaaactgccgggaataaacatcactgattgttcgggaaaatatctctcgatggcgcgatctgaacgcctcattctcaaggatggattcaaagcggttgagtag

SEQ ID NO: 182461 - DNA, 3561 bp, Klebsiella oxytoca
atgacaaccgctcaaaatcagaactatggaatgcaaaacgctgccgtaggggatcaccgcccgtggcttgccgatgatgcgtccattgcgcttaccgatcagattaaccactttagccgttgccgccgcgatcggcctcgtccccccggccatgcacgttctgaagatcagctctggcaagatatcgccgcgagtaaaaaggcttacaacaccttagcggcatacgcatcctgcccaccagactggcagttcgcttttgctgaacttgcgctgcgtctcaaggcgagtcgacgcgaaggcagcctgctttccgaagcagcgttactctggcatataggccactttgagccagatttaatggatagcttcgttgcccgccacggcctggaaacgacggtggaaattgtttgttgctccctgcaactgtggaaaaaatatagcgataccgcatgcaaatatatcctcacgcgggatattcctcttgatgaggaaaacgctctccccaactggcacccacgcctgtgcggctatctttccacggcgccagaagaagagtggcaacgctgcgcaaacaaactgattgccgctattccaacactctctcccgttatgcagcctttaattgcactgctactgccggagcgtacggatatcgccaacgacatggcgctgcgtttcgtcgggcaaaatatcccggccatggggagattaaagtcagtggttacggacgacaatgcaatagcggcattgcgccactatccgttcctcccggcaaataactttggctatatcagcttcgcggcaacgcaaatggccgaccggggcataaagggaatgagccgcaccctcgacgtcctgaaggaagaatatgcggcggaactctgcgagatacttccgcagctccacgttgccgactatctcggtaaatggctttggaaagttaaccatcccgatgcgttgaagctgttgatcttaagcgctggcgacaaaaacaagcgtctggaatacctcagcaaagccagccagaggcatccccacgccgctatcgcggcttatgcagaactgctgaaggaacaagaaaaccccatctggcgtcagacgctaacgacgcttatcgccgccgcgccagaacgagcagaacaggtcttaccctggataagcgagcaggcagtcgaagtactcgccagctgtcgtcagcaagagacgcagatgacatgcgccagttccgactcgctgccccaggtgctggtcacgccgccgtggctggcgaaaacaactaaagccgccgtccccgcgtttgatctgcccacgcttgccgtatccgcggttgtcgcccctacccgaaaaatgctcgagagtaacggtgaatatcggcagatagcccaacgacaggcaacacggcaaacgatgtttatcgatttaccgccgctggaaaaaagaagctgggagcccatgctcctgccacaaacgccagagcagcaaatcctgtggcgtttaggctttgagaactggcgaaaaacgggagaagagcaatatgaaaaattgcccatcccacaaagcgccgtcgatgcgctactgcgtgacgattttccgacgcttaaagccgagcgagcaaaatattgcggggacaggcgtacctcctggaacctggcagaactttgttatctccccggtgaacaagctatctcgctgctgaatcagatcattaacgaaacggactattatggtgaatctgagattctgacgatattcggccctgccgccgtcccggcttttttgacctgcctgaaccgagaccccaggcgactatggcacttcactgcctcctgcggcaccagcgaactggcgctgccgatggcgcggttattgcgtaaaaaaacgcagcacgccgaaagccgcgactggctgttaaaataccccgaacatgccgccgccgggctgcttcctgttgcgttgggcaaaacaaaaaaagatcgcgaagacgcccggctggggctccgcctgttggcagaaaacggcaggcgggcgctgattgaagaagtggcgcagcgctatcatcaacccgcagtctcggcggcattaaccgcgctgctgaatgatattacacagattaaatacccctcgactacagctccgctaccgggattctggcagcccacgctgtggcgcagaccgcagctcaaaaccaacggtctaccgctgggggacgatgccctgtgccatctgggcaccctgctcaacttcccgcgtgaagtcgctatccatggcggcctgatgcaggtaaaagaggcctgtaccccggaaacgctggccgccttcgcctgggatctgtacgaggcctgggaagccgctggcgccccgtcaaaagagaactggggctttaccgcgctgggtattctcggcgatgacaataccgctcgggacttaacgcgattcatccgcgcctggcctggagaatcccgacataaacgcgccattacagggctcgacattctggctgaaatcggcagcgatatcgccctgatgcagctgaacggcatcgcgcagaaaataaaatttaaggcgcttcaggaagccgcgcgggaaaaaatcaaacagattgccgacaagcgcgaactgaccattgccgagctggaagaccgcctcgccccggatctcggactggacgacaacggcactctggttctcgacttcggcccccgccgctttacagtcagcttcgatgaagctctgaaaccctttgtgtgcgatgaaagcggccgacgcctgaaagatttgccgaagcccggcaaaagcgacgatgaaccgcgggctgcggaggccgtcagtcgttacagacagttgaaaaaagatgtccgtacggtagccagccagcagatcatgcggcttgaatcagccatgtgcctgcgccgccgctggaccgccgaacagttccgcctgttcctcgtcgaccatccgctggtgcgccatctcacccgccgcctggtctggggagtctatagccaggaaaacgtcctgctggcctgcttccgcgtcgccgaagataacagctacagcgatgcagaagataacctgttcagcctgcctgaagggcaaatcggccttccgcacgtgctggaaatctccgcggaagacgccgccgccttcggccagctgtatgccgactatgaactactgccgccgttccgccagctcgatcgcaaccactatcgcctgactgaaagcgaaaaccgggccacagaattaacgcgctggcgcggacgccagtgccaggccgggcgcatcgtcggactggagcgcaaaggctggcagcgaatagaagatggcggcagcatctgcggcatgttcaaacccgccgccagcggcgatattgtgctggaagtggaacctttttcgctgctgtatggagaaaccacctacgacgaactcatcccgttcgagacagtgaaaatcgttaccaaaggcgatattgactacggcaaaccgacctttgctttcgcaacgcttgacgctatcgccgccagcgaatttatcaacgatatcgaatcgctattcgattaa

SEQ ID NO: 182462 - DNA, 3759 bp, Klebsiella oxytoca
atgaaaaagtttatttatcaggatgaaaaatcacataagttctgggcggttgagcagcaggataacgaactgcatctgaggtgggggaaggtgggtaccagcggccagaagcagattaaaacctttgccgacgcggcagcggccagtaaggccgggcagaagctgattaatgagaaggctaaaaaaggttacgtcgaaaatagcgcggcggaggccagcatgccggctccgcagcaaactgctgccagcgctggcagcccgccgtggctaaaggatgacgaaccgattattctcgatccagattacgagaccaatgcctacagtaatcgccgttttactgatgaaccgctcaagccagttaatgaagactgcacgctgtgggaaatgcttaaagaaagtgagcactggacccctttctttctcacctgtctgcaacatttcgatgcgagcacttgccgtcgggaatggcagcaggcactacaggaagcaatgcgacgaatcaaacagcagcagtcagaaggatcgctactctccgataccattctgactctcgcaagatttgtcctccattatcctatccgtattgatgtctggctggacggtatcgttcaacagcggggggtggaatacgcagtcgacttagtcattgccttacagcaagttcagatgaccgatcaaacaaacagcgatcccgtcacaaacaaggcgattgaggatggttatgagcgactcttaatgattctgcgaaatggccagtcagcgcaaacgtcgccgttagttgctattaccctgagtcacaatattaccgacctgcgttttgagcatggttttagcaaaatcgacttgcatttgcgtaaacacctgtcgcaggccgatgcgaccacctggcagcgctgtgccgataaactgatcgccgccctgccatcgattgccccacgtcgccgcccgcttgtcgcctttctgctgccggaaaagcccgaaatcgccaatcggctggcgctcgaactggcgcctgataacgacttccccgagctggagtggttgaatatcgtcgccaccgatccgcaggcggtgcaacaactggcaagattccggcaactgaatctattcacccactaccgtacgagcgagcgttgcattgagacgttgctgcgggaacagggccttgcggggctatcacgactaacgcctctggtacatgaataccggattaagcgcgcgttagttgaagttaatcaccctcaggtcatgacgctgcttatgatggataaaaatgccagcgacgctgaccatctggactcttttacaaagaaatacccggaagccgccctttacgcgctgactcaggggctggtcaatggtaaaaacgcgatacatttacgcctgctggaacagatcgttctgggcaacccgcaggcgctggaaagcgcggggccctggctgacggcggagcaacaacagctcctgttcaaccactttccgcagctggtcgccacggaggaaatcgcctccccggacgaccagcccccggttctgcgctccccaccgtggctggcgaaaaagaaaaaaactgccgctgtggcgttgacgcttcaagtgctgccgctcgaatcaatggggcctgagcctgagccgctgcaggaagaggaagtccctacaacggcggaagtcctacgctatcttgatttcgagagtttctattttgaccgggataaccccgatccggaaagatttgactgcaaatggggcgtcagcaaaacggccatctctctgctggaaaaagaggattacgaatcgttacttaacacccggcaaaagtacaattacgaaagctacattacgctacatatgtcaatcctggccagactaccagaagagaaagcgctctctatctggaacgcgatgacgcacctgcatcttaccgggattgatgaagtggttcaccgctttggtctgccgacgctgccaggcctgctgcgttacgctcgcatagccccaaaagaggccgttcctctggcggcaatgttcgccgctagcgaagcggctccgctgatggcccgcgctttctgccagctcaaatccctacgcgatatcgccgaacgctggctgctcacttacccggagcacgctattaccggcctgctacccgcggcgctgggcaaatcgagtaaagagcagggagatgcgcggatgactctgcgctttcttgtcagttccggccatctgccgctgatggaacaggtcgcgcgacgctataaccaaccggaagtgatgacagcactgggcgaaatgctggccgccgacccgctcgataactatccgctgaaaatcgctaaactccccgaatggtgtactccagaggtctggcatcgcccgatactgcacaacggaaaagcgcttagcgatgatgccatccgccatctctgcactatgcttgccttcccgcgcgaggagacgctctaccccggcatcgttcaggtgcaggaagcctgtacgccacggtcgttggccgattttgcctgggatctgtttcagagctgggaaatcgtcagcggttccgccaaagataactggggttttaccgcgctgggtattttcggcaacgatgacaccgtacgccgccttacgccgctcatccgcgcctggccgggggaatctcagcataaacgcgccaccgtcgggctggacattcttgccgccatcggcagcgatatcgccctgatgcagctgaatggcattgcactgaagataaaatttaaggcacttcaggaagccgcgcgggaaaaaatcaaacagattgccgacaagcgcgaactcaccattgccgaactggaagaccgtctcgccccagatttaggtctggatgacagcggtaccctccccctcgacttcggcccccgccgctttaccctcggcttcgatgaagccctgaaaccctttgtgcgcgatgaaagcggtcgccgcctgaaagatttgccgaagcccggcaaaagcgacaatgaaccgcgggcagcggaggccgtcagtcgttacaggcagttgaaaaaagacgtccgcacggtagccagccagcagatcatgcggcttgaatcagcgatgtgcctgcgccgccgctggaccgccgaacagttccgcctgttcctcgtcgaccatccgctggtgcgccatctcacccgccgcctggtctggggagtctatagccaggaaaacgtcctgctggcctgcttccgcatcgccgaagataacagctacagtgacgcgcaagataacccaatcaacctgcctgaggggcaaatcggccttccgcacgtgctggaaatctccgcggaagacgccgccgctttcggccagctgtttgccgactatgaactgctaccaccgttccgccagctcgatcgcaacgcctaccgttttagccaggcagaatccgaaactttcgacctccagcgttgggcgggacgtaaagccctcagcggacgagtggccgggctggtcagtaaaggctggcaacggggtgaagttcgcgatgctggcggggtctataccttctataaacccgttgatggtggctacgtagaactcgaagtgtttccgggatttacggtaggtttatcggtggatatggtcagcaagacccagggaataagccatattcgtctgtataaagcagggcaaagaaaaatgatatatcccttctcttcactcgataagatagccgccagcgaactgattaacgatatcgaatcgctattcgattaa

SEQ ID NO: 182463 - DNA, 2100 bp, Klebsiella oxytoca
atgaaagctacagaagcccgcttacttgattttcttaaacgctcacagcaattcgttatcccaatctatcaacgcacctattcatggtctaagcagcagtgtcttcagctttgggacgatattattcgtgccggacagcgcgatgatatctctgcacattttattggctccgttgtttatatcgaacaggggctgtatcaggtgtcggggatttctccgttgctggtcattgatggtcagcagcgtctgaccaccgcaatgctgctgctagaagcgctatcccgtcatcttggcgatgaagagctgattgacggcttctccgcgatgaaattacgtaattactatttgctcaacccttatgaatccggggagagaggctataagctgctgctgacggagaccgataaagacagcctgctggcgctgattaagcaaaaaccgctgcctgaaaacggttcgcagcgtatcgcggccaattttgaattcttcgatgagcaaatcagtaaattaggcgatgacctgattccgctgtgtcgtggattatctaagctattgattgtcgatgtggcgctcaatcgcgggcaggacaacccgcagctgatctttgaaagcatgaactcaacggggaaagcgctcagccaggccgatttagttcgcaactttattctgatggggctggagccggagcatcagacgcggctgtatgatgaccactggcggccgatggaaattgccttcgggcagaaaggctacagtgaatatttcgatagctttatgcgccattatctgacggtcaaaacgggggatattccccgtactgatgaagtttatgaagcctttaagctgcatgcgcgtagcctgcctgtcgccgaagcgggggtcgatgcgctggtggcggatattcaacgctatgcggaatatttttgtgcgatggcgttgggcaaagagagcgataaacctctcgcggctgcgtttcaggatttgcgcgagttaaaggtcgatgttgcctatccattcctgctggcgatgtattacgattaccgtgagggtgatttattgcctgacgatttcctgagtgcaataaggcttattgagtcgtatgttttccgccgcgcggtgtgcgccattcccactaactcgctaaacaaaaccttcgccacgttttataaggtattaaataaagaaaactatctggaaagtattcaggcgcatttactggaactgccgagctaccgacgttttccggatgatgatgaattcagccttaaattaaaagagcgcgatctgtataacttccgcagccgcagttactggctgcgtcgtctggaaaattatcagcgtaaagagcgcgtggcggtggatgaatatacgattgaacacattatgccgcagaatgaaaatctgccggcaaaatggcgtgaagaattgggcagcgactggcagcggatacataaagaacggctgcatacgctggggaatctgacgttaaccggctataactcgcgttacagtgataaagcctttgtggaaaaacgcgacattgctggcggtttcaaggaaagcccactgcatttaaacgccgggttagggcagtgcgagaaatgggatgaagcggcaatagatgcgcgggccgagcgtctggcgaagcgggccgttcaggtctggtgcgcgcctgcgctgagtgaagaggtgctgagtcagtatcgtcagcagcctgaaaaaaccatgaactacagtctgtcggactttcatcaactggaagttggttcgcacagccggatgctgtttgaccagctggcgccggaaattttaaagctggatgcaagcatcacccaggaggtgctgaagctgtatgtcgccttcaaggcggagaccaattttgtcgacgtggtaccgcagaaaagccgactgcgcctgtcgctgaatatgccgttccatgagctggttgacccgaaagggatggcgaaagacgtaacggatcttggccgctggggcaatggtgatgtagaagtcggtttcagcgatattgctcagctgccgtatgtgatggggctgatccgccaggcgtttgaaaaacagatggatagcgcggcggcgtag

SEQ ID NO: 182464 - DNA, 1770 bp, Klebsiella oxytoca
atggtggtggaaaaactgattgtcgaccatatcgatacctggaccacggcgctgcaaacccgctccaccgccgggcgcggcagctcgggtaagattgacctgtacggcattaagaagctgcgcgagctgattctggagctggcggtacgcggcaagctggtgccgcaggatccgaacgatgaaccggcgtcggtgctgctggagcgtattgcggcggaaaaggccgagctgttgaagcaggggaaaattaaaaagcagaagccgctgccggagattagcgaggaggagaaaccgtttgagctgccggtggggtgggagtggacaacactcaatactcttgcagaaataaatcccaaaatagatgtatctgatgatgagcaagacatatcttttgttccgatgcctctcatatcaacaaaatttgacgggtctcatgattttgaagtcagaaaatggaaagagataaaaaaaggttatacccactttgccaatggtgatatagccattgcaaaaattacaccttgctttgaaaatagcaaagcagcaatattttctggattaaaaaataatgtcggtgttggaacaacagaattacatgtcgcgcgcccgtacagccaggcagttaatcagcaatatcttcttttaaactttaaatcacctggttttcttaaaaccggtgaatctcagatgacaggctccgcaggccagaagcgtgtgcctagaaatttctttgaaaactatccgctaccattccctccattacaagaacaagaacgaatagtaaacaattttactcaattgatgatcctctgcgacgaactggaacagcactcactggccagtctggacgcccatcaacagctggttgaaaccctgctaaccacgctaactgacagccagaacgccgatgaactggccgaaaactggtcgcgtatcagcgagcatttcgacacgctgtttaccaccgaagccagcattgatgccttaaaacagaccattctgcaactggcggtgatgggcaaactggtgccgcaggacccgaacgatgaaccggcctctgaactgctcaaacgtattgcgcaggaaaaagcgcaactggtgaaagacggaaaaattaaaaagcaaaaaccgttgccaccgattagcgatgaggaaaaaccgtttgaattgccagatgggtgggaatggtgccaagttaatgatataggtgatttaaagcttggacggcaacgatccccgaaagatcaccacggcccatatatgatcccttacctacgggttgcaaatgttcatgataatgaaattcgaactgatgatatcaagcttatgaactttacaccggaggaacaaactctatactcactcaaatttggtgatattttgctaaatgaaggacagagtttagaattggtagggcgttcagcaattttcagagatgaaatagcacaagtatgcttccaaaacactttaatccgtttgagagcaaatgagtcagttagcaatgaatatattcttgaatatttccgacattgcctctattcaggaagatttcaaaaagcagcaacacaaacaacaaatatagctcatttgagcatatcaagactcgcaccgatcgaattcccacttcctccttataaagagcaagttagaattgtgaataaaattaaaaaattagagattttatgtgaaaatataaaagcaaaactaaaatccgcccaacaaacccagctccacctggcagacgccctcaccgacgccgccatcaattaa

SEQ ID NO: 182465 - DNA, 789 bp, Klebsiella oxytoca
atggaaagcaacttaaaaaaattttcgaccaatgcattaaaaattattccaggatatgatttcctctcggaaatgtatatattcattaaacacccggaaatatatgacggcacccatgaatatgctccactggtaaattctggcgctaatttattaaaatcaacattaattgtaggctcattgatagctgcattcagttttctttcaataaaattagctcccataactagctttaaattaatattcaatcaactatattggtacattcttttgttaatccaacctataaagtttggagtctttttctggctgtgcatgtctacagcaactcgatttaaaaaaaatgtgtgtcattgtgtttatttctttcaggtgcttcaaacctacgcggttattaatgtaataatattcttcttgttttgcattgccatcaacagaattttccttactggagattttaacagaccatctggcaacattgatctaatgataggttttatattggcattgcttgttcttacacttacattcagactattaatagctccatcatttcgttacttgtcgatgtattacaaaaaaccatccagtgcaattatccttctcttatcaattagcatctcttattattcagctaatcaaataaaattagcagacggaaagggaatggtgaacaagaaagaattctgcgaattatcttatgatttaaaaataaagccctcacacattaataaaatcgataaaaacctatacctgaatgagtgtataaatatcttctcccagaattaa

SEQ ID NO: 182466 - DNA, 1425 bp, Klebsiella oxytoca
atgctgatagtggtggcggaaacgacccgctctcatcgggctggcgtgtcgccgcaatctggcgccgacgcgcgaaccgggtcgacgctgacgtccatcctggcgccgctggcctttgggtttctgctcgcgttttcctgtctcaccccggctaaggcagcgattgtcgccgataaccatgcgcccggcggccagcaaccgcagatcgccaatagcgccaatggcactccgcaggtcaatattcagacaccgagtggcgcaggcgtttcgcgcaacgtctacagccagtttgacgtcgatgggcgcggcgtggtgctgaataacagccacgccagcacttcaacccaactggccgggatggtcgccggtaacccgaatctggcgaaaggggaagccagagtgatcctcaacgaggtgaatacccgtgatccgagccggctgaatggctatatcgaggttgccgggcagaaagcgcaggtggtgatagctaaccctggcggaattagctgcgacggctgcgggtttatcaatgccaaccgcgcgacgctgacgacaggtcaggtgcagtacagcaacgggcagattagcggttacgatgtcaatcgcggcgaaattatcgtacagggaggcgggcttgatgcgagctcggtagacagcaccgacctgctcgcccgcgcggtgaaaatcaacgccggggtttgggcgcaggagctaaaggttactgcagggcgtaatcagatcgatgcggcgcacagtctgacgacggcaaaatcatccgacggcagtgcggcgccagcggtggcgatagacgtcagcgcgctaggtgggatgtacgcccataaaattcgtcttgtcggtaccgagcgaggcgtaggcgttcacaatgccggcaatatcggcgcggcggcgggggacgtagcaatcagcgctgatggcgcgctcagcaacagcagcgtgattcagtccgcacagaatctgcaactgtccgttaagggcgatcttcacaatcagggccagttgtacgccggaaaagatagcctggtgacggccagcgcgacgctaaccaatgacggcattatcgccgcgcaaggtgatacgcggattgccgccagcactttgcgtagcgcgcaaaatagcacgctcgcagccggattaaatagcgatggttcttccgccagcagcggcgcgctgacgctgaatagccagacttcgctggcgttgaatggccgcaatatggcggctgggacgctgacggcgcagggcagggcagggcagtggatcttgataacagtcgaacctcgggggcgcggattgtggtcagcgccgcgtccggcgatatcacaacccgagatgcggtggtggcggccagcgaaaaactccagttggccgccagcggcaaactcaaaaaccatagtggcctgttga

SEQ ID NO: 182467 - DNA, 516 bp, Klebsiella oxytoca
atgcaaattatcatgggacttatcggcatggtggtgctgttagccatcgcagtgctcctctccagtaatcgaaaagccatcaacctgcgcaccgtcctcggcgcctggattatccaggtggggatcggcgcgttaattctctacgtgccggccgggcgcacggcgctgctggccatgtctaacggcgttgccaacgtgattgcttacggcaatgaagggatcggctttattttcggcggtctggtttccgacaagatgtttgaggtcttcggcggcggcgggtttgtttttgccctgcgcgtcctgccggtcattgtcttcttctcatcgctgatcgccgtgctttattacctgggcattatgcagtttgtgatccgcatactcggcggggcgctgcgcgcggtactgaaaacctcgcgcacggaatcgctctctgccacggcgaatatttttgttggccagacccgaagcgccgctggtcgtgcgtccttacatcgccaccatgacgcgctctga

SEQ ID NO: 182468 - DNA, 561 bp, Klebsiella oxytoca
atgaaaaaaacaatcgtagctgtaatggtcgctgcttctgcagttctgagtgctcaggcaatggcaaccaacaccgctcaggtaactgtgctgggtgaagtatctgatgcagctaactcttgcgtagtgactccgactggtactctgaacaacggtatcgttcagctgatgaccgtgaccactaccgaagcgaatgctgaagcggctggtgctctgtttaaaactcaggacttcggttttgacgtgaaagactgcgcacagggtagcgccactccggttaccgctgtaaccgtcaatgtgaccggtacgtccaccaacgctaacatcctggacaacaccgcacctggcggcgctaccggtattggtatcggtatccagcgcgtacgtgatgcacaccgcgtaggcttcgacggttctgacctcatgaccgaaagctacactgcggctggcggcactcagctgaagtacaccactggttatgtgaaagtgaacgccgcgactccggttaccgaaggtccggttaaaggtgttgcgacctttactatcgattacaccctctaa

SEQ ID NO: 182469 - DNA, 687 bp, Klebsiella oxytoca
atgttcaggaacttattaaatctcaccgcatcctgtgcattactcctcagtagtattgcccatgctggtattgtgattgaatccacccgctacctctataaagaaggtgcgcgtgaaatcaccgcgcaaatcgaaaataaagatgatattccctatctgattaaatcctgggttgaagcgccagcagggaaaacaccctcttttatggctacccctccgctatttcgtcttgagggtaagcagcagaataccgtgcgtctgttttctaccggaaacgtcaataccccgaacgaccgggaatccatatactattttaacgtgatggctatcccgccggcggacgatgagaaagccagcgccaataccattcaactggcggttcgccaccgcatgcgcctggtttatcgtccaaaagcacttttcgatctttcgccaaacattgaagccaaaaaactcgaatggcggaaagcaggcactaaactgacgattaaaaatccgacaccgtttttcttctatttccaaagtgtccaaattggtggcaaagaagtgaagccagaagtcaactccgtcgccccaatggcgaccaaagaagtaaccttaaaagaaaatatcaatgcatccagcgtcagctggaaagtcgtcaatgattatggcggagcaggatcgctctattcctcatcgctgtaa

SEQ ID NO: 182470 - DNA, 2544 bp, Klebsiella oxytoca
atgccaaataagaataatggattattcaaactatccgcggtctttcttgcaatgcttccggcattgctttctggtttgaataataaagcgcaagcacgtgactttttcgatccctcattcattagctcattgaatggcagcgatccatcaaccacccccgacttatctattttccagacgcagaacgcacaggcgccgggggattatcgggtcgatatcatgtttaatggccgctatctggataccaggacaatgaagtttgtagcgaatagccgtgccaccgggaataatcgagagcccgccctggtgccctgcctgagcctgaaaacgttagcggagtacggcgttcgcgttaaagcctttcccgaactggtcgaggataaaagcggctgcgtcaatctttctgtcatcccggataccaaagcggattttgactttaccgtccagcgcttgaatatatccattcctcaggcggcactatctaccaccgcgcagggatatattccaccggatcagtttgatgatggcatcaacgccctgctggtgaactatcagttcagcggttcaaacgatatgcaggccaatgacgaatattacagcctgaacctgcagtctggcctcaacgttggcccatggcgtatccgtaacctcagcacctggaataaaaataacggcgatggaggggattgggattccgcttatctctatatgcagcgcagcattcgccccatcaacagtaaccttgtgatgggtgagagctcttcactctcaggcatctttgacagcgtaccgtttaccggtattcaactggccaccgatacatcaatgctgccggaaagtatgcgcggctatgcgccgattatccgtggtatcgccaaaaccaacgcccgcgtcttaattaaacaaaacggttaccaagtataccagacctacgtggcgcctggcgcgtttgaaatcactgatatgtatccgagcggcggtagcggcgacctttacgtcaccgtggaagaatccgacggttctaagcaagagtttgtcgtaccgttcgctacgctgccggtaatggtacgtgaagatcagttcgagtatgagattacgtcaggcaaataccgtccttacgatggcggagtcgatgagactacctttacccaggccaccgcgacctacggtgtctccagcagcctgacgctttatggcgggatgcaggccgcatcgcgctaccaggcgctgtcaacaggccttggttataacctcggcgagcttggtgccgcctcggcagacgtcactcaggcctggtcaaaaatgaaagacgacgaaaagacctcaggacagtcatggcgtgtccgttacgggaaaaatattatcgaaaccggtactaacgtgactatcgctggctaccgctattccacccacggatttaatacgctctctgaagtgttggatagctattctaatgatggcaactacactcctcgctcgctgcgcaaccggaccaacctgacgctgaaccaaagcctgggtaaaggtcttggtagcctttcgataagcggattgattgaagattactgggacgataagcgcaccaacaagtcgatcagcgtagggtacaacggcggcttacacaatgtgaactattacctgggttatagctataaccgctatacctggagtggggataactccgggaaagacgcccaggacgatcagcgcatcactttgaccgtaaccgtgccgctgagcaactggctaccgggcacttataccagctatcagttaaccaacagcaatccggggtctaccgatcagtccgtttccatcggtggtaacgcgcttgagaacgacagcctggaatggagcctgcagcaagggtacagcaaccgggaatactacagtggcgatatgcgcgcgacctataacggttcccgcggcagcgttaatgccggctacagttacgatcgcgatagcgaacgcattgactacggagccaacggcagcatccttgcccatgctgatggcatcacactcggtcaggacatcaccgacgccgccgtactggttaaagcgccaggactggataacgtcagactcgctaacgacaacaccatttccactgactatcgtggctacgccatcgttccatacgttacgccttaccgtcgtactgatattacgctggacagcaccacgcttggcgaagacatggagcttccggaaaccacgcaaagcgtcgttccgacacgcggcgccatcgtgcgagccaattatgccgggaatatcggccagcgcgcatttgtccatctgaaaacggccagcggccaggacgtgccttatggcgcgatggtcctgctcgccggcgacagcaagtcgcaaccaagcatcgtcagcgacgccggtatggtctatatgtccggcctgcaacagaccgggatccttaacgtccagtggggcaaaagcgccgcgcagcagtgcaatgcttcatttactttaccggccagggaaggcaaagcgtctggcattagtcaaatcgaaacgatttgccgctag

SEQ ID NO: 182471 - DNA, 1032 bp, Klebsiella oxytoca
atgaaacggatatttatcctaataacgttactaatgctaggcagcgaagttgccgcaaaatgttcatatactggtgacattcagcggcaagctattacactgaataatataaaaatcccaaccgacccttccattcctgtagggagcattctttatacccgcaagattggaaccagtgcatacaaaagatttgaatgtaacaaagcgactaatgatcaatacattattaatattagtgcaccagaggtagcaggggttaccggccttcagggagggaaagtctatgagacagggatcgacggaattggtttccaggtatcggatctcttacgtagtaaaaatggttcagtagttgtaggtgaagcaggttcgacgcttgtaccaatttccaaatcttcggaaaacaattatcaatttcttactatctggttaatcaaaacaaaaaacgttattgatacatcaggcagcggggccaatccttctgtttctttttctgttggaaatccggtgactaatccgatcgctaatgatcgtttattatatatattaacaaaaatagaatttaagaatataaattatcgcaccacctcatgcaatacttccactccgcagtcacaggtcacgctgaaccgtatcgataagagtaagttgatgtcactttcccgtggggcaaaaacaccatccgaaaagaatatcgttatgaatatcaactgtccaacatcatcgttaggcaataccgttacctactggtttaatcctattagcggagtgagtacttctggtgatggtatagtagataatatgatatctggtgcgacagcggcaaataatgtgggaattatttttaaactagccgggagcccagttattttctatgatatggataaatataattatcaaatctcaaaaaacagcgatctgtcaaagactataaacctgacagcagattactatcgtgcaagtgatagtagtagcgatgttacccttggtagcgtcaaagcaatgttagaggtcgttatccaggaagattaa

SEQ ID NO: 182472 - DNA, 366 bp, Klebsiella oxytoca
atgaaagaattaactgtatttgaaatggaagagatctctggtggctattcttgggatttttcttccttaggctctgcgcttacttctattgcatcaaatggcgttgaggccgttgccagcgcctttttcggtggagctatgtacggaatgatgggttctatcattggcggcgttaatggcggcaatggtggtggtctgttaggttttggtactctcggtatggctataggcggagcctgggggttggtagtaggtgcaattggtggtgcaattgccggcgttacgattggctgggacgctactaacgaaatgatcacagaatttgtcgaaggtgcggcgaacggtaccttcaaactttggcgttaa

SEQ ID NO: 182473 - DNA, 1290 bp, Klebsiella oxytoca
atgtcaaaaaatctctatcgcaaggaagcgattgaatacaaaaggcatcactggaaagggaaagccttgttactcgcaggcttacctgcctggttaattgcgtcattatcagctttatttctcattgcacttatctgcgcattgatattttgcaaattcacccaacgtgtagatgttaatggcgaagtgattactctcccgcattctattaacgtctttgctcctcaacaaggatttatcgttaagcaattcgtcaaaattggtgacgttgtagaaaaaaaccaaccactctatgaaattgatgtatcccgcaacaccaccagtggaaatgtgagtgcagcacaaatagaagccatcaaggagaaaattgtcaattctgagaaaatcatcaaaaagttgatagaaaacaaaaaacaaacattaaatgcgctaaatgagcagttagaaaccaccacaacttccctgaaggaaaccaaccgtatgttggtaaacgcccaggtaggtctgaaaaaaatgcacgtaaatctttcaagctatgataaatacctgagagacggacttattactaaagatcaatataactatcagcattcgttgtattttcagcagcagagtacctatcagtctttggttagccaaaagatgcaactggaatcgcaaatcactcagcttaacagtgacaaaatcactaaagcagcagattttgacaaccaaatttccagtcagtacaaccaatccaatgattttaaaaatcagctagtcgaatcgaatgccaacggaaatattattatcaaatccacaagcactggtagaatagaatctttatctgcaacacagggacaaacagttgataatggtagtagtctggcgcagataaaaccgactggcgacgttgagtattttctcatcctttggttaccaaacaacaccatcccttatttaaaaacaggggacaccatcaatattcgctacgatgcattcccttccgataaatttgggcaattccctggggaaattatatctatatcctcaatgccggcatctcgccaggagatgtctgaatatactaacgtcagtaacggtggtaatcagcagcaagaactggcgctgtataaagcaattgtcaaaattaaagacaaacagttcgaatatgacggaaaaaaactaagcctgtccaacgggcttaaagcacaagccgtcgtcttccttgaagaacgccctctctatatgtggatgtttaccccggtttataagataaagcaaagcgtgagtggaccgattcatgactaa

SEQ ID NO: 182474 - DNA, 357 bp, Klebsiella oxytoca
atgaaatcgttgcatgaacttcttattctgaatcatttttattactgctttcttctggctattaaacttaacaaatgcaatcttccctctgtgaatagtatcaatcagaaagtatttataaaacagtggctttgctctgcgcagaaaaaaagactatttgacaaattggtctatgaagaaattcagtggttacttgaaatcctttcggataaggcaacaacccttcaacaattcgagtttaatattgagctgatttaccatcgctctttcgaaatgattaaagaaaaggaagttatggtgccctctgttagttgtattagtgctaaccgaacggagttgccatttttaccttcataa

SEQ ID NO: 182475 - DNA, 1056 bp, Klebsiella oxytoca
atgaaggcactgaatttgtatggtgtacaggatgtccgctatgaagatgtgcagaagcctgaaattgaaaatgcaaatgatgttctgattaaagtacatactgcgggtatatgtgggtcggatatatcgcgctttggtaaaattggatcatataaccccggtctgacctgggggcacgagttttccggcaccgtagagaatacggggagtgggggcacctcggtaagtaaaggcgatcgcgtcacggcctgtaactgcttcccctgttttcattgtgactactgtaaacagggaaattatgcccgatgtacgcatatgaaggtgctgggaggccaggtcaacggtgcttttgctgaatacattcggatgccagttgagaatgtcctcaagttacccgactctatggactttgcgacagcaagctttattgagccatccagcgtggttgtgcatggcatgcggcaagttgatatcaagcctggtagcagtgtggccattgttgggtgcggtactattggcttacttgccgttcaatgggcaaaaatctgcggagcgggggacgtatttgcttttgataccgacgaagataaactcgcagtagcgacgaaaacaggggcaacggcaaccttctgcgtcaaagatgaaaactatttatcccggttccatgaaatcacctatgacaaaggtgtcgatatcgtttttgaatcatctggtaatgctgcagggatcggctcatccctgcttctggcggcgaaaggcggcgcggtggttctcatgggtatcccgtacggtgatgtcgctttaccccggttgaattttgaaaaaattgttcgtaatgaattgaacgtcattggttcctggaactcgatttctgcaccgtttcctggaaaagaatggcagacatccatccattatctcagttctggaaagattgatgtctctccactgataacccggcaggttcgaatggaagatgttccgtcgcttttgccagatctttataaccgaaaagcgtttttcgttaaggttctgatcaacgtcgaagcgttgccctga

SEQ ID NO: 182476 - DNA, 786 bp, Klebsiella oxytoca
gtggctcaaaaatggttacaacgaatcttacttgtcaatgatgacggtattgacgcgccgggaattaaattgcttgaggatgtggcacaacagcttgccgatgaagtctgggtcgtggcgcctgcaactgataaaagcggcgtggctaactctgttagcctcagagaaccggttcgagtggaaccgcggggtgagcgccgatatgccgtgcatggtactccggctgattgtgtcacgatggctgtccagcatttgatgaaggagcaacttccgcaactgatactgtcaggcattaacaatggttccaatatcggttttgaaaccgttctttctggaactgtcggagcggccatcaccggcctcttgcttggcgttccgtcggtcgccctgagtcaggacaagcgacctgaagatgcggtgaactggcgtaccgcagaaacattttgcctgcccgtcctggactcgttaatcagtcgaggattaccaactgattgctgccttagcattaattttcctgacttgcctgcggacaagattaagggaattaaagccacgcgtcagggtattggcaaagtgaagggattacaggttattccaacaatagacccatacggagaagattattactggatccgcgtggagcatggagtcgccgagtttcctgagcatagtgaggcaggtgcggttacagcaggatatatctctgtcacacctttaatgtttgaaagaacggccatggaaagctggcatcaactttccgtggatttgagtgcgtcgcccatgtga

SEQ ID NO: 182477 - DNA, 273 bp, Klebsiella oxytoca
atgattcgagaaaatattcgtgttgtaaatagcacaggcctgcacgcacgtcctgcagccacgtttattaaaacgctaaaaaaatatgagtcttctgttacgcttatcaataatggcaaagagactgctattaaaggcctgatgagtgtattgggagccggcgttaaaggtaagtccagtattgaaatcatctgtgaaggccctgatgaacaggctctgatggatgagattaaagggttatttgccagcggctttggcgagaaagaagaataa

SEQ ID NO: 182478 - DNA, 840 bp, Klebsiella oxytoca
atgccattagtaaacggtaatatcctgctcgatcgtatccgtgaaaaacgtgtcctggctggtgccttcaacaccactaacctggaaaccactatttcgattctggacgcgattgagcgttcaggattgcctaactttattcagatagcaccgacaaacgcaaaactgtcgggttatgactatatctatgaaatcgtgcgtaaacgcgctgcgaccatggatgtgccggtcagtctccatcttgatcatggtaaagagctggatgatgttaagcgagctgttcgtgcaggcttcacctcagtgatgattgacggtgcagagttgccgtatgaagaaaatattgcgtttactaaagaagctgtagatttctgtaaatcgtttggcgtacctgtagaagcggaacttggcgcgattctgggtaaagaagatgaccacgtcagtgaggctgactgtaagacggatgtcaatcaggtgcgtcgttttgtggaagagactggatgtagcatgctggcagtttccgtcggcaacgttcacggccttgaagatattccgcgcattgacatccctttattacaagagatcgctaaagtatgtccgtgtccgctggttattcatggagggtccgggatcgatgaagctatcatccgcagttttgtgaactataacgtcgtgaaacttaatattgccagcgacttgcgtaaggcatttattactactgtcggccaggcatggactaaaaataacaatgaagcaaacctggcaaaagtaatgtcgggagcgaaagatgcggtggaagctgacgtctatagtaaaattctgatgatgaacaaggcatcctga

SEQ ID NO: 182479 - DNA, 744 bp, Klebsiella oxytoca
atgagtaccatactgcaagactctgaaattcctttatatatgcaagtttctgagtgggttcgcggaaaaatttataaaggtgaactgagtaaaggagacaggattccctctgaaaatcagatcatggaaatcctacaggtcagtcgtggcacggtaaagaaaggtgtcaccatgctggtaaatgagggtttgctggttcaggttcagggaaaggggacctttgtgaaaaaagagaatatctcttactcactgggggaaggattgctttctttcgcagagtcgcttgaaagtcagcacttatcttttacaaccgaggtgattgactcctatatcgagaaggcctcaaaaggagtggcggaaaagttgcagatcgatcccggtacacccatttttttccttaaacggatccgtagtgtggatggggaaagggtcatgttaattgaaaatagaatcaatatggcgctgtgtccgggaataaccgaggttgattttaataagcataacctgtttcagaccgtcgaaaccatgacgggaagaacaattgaatactctgaaagtcgctatgccgcgaaaattgtgggtagtgaacggggacactatctggaagtaaatgaagaagcaccggtgcttcatctggaacaactggttttcctcgataatcatatgccatttgattttggcaatgtctggctgaaatcagataaatattatttgggtacagtacttcaacgaagaaagaggtaa

SEQ ID NO: 182480 - DNA, 1035 bp, Klebsiella oxytoca
atgaaagccagcgtttactacagtaaaaatgatatccgatatgaagatgttgaggagccagaaattggcgacggtgacatgctcatcaaaatgcattcctgtggcctgtgcggtactgacattcataaagcgcagcaccagacggtgaccggcccgataatcctcggccatgaagtgtcgggggaagtggtgaaagttggcaaggatgttacccgctaccgggttggtgagcgtgtggtaaccgctattcatgttccctgctttaactgccattactgtgaccgggggttcttcaccctgtgcgatcagttcaagaaaacaaatctggaacccggcgggttcagtgagtttattcgtatccctcgccagcatgttgaacatctgacgcaccgaattattgacagtcttgattgggaccgagcggcaatgattgagcctgtcgcctgctgtttacatggactgaaatcatccaatattcacccaaaagatacggtactggttctgggttccggaactattggtctggttagtgcacagttggcggcgctaaaaggtgcttcaacggtgattgtttccgacctttcccggttcaagcgtgaactggcgctgaaggtaggggtaacccacgcaatcgacccggcaaacgaagatgttgaaacccgcgtggcagaaatcacgcaggggaaagggcctgatgtggtgatcattgccgcaggggtctcgtccctggtttctcaagccgtcaatgttgtacgtcgtggggggagaattgttgtgttctcgccatttgataaaaacccggtggtggaaattgatgcaggcagactgttccgggatgaaatttcaatcgttggcacctactcattgaccccctatgacatgaaggaagcgattgagattgtggaaaaagacaaaatcaatacgaaggacatgatcactcatacctggccgctgtctcggatggctgaagcgattgattttgcttccaatccagataatgacgtactgaaagttatcattaaatctgacgtataa

SEQ ID NO: 182481 - DNA, 1512 bp, Klebsiella oxytoca
atgtatacgatcggaatcgatattggcacgactaattgtaaggtgtgtttgttcgcaattccttctctggaattaattaatcagtatagtttcagaacgcccaaaattgtggacggagaaaatactgattttgatgttcgcctcatctgggacggggttctccatggactcagaacgataacaaataatctggataatgctgagcaaatcagcgcagtggcggttgccagcgtgggagaatctggtgtcctgcttgataataatgataatgtcgttggcccagttctaacctggtatgacacgcgccccaaacagcagttggaaaatattatttccgcaatggatattgaacatatctatgaaataaccggtattcctgctcattctaattacagcgtcaataaaattaagtggttgcaggataataacagtaatgcccgtgaaggttgtaaatggttatgccttgcggaattcattgccttcaaattatccggcgtgaaacgctcagaatattctctggcatcacggacgatggcattaaacatcgctgagatggactgggatgaacagctcatacatgcggctgagctttctccatctttgttcagtccgctggttcaggccggtgttgcgattggtaccgttacgtctgatgtttctgaacggaccggattgacaaaggatacccgtgtcgccattgctgggcatgatcatatgtgcggttccgtggctgtcggtctgacccgtgaagatcagatcctgaattccacaggaacgaccgaaggattactggtagtgaccgaagcggtcaataacaccgggcgttttttccgggccagagtgtcaaatggcgtgcatgtgcttccggggcttcattccctttatgcctcactgccttctgccgggtatgccatcgaatggttcagaaacctctttgaactcgatatgcctgcatttctgcgaatggtggataccctgcgtaacgagcgagacatggcagtggccagtgagcttgacggcatcttcattccccatctgcggggtagtggccctccggacagaaatacctggtcccgtgcattaatttacggtcttgatgataagtcacgaccggaggatgttctgcgctttgtgttccagggattgtgtttcgaacttcgcaatctgctggatttatacgaaacgctgacagggaataattatccggttgtgaatgtgattggtgctgcctgcaaaaacccatactggttacagcttaaggccaatattcttaaccgggaaatcgtggcatgtaatgtcaatgaggccgtgagcaaaggggccgccatgctggctgcgaaagctgccggtgtggaagtggagtgtctgtccggaacaagtgaagaacagacccgacgctacctgccggagagtgatgccgtgactcactatcaggcaatttacactcaggtctacaaaccgctttatgaatccaagatgcgtacagagcgtctctgcaatggagttaactaa

SEQ ID NO: 182482 - DNA, 1395 bp, Klebsiella oxytoca
atgatggataaagtatttgccgccgtccagtacattctggggctcggaccgacgatcatgttgccgataattatatttatcatggcaatgtgtcttcagacaggtttcagccgggcattacgctcggcactgaccatcggtatgggtttcatcggcatctttctggtctttggtttactggtcgacagcctggggccggctgccaaagaaatggtcagccacaccgggatcgatttaccggttgttgacctgggctggactccgctggctgccattgcatgggcctcgcaggtcgcaccatttgttgtaccgatgacgatcggtattaacgtactgatgctaaccctgaactggaccaagacggtcgatatcgatgtctggaacttctggcatttttcgatggtcggcgccatggtttacggggtgacgggcaacttcttctttggcctgctgattgccggtgtcaccgcagcgattacctttgtgatggctgactggtgtgctccgatgatccagaagtacttcaacctgcctgggatttcgttacccacactgtcatcggttattttcttcccgatcggcgtgctggggaatatggtgctcgataaaatcccgggcattaacaaactgaatgccgatccggatcagatccaaaagcgctttggcgtctttggtgagccgatgatgctgggggtgattctgggggcagggattggcctgcttgcagaatatgatgtcaaaggtgtcctcaacctggcgatgagcctcggtgcggtaatgctgattatgccccgcatggttaagctgctgatggaaggcctgctgccgctgtctgacgccgtgcgtagctttctcaaaaaacgttaccctgaccgtcacgatctgtatatcggtctggatatcgcggttgcggtggggcatccgtcagtactgtctactgcgctgctgcttatccccgtcggggtattgttggcggtggtactaccaggtaaccgtttgctgccactgggtgacctggcgaacatctgggtaccgatttccatggtggtactggcctgtcgaggcaatattgtcagggcgttcatcattggcattccatgcctggctgtgaacctgtatgtggcttcggccgcagcaccaatcctgaccaaaattgcaagggatatgaatttcccgatgaaaacggacggtgaaatttccagcctgctggatggtggtaacccgtatcgtttctgggcagtcaaaatctttgaaggcaataccattgctctggttcttattcctgtcatcttccttctgtgcctgtggttatatcgtgtaactaaaaaacagctgaaagcggaagaggcagcagaaaacgaagcagcctcggctgatattccggtagcaaaataa

SEQ ID NO: 182483 - DNA, 282 bp, Klebsiella oxytoca
atgaacaaaaaaattatcttcgcctgtaccagtggtattgcaacttctgcggtagcaactgaaaaagtagttcagtattgcaaaagccagggtattaacgttgaacccattcagtccaatatcggcaccattggcaaacaggatggcatggctgatttaattatcgtgacatcagcggttaagacggaactgaaaaccccggtcctgaatggccttcctttgctgaccggatttggcgaagaagaattactggaaaaaatcgtagccatccttaaacaataa

SEQ ID NO: 182484 - DNA, 465 bp, Klebsiella oxytoca
atgtctttgaattctagacttgaacctgaactcgttctcctgaatgagccccccctggatagaaaaattcttttcaattctgtcagtaagttattgctttcaaaaaactatgtagaacagagctacccggaggcattgatcgcccgcgaagaaaatcatcccacggcaatgcagttggaaaaaatgggggtcgcgatccctcatgtcgatgttgagcatgtccgggaagagaaactggttgtggtcacctgccctgaagggatcgtatttaatcaagctgaagatcccgactccaccatgaaagtgaatgtcattttctttttactgctgaaggaaaaagatgcgcatcttgaatttctgatgaagctcatttcgctttttcagcgtagcaatgaaatggaccaaatcctttgggcgaaatcaaaggatgacgttatggaacttctggcaaagaatctttattaa

SEQ ID NO: 182485 - DNA, 996 bp, Klebsiella oxytoca
atgattaactcatccaccctgagcgacgccattcggcgattacgtttgggcgagcgggccacgctcgcccaggccatgacgctggtagagagtcagcatccccgccaccaggcgctgagcgcccagctggtcgatgcgattatgcccttcaccggcaacgccctgcgcctcggcgtcaccggcacgccgggagccggaaagagtacctttctggaagccgtcggcatgctgctgattcgccatggcctgcgggtcgcggtgatagcggtcgatccaagcagcccaatcggcggcggcagcattcttggcgacaagacgcgcatgatcgaactggcgcgctcggactcggcatttatccgcccggtgccctcgagcggccatctgggcggcaccagcctgcgcacgcgggagctgatactgctgtgcgaagcagcgggctatgacgtggtcattgtcgaaaccgtcggcgtcggccagtcggaaacggaggtctcccgcctggtggactgcttcatctcactgcagatcgccggcggcggtgacgatctgcagggcattaaaaaagggatcatggagatggcggatatcgtggttatcaataaagatgatggcgagaaccgcgccagcgtggctatcacccgccatatgtatgaatccgccctgcatattctgcgccgcaagcacgccgcgtggcagccgcgtgttttgagctgtagcgcgctggagcagcgcggtatcgaagccgtctggctcgctatccttgacttcaaaaccaccctcaccgacagcggcgatcttgaaaagctgcgccagcgtcaggcgctggagtggctgcaaaagcagaccgaaaccgaggcgctgcatctgctgtttgcccgagcggactttgatcgctacttccagcaaacgctacaggcggtgaaaaacaatggcctctcgccgcgcaccggcctgcggcagattagcgaattcctccagaatcattactttgcataa

SEQ ID NO: 182486 - DNA, 312 bp, Klebsiella oxytoca
atgcgtttccagaatcgggccaattttgaggcgatgctggacgcctatatgcgcccctgcggaatcaacccgacggttatctatcgcccctatagctttatggcgaaaattagcgccgtagagcgggggcagtttttaacggttattccttacttcgcctggcgtctggtaaatccggcgaagctgaagtacttcgacgcgcccggtagcgccatgtatatgcaggagtatctctattcgctgaaaaaccatcgctataccgccacgatgcttcagcacataactgaagatcgcgacggtacggagggctaa

SEQ ID NO: 182487 - DNA, 594 bp, Klebsiella oxytoca
atgattttgccgctcggtccgcaaaacgcttttgtgatgaatcaaggtattcgtcgtcagtaccatctgatgattgctttgctatgcgccatcagcgatctgctgcttatctgcgccggaatttttggcggcagcgcgctgctgatgcagtccccgtggctgctggcgctggtgacctggggcggcgtcgcttttttattgtggtacggttttggcgcgctgaaaacggcctttagtagcaatctggagctggccagcgcggaggtgatgaagcaggggcgctggaaaatcatcgtcaccatgctggcggtgacctggctgaatcctcacgtttatctggatacgtttgtggtgctcggaagcctcggcggacagctggagatggagccaaagcgctggtttgccctgggcaccatcagcgcctcattcttatggttctttggtctggcactgctggccgcctggctggccccgcgcctgcgcacggcaaaagcgcagcgaattatcaacgtgctggtcggtctggtcatgtggatcatcgcgctggagctggcgaaagacggcttcgctcatgtgcaggcgctgcttaactaa

SEQ ID NO: 182488 - DNA, 543 bp, Klebsiella oxytoca
atgaatatcaaaacgctgctcgccccgcttttattctgctcggtattagccctttctgcatgtgacagtagtaatacagcagaggaaacagcggcgaaaggaaccagcatactcaacggtcaggctacaatggtccttccggaaaaatttgtcagaatgccgcaggagatgctggagacaaaatatcctgccgcacaacgaccaaaagaagcctggtatgtggaaagtgagaatggcaaggtgtccattgccttcagcgtcacggaaaatgccataagtgaagcgcagctcccgcagtttgccgacatgatgaaaaaccagatgaaggcattttcaccgtcattatccgaagtaaccgtgaatggcaaaaaaatgagtcgcctggaaatcaccaccccagctgcggatggcaagatttttaacgtgatgcagttctcttctctggacggcaagttattgatctctactttcaacgccacagaggatttaaaagatcaatattcacaagctggtatggacgcactgtcaacgctgaactactga

SEQ ID NO: 182489 - DNA, 450 bp, Klebsiella oxytoca
atgaaaaagtatattgcagtgcttattattccgtttggtatgttactgaataccgcagtcgccagtgacaaaatgacggaaatggcggcgaagcgttgtgcgcctgagccagtcgtattttatggccagttctcggaccaccgcaaagaaatcctggtctgtaaacgtgatacgggcgtatcttattatgcagggaaactcaatgactctgcttcaatgaatgaggcaataggcccacggagattgaaagtgatgtttgattccggcgacatgaaagaagcattgctgatcaacgcaggccctgaaatttatgctatttctagccggggggatggcagcgatttattcatgcgcatgaagaataataaatccaaaccggaagtgctggaaagtgaaattctggacaagacaaccgttattaataacttgcgccagcactttatgaagtaa

SEQ ID NO: 182490 - DNA, 1293 bp, Klebsiella oxytoca
gtgagcagaatatggcgagtggctctgttactgtcggcggggctgatcggaatgccggcaatggcggtgacattcacatacaactatacctgggccacaggagaccatgcggggcaaccagcgggctcctgcggctataccgtgccggatatccgtccgtttcagataccgcggacgctggtggtggatagtgccgtgcctgtcggaacggtcctgtattcatgggactttaacagttttttaccaggattccggattcagtgtacgggtagcggtattgataacagtactaactacacaaatgtgaataacggaagtattagcgggaatcttattgttgcagatttccgtttcacgggcatgaccgctagtccattgctcagcagcaccaacccggtatatgccaccacgctgtcggggatcgggatccgtctgtccgtcaaagcggatacggattcagcagtggatggcgctggcaatgactacagttatgtggccctgcaaagggttaacggtcagatacaagtttatccggctccacgagatgtcgtctatgtgtggggaggttctggtttaccccaggcgtatctttatacaaggatctacgcaaccggccccagcgcttatcggtactcaattaagactattgcacagggaatttctgttaaagcggatctgataaaaacggcagatactgtccagtatggtagcctgggagtgggcggttccccttcaatgtactggaacacaacagccgtactgcaaccagcactgccaaccgattttctggcgggtaatgctgtcacggtggtatcgccatcgtgcagacttcgcaccaccgattacagcatcagcatgggaacctgggcggcagacacggtaaaccatatgggcagtccggccactggtgccgctgttcctgtcggcctgaatctggagtgctctggcaaggtggcggacgttcagttccggtttgaagataccggcagttcaccctcttcactggcagaaaaaaacatcaccctctatgacggcggggggaacaaggttaacggacttgaaattcagatgaagtacaacggcgagcggattaacgtcgacggcgtcacccagaccagtacggggagccatggtcaggtgcgtactgaagcagaatctgtaccgctttatacctccacaagtcaggccatgtttaccgccaattatatccagaacggatctattaccgtcggaggaaataactataccggcccggtctccgggaaggtcaatatctgggtaacgtacaactaa

SEQ ID NO: 182491 - DNA, 723 bp, Klebsiella oxytoca
atgacattcaaacagatatgcgcaggcctccttgcggccggattgttctcttttatggcggatgccgccgttcggccccaactgacaagagtggtggcctacgcggaagataaagaaacaacggttggggtgatcaatgacagcgataccacctacatgctgcagtcgtggctggaagatttacagggccgggatagcggcataccgctggtgctgacgccgccggtgatgaagatggagggtaagagtgagggtaaactccgtctggtggtcatgcggggagaaatccctcaggacagagagtcggtgtactggctatcgctgcaggagatcccgccgaaggcaaaagacacggctaaccgactggtggtagcggtaagaagtcggataaaagtatttgtgcgcccggcggggctgacgtcggaaggggcaagagcgtcggccggcgcgctgcgctggagcctgcagcgtgaaggtagccagacgtggctggtagccaccaaccccacgccgtattacatcagcttcgggcgcctgacggcgggctgcgaaagctgcaaaaaagtgacgccggaaaacaaaaacaccatggtgccgccaaaggggagccagcgttacagcctgccgtcgcaggcgggagcatccccggtcgcggtgacatggagcgcgatgaatgactggggcggcgccggtgaagagcacagccaggaggtcaggccgtga

SEQ ID NO: 182492 - DNA, 2598 bp, Klebsiella oxytoca
atggctatattactgtcactgtctaattttctacttccggaaagggaggccggattaaaaacaataactgcagctgttattttatgcagtctcttagccggtaaaagttttgctggctccggttttgaagagtcatatttgcaccgggaaaagaatggtgcttcaccggacgtgtttatctataaagatgcgctgacgcccggtattaaaaatactgagataatggtgaacgagcagcttgccggaaaaatagacgtggagttcgtcagtaccgacagccatgaaactaaaccctgcctgaccgctactatgctaaaggcgctgggaataaaaacagatctctacgaagacaatgcgccggagagtactgcaccatgctacgatctgaagaaacggatcccctcttcggctttaagttataaggacagtcagcaaagattatttattacggttccccaggaggcggtggacaaaaaatatttcaccatgattttgcctgaggaatgggatcatggtgtacccagcctgcgcaccagctataacggttactactatacttcgagaatcaaaaccggacgcagctcaggtgaccagggtacatccgcaaccgatacatcgcgcagcgcctacgtcaatctcaacagcgtgggttcgctgggcgcatggcgcctgtacagtattgactctttttataaaagcgaccagcggggctgggagtctgaccatgaccgcagctatctctcccgggattttgccgcgctgcgcagtcagctacaggttggcgaaatttatacctggacgtcaggttatatggccgggacggtaccgctgagcggcgtctcgctggcaaccagcgagaagatgtcgctggataaccagtttcgctttgctccggttattcgtggcgtggcgcgaaccaacgcgcgtctgaccgttcgccagcggggacgggtgatatacagcaccaccctgacgccggggccctttgcgattgaagatctctatagcgctcaggtgggggccgatcttgaagcgacggtggaagagtctgatggacagcggcaggtgttccgggtgccctacaccgccctgccgaatatgatccgccccggcgcagtacgctacagcgtcgcggccgggcaataccgcagccagggcagcgatgtgaaggagcccgtagtgatatccggcgcgctggagcgcggctttgaacacttcacgtttggcagctcgctgctggcgtcagcgcactaccagactctgtcggccggcgtctcatggaatgccgggaatatcggagcgttctccgctgaagttgcccacgcccgctaccggaaccctgaagatgagaataacacccgtgacggctcagccgtgcgcattcagtacgcgcgccattttgagacatcggatacctcgctgcagatcatgggctatcagtaccgctcggaagattttctcgagttccaggaattcctgatgcgtgatagccgacgcgcgcgtcctgaggatgacgacgtatacgacctctatgaacgacgcaagcgtaaccggctggagatgaccatcaatcagaatgtgtcggatatcggcagcctctacatgacggtcagtcaggaccgctattacggcaccagccagaaaagcacctccgttaccggagggataggtaccagcattggcagcagcacgatctcgctgtcgctgacggactcccgggatgacgaacattcagaccggcaggtcagtctgtcggtcagcattccccttagctcgggaagcgaaagaagccggaactacggctcgctgaactatggtctggtgcgcaacagggacaatcagtacagccagtcgctgggttactcaggcagcgcgctggacaacacggtcacctattcggcaaacgtactccgcgatgtgcaggggaaatatagccagtccggcagcctgggctacaacggcagcatggccagtatcagcggcggtctgagccacagcaacagctacaaccagatttcggccgggatgagcggcggcgtgacgctgtacggcggcggcgtagtgctgtctccggtgctgggcgatacggtggcaatagtggacacctcaggtgctcagggtattggcgtctcggggacggggaatgcgaagaccgacctctttggtcacgccatggtgacctggctgacgccgtaccggtacaacgagataaacctggatcactcgggcgtggataacgtggaactgaaggagaccacgcgcaaagtggtgccgagcgaaggcgcagcggttctgctgaaatttgcctcacgggtcggacggcgcgcgatggtggaactacgcggctccggaaatattcctttaggggcgatggtgtacgccgacgaagaaaacggggcatcgcgtgaagaagtcggcattgtcggcaaccgcggagtgacctacctgagcggtctcgatgcgcgcaacgacgcgcacctgcgggccgtctggggagaggatccaggctcacagtgccgatttacgctacccgcggccacgcctgagcagctgaagccggacaactggcacaagaagattatcgtgaactgccgttag

SEQ ID NO: 182493 - DNA, 582 bp, Klebsiella oxytoca
atgaacatgaaaaatgtcatgaataaaactttactggcgtcttcagtattcacagtcttattcagtttaaatgctgtagcagcagatggcacaatcaactttaccgggaatgtcacctcgagcgcttgtaccaccattgtaggtgctggtcctgcgggcggcgccatgagcaacccggctacggttgcgctgccaaacgtaacggataccaccctcaatgctgccgttggtacctacgcgggccacaccccgttctctatctctctgaccggctgcgaggcgaccgccgcgttgcagaacgtacgcgctattttcacaaccccatctccggcctccggcgataactttgtgatgggcaacactgccgtcggtggcgcgcaaaacgttgctgtcgctatcctcagctctggcggatctcagattgaccttaacggcggcgcgaacgtagatgcaggccaggcgcttcctgtaacttcaggtccggtgacgctgaactatcaggcagcttataaatcgctgaccacgggcgttaccgccggagctgtcgccggaacagcagaatatatcatttcttatttctga

SEQ ID NO: 182494 - DNA, 726 bp, Klebsiella oxytoca
gtgacgataaaaggggtaaacgtgagaacaacactggcgataacgcgcggtttactggcgggagcgctgatgatagccgccatgggatttaccgctcgcgccgaggctggcgtggcgctgggggcgacccgcgtcatctatcctgccgggcaaaagcaggttcagctggcggtcaccaacaacgacgaaaagagcacttatttgattcagtcatgggtggagaatgccgatggcgcgaaggacggtcgctttgtcatcaccccgccgctgttcgccatgcagggaaaaaaagagaataccctgcgcatcattgatgccaccagcaaccagctgccgcaggatcgggagacgctgttctggatgaacgtcaaagcgatcccgtcgatggataaatcaaagctcagcgacaacactctccagctggcgatcatcagccgcatcaagctctattaccgtccggcaaagctggcgctgccgccggatcaggctgcggaaaagctgaaatttcgccgcggcgcaggcacgcttacgttgatcaaccccaccccctactacctgacggtcaccgaactcaacgccggtacccgggtgctggaaaatgcgctggttccgccgatgggtgaagccagcgttaaattacccgccgatgcaggtcgcgagattacataccggacgattaacgactacggcgcgctgaccccgcggatgcagggcgctacgcaataa

SEQ ID NO: 182495 - DNA, 228 bp, Klebsiella oxytoca
atggaaaagtatcaaaatcgtggtggcgattcaggtgttatagggtttgagataggggatgactcaatcactgtacaatttcgtgataactctcggtacctatacaactctatccgcccaggccaggttatggttgaccacatgaaaatgcttgccagggctggtcaggggcttaacagttacatcagccgcactgtgcgcaagaatttttatcaaaaactacgataa

SEQ ID NO: 182496 - DNA, 369 bp, Klebsiella oxytoca
gtggcattagagacagcggacgaagtgaaggcagtcagcgcggagttagcaaagaacaaaaagacgaacctgtttcgctgcctctgggcgatgcaatttgaaagcactctccgcttcggggataccgtcaaattgacgtgggatcaattcgctgagggcaaaacgcatctgaccatcaaacaagagaagacggggaaacttcacaaagtcgctattaccccggctatgcgctctatcgtccaagctcgccgggaagaagcagcagaccgcccaaaattcggtgactacatattcagcctgtccgacctgaggtcgaaaggccagccagtttcacacaatgcagttttgactgaatacgggaaatggtga

SEQ ID NO: 182497 - DNA, 951 bp, Klebsiella oxytoca
atggctattagaagaattgcatacgcatattatgatccagagtggatgaaactttcgcactcactcgcagccctaaaaagaaacaccgttgaacctctggcttatttgtctcatatgaaaggattccttttttgtccttcttgttatgagcatcttacacgagtaccagcagatcctgaaaaggaaatgacatctaacgaagttcccgcatattataaacatcttaaagatgacgatgcaccaccatgtagtttacgatgcggtccaatacaatataaaaaatacgctacacaagaagatgcaaaaaaggccgttgaagatgaagaactaatagttatcagcggctttctccagacccgtccagaaaataatccaagggtcgattttggaggggatgaagtacctatcgactctcattttgagagggaagatggaaaagaagtttctcttccaatagctcgccataatggtgaatctttccgcgtcccaagtcagataaccagtatccagtctttgtgtgcaaactttattcacaattattatcgtgaaatatatcttttagacgaagatggaagagctaaaagatataggttttgtgactctctaaaaaatataaatgaactgagggaagaatgtgatgaacctcggtttttatttggtgcggttttcagggttgagaaatttaaagggcattctaatatttggctaaggattgacaatagcacgccatatcgtgattttcgtataagaataacaaacgacacagctgagggacgaggttttttgaacgatagaaatcttggtcgcatcgcaatgttttacagtaaagttaatggggctggattaggtttcattacacctgagttaggttggggtgaggttgctttactgccagacaagtatgatgattttttaaatcgcgtctatcatgaagacgatacagataattaa

SEQ ID NO: 182498 - DNA, 1143 bp, Klebsiella oxytoca
atgaatgtaagcccgcttatttcgcagaatcgtgacaaattaatcaatcctgaacgtcttaccgaggcaagggaggctaaagggttaactatggctgaccttgcgcgtttgcttgagatctctcggcaagcgatttctgcgtttgagaaagggctgaaaaacccatcccatgagacattaaatcagatttcaagggtattgagtttccctgaggctttctttttagctgccgaatcttcacccagtatcaaaggtgctgtccattttcgtagtcgcgcttctgcaagtaaaaaggaacgcttgatgggcacaacgaagggaagatgggtgtcaggtatactctctaatctgcttcaatatgcaattttgcctgaattgaagctaccgcctattgatattgatgattttgaaatgcttacgccaagcgatcttgagcatatcgcaacgcaaacccgtcgatattggggattgggtgatggtccgattaaaaaccttactcaacttcttgaaaataacggtgttgttgtctcaaatattcatgccggagatagggtggatgccttttcattttgggctaactccgggccagtcatcgttgctgataaaaatagtacggcagttcggttgagatttactattgctcatgaattgggacatctgatattgcaccgttcggttcaggacgattatcttgacgataaagagctttttaagaaagtggagaaacaagcggattattttgcttcttgcttcttgcttcctgcttccacttttggcaatgagtttttctcaccaagtttgcagggattaataaagttaaaagaacgttggggagtttcgattggagcaatcactatgcgagcatcgagcttgcatctgataaatgacaatcaaaaagagtatgttttcagacaactggcaccttaccgtaaaaaagagcctttggatgacattatcaagcatgaagagcctaagttaattaatagacttgctcatcttcttgatgagaataatataatttctaaaggtgaactttacgagatgtcagggttgcctgatgctgattttgtcactataacaaaaatttcgaaatctgagattttttctgacaaagaaaatgtcgtctctataaagctaaaataa

SEQ ID NO: 182499 - DNA, 612 bp, Klebsiella oxytoca
atgagcaattatcgaacagtattaatgaacgcttttgatgtaaatcaccgtagttccatgactcgttctatatctcaggcttacctgatgtctgccgagcgcagccgcgaatttggtgtgttttctcgtgaggcacaaccgtatcttcgctggttctattgtgaagcattactggaaaaaacagcgatcaatcttgggttggattttcacgccgcaccaaatgcagcccgtaactgccgacacttatcgattaagtctaacaactggactctcacggctcaccatattaacggaccgggacaattaccgcgtaaggctcgctaccgagctgcatatgcacaaagcatgaattacgatctttttgaaggattcgaagacaacgataatgtgcttccaagtgtaggtggtcacgtttatctattacatgatggggttggtgcttccctggaggcgataagtttgaccattcctactccagatttgcgtgctgtactgtatgctgaaccattagagttggtttcttcttatgaagttgaggaagaaactattgaagatgaacttgatgaaaaaatcgcccttagggtcgatgaattgctaagaaaacaaaaatga

SEQ ID NO: 182500 - DNA, 153 bp, Klebsiella oxytoca
atggcgaaaaatgcagcggcaaccaaacgcaacaaccgtaaaattcacgctcgtaagtttctggcgacaccagagggcaaagcatggcttgaacggaagaaggccgaagaggcggagttgaagatggtggcggaagccaggaaattcatctaa

SEQ ID NO: 182501 - DNA, 522 bp, Klebsiella oxytoca
atgcagggaatagttaaagcagtgccgctgttatgttttttactgctgggctgtgatccggcagaaaaagaaggaccgcgcggcagcgggaagagcagctacgtggcggctaatctgctgggctataaccatatggcaggcacgaatatcaactggttctccgtcaacggctaccggggacacgccggggggtttacctgctgtatatcgctgccggaaaaatggcggcccaatatgcaggtggtagtggagtgggaggttaaccctaacccgtttccgaaggatctcccccacttcgatgatccaaactatgaacattatatggaaaaatataaggctgcctttcgtcattataaagcggtagccactattcccgaatatgaagattcctgcggcctgcaggtgcatttcttgccctgtcagcagattaaagtaacggctacctgccacgggccgacccatcctgatcacccgataaaagatccctaccgccagtcggagcctgcccaatgtccccaataa

SEQ ID NO: 182502 - DNA, 1383 bp, Klebsiella oxytoca
atgataccccgcgctttgcctctgtgggccgccgctgccgccgtcggccttctaccgctgcacgccgctcaggccgcgagttccgtgaagtttcccgataaagtctgtgatatcacccactacggcgcagaaggccatcggctgcaaatcgcgctcaacaccgatgccattcaaaaagcgattgatgactgcgccgccgccggagggggaacggtgctggtgccgaaaggtaatttcctcaccaacccgctgtttctgaagaataatattcagcttaagctggagaaagacgccaccctggtggcctcaaccgaagtggctgcctatcgcggcgatgataaaacgcgatacgccgaagcggaaaacggctggctgccgtttatcagcatcgccgacgcgcaaaacgtggccatcgtcggtgaaggcactatcgacggccagggcgcggtgtggtgggaacgctggcgggaaaatatccgcgccaccggcaagaaaggcggtaccgaccggccacggctgatttatatcacccgcgccagcaacgtgcttatcgacggcgtgaccctcacccattcacccagcttccacgtggtcacccgctacgcgcacgatgtcgatatcaacggcacgcgtattctttcgccgtggcatgcgccgaacaccgacgccatcgatcctatcgatagccagaatatccgtattaccaacaactatatcgactgtaacgacgaccatattgccatcaaggcggagaaagccgacccgcgcttcccggacggcgtggtggataacatctatatcgccaacaacactctgaagcaggggcgcgggatctccatcggcagcgagagcgcaggcggcgtgaataacgtgctggtggaaaacaataccttcgaaggttcgatgtacggcattcggattaaaagcccgcgcggcaaaggcggcgaggtaaaaaatatcgtctaccgtaataccagaatgcataacgttgaggtgccgctggtgttctccgcctattacaaagccgcgccgattgtgcaggccgaggtcgataagttgttgcaggcaggcggctttaccctcggcgagcagatctatccgccggacagcgacccgaaacagccgttcgataaatacaagactccgcacttcagtaacatcaccgttgagaatttaacctccaccggcgacagcaaagcggcggcctatattatcggtaccccggaagcgccgctcagcggtttccattttagcaacgtcaatattgaagccgaccgcggcctgcgcattcgcaatgccgagctggagagtaaaggacttaacctgcaggtgaaagcaggtccggtaattcaacaagacgctggcgccatcgtgcaccagtaa

SEQ ID NO: 182503 - DNA, 843 bp, Klebsiella oxytoca
atgaccaaagcggagatcgccagcgctgttaatgagtggttcaacattgaaaactacagcgtcctgcaaaatttgacagtggaacagcttttccaagagatagaaaacaggattgtcgcttaccgcatggggcaaaacagtggggagttgcctcctgaaagccgtcgcaggcatcagaactattacgaagaactgattgaaggcaaggtcgtgtttggtgatgttttcggggggccagaaaaaagactgtcttccagctatgccatcaagcctgtcacacataaggggctatgggaggtggcgggttatgtggctgctttcgataaatacgttaacccggaaggaaaacccctacctcatatggaagtctcgcattatctgaaggaagccggggtaaataacgaagggttgatgcttgttcaaattaatctggcggaaacgtcatccgaagaaatcatcaatcacctgaaagtgatggtgcctgagtggaaagaacaactacaggctcctgagcctccagccagagattttcgctttggggtcagcaacctcaagagaatactcgattacaacatcattcccatcatggatttgctgttctgggcgcaggatgaagaggtcaggattggtatgccgcagcttaccagttttatctacccggacgagtttaaagacggtattcgtgatgttgagaaaatgaagtctacagaccatccgctggcagtaaaatatctgacaaagcttgctcactatcggtcttttgtcgattttacatacagatacgacgacagaagacactggaaggttcaggatctcatcactgacgaactcggtgaggactga

SEQ ID NO: 182504 - DNA, 237 bp, Klebsiella oxytoca
atgattgatgaatttcatatgttgtatatgtataaaaaaatccaagccgaagctgcggcaacagatatgaaaacactggaacggtttttgaagaagttccgcaaagttgttgcggagcgtcgggaagaatactatcaggagattggtgagaagaaggctcaaaagctaagggcaaaaagattacaacagttgcttaagaaaatggagcgtgatcgtgtatcaccacatgagttataa

SEQ ID NO: 182505 - DNA, 468 bp, Klebsiella oxytoca; identical to SEQ ID NO: 168119

SEQ ID NO: 182506 - DNA, 702 bp, Klebsiella oxytoca
atgagcattgattacaacacaataatgacctccagcagtgaacaggtggaagattatatcaacaaaaatgattttacagacaaacagaaactggagatttacagtttctataacagaaacagaaaagataaaataaccgtaaatgtaaaaaaagagagaagttctgatattcaaccgggaatagcctatgttcatgcttttcttgataatctggaaaagctcggaaaaaatatgtctggcgcagaatacacaataatgatccgcttatgtaaactcatgcagcatggaaacctcattgccagtatatctcagtcggcactcgcagaagagcttaatatgagcaaatctaacgtgtgtaaatgctggaacaagctagtaaataaaggcattctggtcaaagaagggaagcataccatgataaacgcaaatctatttctgaaaggccagtacagaacattaaatgccacaaggaaagaatatgttaagaagtcgctgagaacgaccagtgaaggtatagaagacgtattcgtcaccgtttataaagatacggtacttacaaacaacgcagaaaaacccatcgataaaggagatgataaacctttactttctactcccgacgaagatattgactgggactctgtttcagaagatgacatttttgttgattatcctgaagatgttgatcaaaaagaaagaatatag

SEQ ID NO: 182507 - DNA, 1401 bp, Klebsiella oxytoca
gtgtataatctattcgttacagcagatactcaggcatggaatgaagccaatggaagttatgaatttacaaggtctaggtttttagagcatactgaagataaattagttaggaaatacaaggatctcactaaggaacaaattgaggaaataaaagaattaccctgcttatttctagtggaaaatttgcaaggtgaggcgtttgttggctcgttaaaatctataactgctgatagatataaagtagagtttgaatacaatcttacgcaaagaatttcagagggagaaattaataatcaaactttatactcacttggtctttctaaatttgaaataatgcgaacccattgggctattaaagatctaaatctttattctattattgaaagccatgggataaatcttcaaaataatttagatgaatatgacctacgtatcccactggaagataaagcttctgacaaaattgtttcattcaaagcgacatcgttaaatattttcatggagcatgttttatctaaacaaaagaaaaaaggttatgatatattctatcgtgggcatagtgatgtcaaatataaacttgagccttctatcaatagaactgatgataatggccgctatttatataggaattatgaaaatgtaatggcaacagaattgttggttgaaaatcctaacgattttaatgaagacagaacaacattagagaaacttgttcgtatgcaacattattcattaccaactcgtctgttggatataacctcaaatcctctgatggctctttacttcgcctgctcttctcatagcaataaaaaagatggagaggttgtagtttttttcataaatcagaaatcaataaaattttttgattcagatacagttaactgtttggcaaatatatcgcggctttcggtaaatgacaaggagtctataggtaataatgtccaaaaagaagagtatttattgaatgattatgaactagatttatataaaaaagataaaaacaaatctgagtcaattactaaaattaaccactttaatgctcttcctgaggtcgggagacttcttcatttcataaaagaagataaatcatattttcttaacaaaattataccaaatgatttgaaggaaatactatgcgtcaaaggtaagaaaagcaatggacgaattttatcacaatcaggatcatttcttttatttggcacggaaatgatgatgtcagattttggaacgcctgagatttcaattgaacgtataattatttgtaagaatgaaaaagagagaatactagaagatcttgataaaatgaatataaatgaaagtacagtatatccgtatatagaaaactcagcaaaatatataaaaagaaagtatgagaagaaaataaatgatgatcaagagtag

SEQ ID NO: 182508 - DNA, 531 bp, Klebsiella oxytoca; identical to SEQ ID NO: 168133

SEQ ID NO: 182509 - DNA, 441 bp, Klebsiella oxytoca
atgaaaattttaataaaattgaataatgagtggcctgaacatgtgagtgggaaccctgtccttgatgagtggcttcataagattccttggtccggtattgagtattttttattatgtgaagatggtaacgtttatcagtcatatataaaaatgcctttttctgttgagataaaggaatttcatcttttcaggcatacacacatagatgaaacttcatttatgattgaagaaatcaatgaatggcctgaaggtgttaacataagaaaaggttttatatcaaaaacagataagagacatccatataatgaaaaagaaaatagctgttggtatgtatcacctgaagggaatgatgcagtaatcatatttgatgcccctgagattcaggagcataaaaacaggtataaagaaatgccaatcattacatgcgaagttttcgtgtag

SEQ ID NO: 182510 - DNA, 213 bp, Klebsiella oxytoca; identical to SEQ ID NO: 84052

SEQ ID NO: 182511 - DNA, 1521 bp, Klebsiella oxytoca
atggcgatttttcatctggattttaaaattgtaaaacgaagtgagggcagatcttccgttgcgaaggctgcttatcatgctcgttgcagaatcacagatgaaagaacaggtgatacctatgattatagccgccgtactgatttatgcgggcatttcatattagcgcctgttaatgctccagaacacatcataaaagactctacagcattgtggaatgaagttgaaagcgttgagcgccagcacaacggtcaaacatcccgttatttcgatgttgctatccccgctgagctaaccaatgatgataagaaaaagcttgttcttgaatattgccagaaaaatttcgttgagaaaggcatgattgccgatatcgctttccatgatcttgatagtgataatcctcatgctcacgttatgttgaccttaaaagccataggcccggaaggttttggtaaaaaagaaagaagctggaacgacagaaaaatgtctattttttggcgtgaatcatgggcatctatggctaacagctaccttgctgctgctggttcatcagagcgtattgaccatcgttctctccaatcccagcatgaggaagcattagagaaagcagcggttgctctggataatgaagaaaaagcgctatggcttgccaaggccgctgaaacaaaccgccctgcaatgaagcgtattcacagtgccaaatggcgtagtaaagcagctcaacaacagcgtgctgctgaacaggctgttcgtgatgctgccaagcaagaagccgttgaagtctacaaaacattcagcgaacttgatcttgaaattgttgttgatgtcagaagcttcaccgtggctgttcttgctgaaccagaagagattttattaccaaaaacacgttccgattcttctaccaaagaaacgcaaagacctgtactggtagccccggcacctcatactcgtatgcgtggcgttaaatcctatcgtgataaaacaaaagtcagtaaggttactgctggtcataaatcatcagccggtatttctgatattgagatgaatactatgttgaaaacatcctcctctcaaaacccaaacagggcatccagaagcgcccctgaacgtgttaagaggacacagactattccatgtcaggataatatctttaaacgctttactgctcttttggttgattttatcagagataaattcatatgggctaaaacagacaaaactaaagttgatattatcagtgaagaacatgataaacgtattgctgaaaactacatctttgatgaggtattaggtcgtcatgtgtcacgtaatgaatatgaacaacgtgataaattcaataatgatgaaaaacaacatcaaactgagacctgtgtccttaaaccaacgggaaaagaaattagtcgtttcccaagtcgtgtgaaaaaatctgaacaacacaacaacgaaccggagtacagacctacactctcatctggtaagcgcagcgggcctaaattaagaccgccgggctttccgctaaaatga

SEQ ID NO: 182512 - DNA, 384 bp, Klebsiella oxytoca
atgacaaataaatacattaacttcatggggctggatttcaataaggtagcggagatgaaaaaaacgttcactgggtttgagaaacgattacaaatcaacaatgataactttgacgatgaattattttatttttgctgttttatggattacttccttaagcgacatgacaacgtatctttcccagcttattataaattttgcgtttctctggatgcttacctgtattcactcatgtatctcgaagaaaacacctcaatgacgaacttaatcggcttctttcccggcaagctgttctggcataccgttgataatgggaatgatgatgttttttatatacttcttacattttatatgaatgaatggaaaaaaaaggaagcgttctga

SEQ ID NO: 182513 - DNA, 318 bp, Klebsiella oxytoca
atgagtaaacagggggatattgaaagcaggaaaccacgaacagaaaaaacaattaaacaaaaaatagcttcggcacagatgcatcttaatcgccttaagagcaaggaaaaatctttgaccaagagcgctgaaacgcgtctgaagattattttaggtgctgaagtagctaaagcggtgggctgtaaagtagaagaggtggataaagagttaatattaggactgatattacaatcgtcgaatattaatgcagaggctaaagcaaggattaaattacgagggaaaagatttcttcaggatatggtgggaaggcaggaataa

SEQ ID NO: 182514 - DNA, 1710 bp, Klebsiella oxytoca
atgaaaaatcaaatagttaaagagatttcaactctcgaaaaaagcattattaattcatcattatgggctgctgctggcgacgctctaggttggataacagaactatcccatggggagaatggcgttaagcgtcggattggttcggccagagcaatccagactcaaccttgggaacgagttataggcggaaaaggcggcgtcaaagctaaattacctgctggtgcatattctgatgatactcagttgagacttgcagtttcacgttcaatacgtgaaggtggttttttcgatgtggaaagtttcgcgaaaatagaacttactatatggcccagttatgctttaggtggtggtctgggaactaaaactgcggcccaaaacttatcgaaaagaacagtctcttggttttctaacttttttgaaaacgggaaacaaaattattttacaagcggaggaaatggtgcagcaatgcgcattcagcctcatgtttggagttcgttcaataaagattatcaagataactatttattaaatacactaagagattctttagttactcatggtcacccccatgggttttgcggtgcattttttcatgcattagctctttatgatacaattgcgaataaaaaaataccgtcaccaaaagattggctttcctatgtagaaaaattatctgacattccatatattattagaaatgactctcagcttaatacattctggttatcagcatgggaggaaaataataaaacctcattatctaactctattgaaaagataaaaattgaactactgaatgacattgataagatatcaaagttggtcgtaacttcaagtaatgagtgctaccatgaaattctagataggttaggttgcctgacaagtaaattccgtggctctggtattaaaactgcacttgctgcttcagcgttggcctatatgtataaagatataggtatcaaagaagcattaatttgttcagcaaatgagctagatagtgatacagataccatagcaacaatgtgtggtgcaatgctgggggcaatatgcgatacccaccctgattgggctatacaagataaagactatataatcaccgaagcattgcgcttaatgaatatgggaaatggtaatgctcaatatcaggcatttaattatcctgacattggcaactggaccccccctgttaatcaaattgatgtcgtaggtttgcataaaaataatatagcaatgatgggtcttggtgagttaataccagttaacaatgaagaatttcatgccaataatgctgtatggcaatggttttcattaccttttggtcagactattctggtcaaacgaagaaatataattaaattagagttaaatcctgagcaacttcctaaagaaataacaaatcagtttagtgattttgaaaaaaggtcacaaaagccaactatttcgtctgaagtaaaaaaccctaaatcacaatatacattacctctaaacaattgtgacacacatatcagagataatagaattaatacaagtaacgagaaggaccctctcgaccaagcaactgatgatgttattaattctaattttgatgatttgactttaggtcgattgttaaattcttgcatagattcaactcaatctatacaaatggctgtaagcttcacagcaattatagccaaagctaaaattgttcgccaacgtagaaagaattga

SEQ ID NO: 182515 - DNA, 651 bp, Klebsiella oxytoca; identical to SEQ ID NO: 159536

SEQ ID NO: 182516 - DNA, 1404 bp, Klebsiella oxytoca; identical to SEQ ID NO: 168125

SEQ ID NO: 182517 - DNA, 1275 bp, Klebsiella oxytoca
atgtcactaactgatattaaagcaaaaaatgcaaaaccccttgagaaggaatataagctaaccgatggctttggtatgttccttcgcgttacccctaaaggttcgaaatactggcaaatggcttaccgcttcgaagggaagcaaaaacttttctctatcggtgtttaccctgctgtttcacttgctgatgcaagacaacgccgtgatgaagctaaaagacttcttgctcagggcattgaccctaatgcaaagaaacaggccgaagttaaagagctgaaagccaaacgcgacaacattcgttctttcaaagctgttgccaaagcgtggttttctactaaaaagaaatggtcagaagattatcgtcataccgtattgaatcgccttgaaacctatatcttcccggatattggcaaccgagacgttaccgagcttgccactggcgatctgttagtccccataaaaaaagtagaagcccttggctatctcgaagttgctacacgagttaagcaatacgtgacgtccattttacgctatgccgtccagcaacagcttattcgctataacccggcttacgatctggaaggctccatacagaagccagaaacggaacatcgtccggcgctggagcttgaagagatcccattgctacttgaacgtattgatgcctacaaaggccgcagactgaccacgctggcgattcagcttaacctgctggtatttgttcgttccagtgaactacgcttcgccagatggtcagagatcgatttcaggagcaagctgtgggttatccccgaacagcgggaagtcatcgacggcgtgaaatattcgggtcgtggcaccaagatgaagcgtaagcacttcatccctctctgccgtcaggcaattgcgctcttgaaagaaattaaacagcttacctatgaagatggcaatgatgccggttttatcttcacaggcagctatgacagctttaaaccgatgagtgaaaacaccataaacaaggcgctacgtaagatgggctacgataccctgaaggacatttgtggtcatggcttccgcacactggcctgtagtgccttaattgagtctggtttgtggtcagaagacgctgtagagcttcaaatgagccacaaggaaagcaatagcgtccgtgcagcttatacccacaaagccaagcaccttgaccagcgccgcctgatgcttcagtggtgggctgattatctggatgcgaaccatagcggtatggtcaggccatttgagtttgcacagcgaatttaa

SEQ ID NO: 182518 - DNA, 171 bp, Klebsiella oxytoca
atgaagttcgagtccagtcagaggagccaaattctaaaaagcctgctttcaagcaggctttttgcttttctggcaataaccccgtcttacttcacccttttgctgcgcaatttaccctctgcgtgccagcgcagggcgtcaaccaccagcgtaaacgccgtcggaagatga

SEQ ID NO: 182519 - DNA, 219 bp, Klebsiella oxytoca
atggttcaaaacaaaacagataaaactttaaaacttattcgcttatcagaagtaataaggaaaaccgggttcggcaagacgtggatttataaacttatcagcgcggggaaattccccaaacaaataaaaatcggtgaaagagctgttgctttcattgaaagcgaagttgatgagtggatttataaagctataactgcttctcgtaatacatctaactaa

SEQ ID NO: 182520 - DNA, 330 bp, Klebsiella oxytoca
atgaaaaatataaatgtgcctgaaatatcatttatctttgataatgataaaactgaagttttctcaagaatggcaatggataacttagctctttatgtggaaaacatgtttaagataatgggtgatcaatttgaacgtcatctttatgatgaaaaatatatgaatatggttatggatcatattatttatatcacaaaaccagacttcctcaagtgggtgagagacaataatgttggggaatgtatttttttgattgatgaagttatggaagatttaaaatactcttatagagagttcaaaaaaatctatcctaaacttggcattaaataa

SEQ ID NO: 182521 - DNA, 312 bp, Klebsiella oxytoca
atgaataaagatctgaaaaaagaagcaaacaagatattactgcatttatctaaacaatgctttgaattgcgtgtgagttctattattcagaaccatcctgaacaagtagaacaactcaagcatgaagaagcttttatgatgaatacttataaggacagtattaaagtagcaaaacagatgttccctaaagtcgtaaggaatacattctttgatgtaaagttatcaccaagactcattgataacgattttatattgaaagcattaaaggcatttcataaacaaatggattgtatgaaagattctcaaaagtag

SEQ ID NO: 182522 - DNA, 291 bp, Klebsiella oxytoca
atgactaaaaatattgaaattaaaaatacatctactgagctgttctatgatctggcaaagcgttctttcgaagcaagctggaaaacaatgcaagatatgtgtagtgacagcatttcgcaccttgttgatgacgctgattttatgagcgcatttatacggctcactattaatcatatttgtcataactttgagaagtttactacacaagaaggaaatcaaggacaccttacagaggtcaactttgaagaggttgcagaacggcttgtgcgtaatgcttgggtgttttgttaa

SEQ ID NO: 182523 - DNA, 381 bp, Klebsiella oxytoca
atgaaaaaaaacaaaatgaataaaaaagatgaaacgatgatctttgcaatatcagtgacattaatgttatacgtaaacaggatttacgggatggcaagtgtaaatgatgaagatgttatgacttttgtaaaagaagaggatgctgttgattcactgttacgtgctcaaatgttagaaatcattaatggtttcgattattacaaaggtctttatggttcgggtaaagaaaaaaaggagcatatagatatggcagagctattggagagagtaacattttattatgacctttatatcagggatatgttgataagaaatctggaaaaaggacaatccttagttgataatggagtgctggactgggatctggacataaatagataa

SEQ ID NO: 182524 - DNA, 405 bp, Klebsiella oxytoca
atgagtgaaactctcaaggcactgaataatatccgtacactccgcgcacaggctcgtgaaacagatctggcaactctggaagagatgctggaaaaactctctgttatcgttgatgagcgccgtgaggaagaacaggcaatactcaaggaacaagaacaacgtcaggctaagcttgaagccttccgccagaaactgttagaagatggtatcgatcctgctgaactacttttagcggttggttcaactaagcctaaaaccaaatcgacacgaactccacgccctgccaaatacaaatatacagatgataatggcaatgagcagacttggactggtcagggccgtactcctaaagcaattgctactgctattgaagcaggtaaaacactggaagacttcgcaatctga

SEQ ID NO: 182525 - DNA, 480 bp, Klebsiella oxytoca
atgagaaaagtaaaaacagacaacagtgatttaatccaatatttagatacagtaaaagaactaaaaaattatattccgatagaagaataccgaaatgaatatcgtaaactatgctctgataatattccgtggattaagattaaaaaatttaagtctgcccataccgaacttcgcagactggataaaaagagagaatctcttattgaattgtttattgatgaacttaacccgataagcagttcaacagcacgaacagcagcaaaatcatcaggtaattttgatgtactgcatgagagaatgctttattccaaaacactttcagaaaaaagtgatgaagaaattgttgccttggtcgttaaacagcgtacagaagccgctctggagtttcagcgttctattgaacagagccttgagcaactctcccgcatttcgtcagagttcaaaccatcaagtcagatacgcaggaaaatgccattgtaa

SEQ ID NO: 182526 - DNA, 981 bp, Klebsiella oxytoca
atgaatgatactgttattaagataccttgggctaaatctgttgatgaaaaactcattcatattcacgatgcagttaaaggccaaaaatattattgtccgtgttgcaatgagcaattaacgtttaaggaagggaaaatcaaaaaaagacacttttcacacagaagtgacacacaatgtgatcctgagtctgtatatcacaaactagcaaaaatactcatctgttatgctgtatatgaaaatgctagaggaaatagaaaaatcacactaatcagtaaatgttttggttgtcatggtgaaaatattaaaactatcccaccacatttcttttcttcctcacacgaagaagtctctatagataactatcgctgtgatgttgtcgctgacactcaaaacagtagaaaaattgcaattgaaatttatcatacccatgagactgatgaaaataaaaaagaaaaactgtctattccttggattgagctaaaatcagaaacagtcattgaaaacccatttttgtggcgatgccatgatttccggtttcgcttaggtttttgtaaggattgtataaatcattttatggatgttatcagattatgcgataaacataaaatagatagaaacctctatactccattaaacataccgaatgacaaaaagcacaattatattgctgatataattacttgctaccgttgtaaaaaaaacacacctgtattcatccataacaatggtcctactgataaagctcctcatacaatttgttttgtcagaacacctaaagtaaagaagggttatctttccaatacctgtgtccattgtgaagcaatcatagggatacgatatattaattgggaaacaacacatattaaataccttaatgattttgaatacaccctagaatataaatggtttggttccaaattaagtaagcaaaaagagcttgatatattaagaggaaaattaatgaatataagccataaataa

SEQ ID NO: 182527 - DNA, 222 bp, Klebsiella oxytoca; identical to SEQ ID NO: 11537

SEQ ID NO: 182528 - DNA, 570 bp, Klebsiella oxytoca
atgatagaaaataagatacaaactgaagtaaagaaatcacgaagaggtctcccacgtcatactaaaaacccatttcttaatgatacaaatctacatacaaaaactggtattagacgtattacaacaggaaaagaccgcttagcattagtgaatgaaaatacggaagagcacgttggcaatggtggcttctttcaggctatggaagtagataagacacagtttgttaaactttatgttgatggcgtatcggctattgaaggattgtcttcatctggtaagaaagtcttcaagattctttatcttgctatcagagataataaggatactgatactattttaatgtcatatgatattgtagatcaagatatcgtgaagatatcgagaacgacctatttcaagggcatgaaagaacttgctgataagaaatttatcgcagagactatggtacagaactattactttattaatccagactatatgtttaatggtgatcgcttgacgtttatgaaaacatattatctttccagcagtaactctaataaacccagtaacaataaggtgaaaaaatga

SEQ ID NO: 182529 - DNA, 333 bp, Klebsiella oxytoca
atgaacaacattaagattattacgctctttcatacaaataaaaaaataccatttatgacttgtattgttaaagaagttgaagaaaatgaacaaggaataaaactcactttggaaagtggtgataatatccatgtcaaagattatggctatttcttcttatcagaatcagcaaatcagtttgatcaggaacgaatgattaatacatacagaagattgatttctgaactcagccaagttagcgaagaaacaatagagcccttagttccgaagatatcgaataatatgaaaaccaatttcccggcaagtggtgtgagtgctttggaagatgattga

SEQ ID NO: 182530 - DNA, 567 bp, Klebsiella oxytoca
atgaaattacggatagtgatgcctctactgctgtctgctgccgcactgacaggatgccagcagctcaacgatggtgtgaatacagttaatggagcaatcagttcttcgttgtcttcagtaggtaaagcgctggggggaacagccaccactcaaagccttggcccggtatcatctgtatctggccttggtgctgtttgcaaagactatgaagaaaatgcaatggcagcagaaaagaaatggacaggcaaaaggatctctatcatcaatgccactgttcttgaagttacgaagggcagaagtgccagcgatatgatgacgggaatgcccaaaacagcccctaactattaccttttatttaaaacctctgatacgagttactgcggcggtatggtctggctggattactactctggtattgatgatgcagttcttacttataagaaagggcagaaaatcagcgtcaccggaactgtaaataatttcgaagtccgtgggttcgctaccgtcaacaacgccgatatggcagttcgtctggttgttctgagaaacggcacaatcaatcattaa

SEQ ID NO: 182531 - DNA, 552 bp, Klebsiella oxytoca
atgcgtaaatttttactcgtggcgggtcttgctgctcttgtatcgggatgcggtgaaaaaggcgactttgagaaagcgatcaacgcaaaaatatcacaatcaaagctgtgctactccctgcaggacaacgatattgtattcaacaaaggttttccgattaaggttaaccgtggctaccgttctgccggatacagtgccagtgatgaaatcctgaaaggacttgctgaacaagggctgctcactgtttcacaacaggcaaatgggtttagcagtgtcgatgttctggaagtaacagacaaaggccaagcggttgagttttgggatcgtaaaaatggtgcctgtattggtcatcgtgcggttgctgagataaaggaatggactgaaccgggaaacggtaatcagaaaattgttcgcgtgtcttatacatggaagttggcggatgttcctgcatgggtggacaaaaaagcgttctccagcgtcaagggtatgaatgaacctgaagacggcatgattaatcttgttaaaaccagcaatggctggaaagcgatctaa

SEQ ID NO: 182532 - DNA, 621 bp, Klebsiella oxytoca; identical to SEQ ID NO: 157457

SEQ ID NO: 182533 - DNA, 201 bp, Klebsiella oxytoca; identical to SEQ ID NO: 146290

SEQ ID NO: 182534 - DNA, 504 bp, Klebsiella oxytoca; identical to SEQ ID NO: 146291

SEQ ID NO: 182535 - DNA, 1512 bp, Klebsiella oxytoca
atggctatttttcatcttgattttaaaattgtgaaacgttcagaaggcaggtcttccgttgcgaaggctgcctatcatgctcgtacacgtataacagatgaaagaacaggtgatacatatgattacagtcgccgtactgatttatatgggcacttcatattagctccagctaacgcaccagaacacatcgtaaaagattctacagcattgtggaatgaagtggaaaaagttgagcgccagaacaatggtcaaacatcccgttatttcgatgttgctattcctgccgagttaaacaatgacgacaagaaaagacttgtccttgagtattgtcagaaaaatttcgttgataaaggcatgattgctgacatcgctttccatgatcttgatagtgataaccctcatgctcacgttatgttgaccttaaaaacaataggcccggaaggttttggcaaaaaggaaagaagctggaacgacagaaaaatgtctattttttggcgtgaatcatgggcatctatggctaacagcttcctcgctgctgctggttcatcagaacgtatcgatcatcgttctctccaagtccagcacgaggaagcgttagaaaaagcagcagtagctttagacaatgaagaacaagcgctatggcttgccaaggccgctgaaacaaatcgccctgcgatgaaacgtatccacagtgccaaatggcgtagtaaggctgctcaggagcaaagagccgcagaacaggctgttcgtgatgtagcgaagcaggaagcagttgaagtctacaaaacattcagtgagcttgatcttgaaatcatcgttgatgtcagaagctttacgattacacatcttgctgaaccagaagagattgtattaccaaaaacaagctccagttcttctgccaatgaaacgcaaagacctgtacttgtagcaccacctcctcatactcgtatgcgaggtgttaaatcctatcgtgataaatccaaagtaagtaaggttgttgctggtaagaaaccatcggtcagtatttctgattatgaaacaaatactattttgaaaacatccacctctcaaaacccaaacagggcatccagaagcgcccctgaccgtgcaagaaagcataagactactccacgtcaggataatatttttaaacgcttcacaactcttgtcatcgatttcttcaaagaaaaatttgtatgggctagatcaagcagagttaagcatgatcctgtcagtacagaacatgataaacgtattactgaaaactttgtctttgatgaagtattaggtcatcatgtttctcgtgctgaatatgagaaacaagctaagtttaaccaagatgactacaagccaacgactgacgagatcacccgtttcccaagccgtcttaagcaggatcaggcagaacacaatcaaagtgagaatctcaccccgtctgtaccacttgagcagatgggaaaggatagctatccaaagttcaggccaccgggattacgaagtagagattcgtag

SEQ ID NO: 182536 - DNA, 1002 bp, Klebsiella oxytoca
atgaaagagaagatcataaaaatatcatggggtaaaacctcagatgggaaagttatcaatgtgaatgatgctataagagataaagattattattgcccgtgctgtgatgaaaagttaacattgagaacaggaaatataaaaagaaaacacttttcacacaggaatgattctaaatgcgatccagaatctgtctatcataaactggctaagtttcttatttgttatgctatatctgaaaacgcaaaaggtaataaacaaataaaaatggtcagtaaatgtcatggttgtgataaagaacataaaaaaataataacgccttgtattttctcaaatgctaaagaagaggttcctatcgataaatatcgttgtgatgttgtcgcttacctgaacaatggtaataaagtagcaattgaggttttccatactcatgaaatagatgaggaaaaaaagaaaaacctatcaataccgtggattgagttaaaatcagaaacagtaattgaagatccttttttgtggatttgtgatgactttaaatttaaattaagtttttgtagtgattgcataaaacacttcaaaaaaatcatttctgtatgtgataagtacaaaatagacagaaaactctatacaccattgaacatacctaatgatgagaaatacaattatattgccgacttaattacatgttatcgttgtaaagctatcacgccagtattctttcataataatggaaccgaatatgatgccccacatacattaaaatttatcaagacacctaaagttccaaaaggctatttcactaatacttgcgctaaatgtggtacaatattaggcatgaaatatgtatttggggaagcatcacacataaataaacttcaagatttcgaaatttttagagacatagaattagagtccttattctacgagaaacaacagtggtttggaaatataagttctaagcaaaaagagttaaacctgataagatgtaaattaatggagaattga

SEQ ID NO: 182537 - DNA, 195 bp, Klebsiella oxytoca
atggtagatataaaaacaatcgaggatgaaatagaagatatcgaagaagagttatgctcaatggtgaactatgatgtttgtttcaattttgaagaagatttgaatgatcttgatgattataaaactacgcttgaagatagattggtgttcctgaatggggttttatcggggattcagtcaggttattacatgtaa

SEQ ID NO: 182538 - DNA, 333 bp, Klebsiella oxytoca
atgaataaaaataataaaacacatgaaatacaggtccatttcatggaggggttaataatgtctgaaagacttttaaaaaacatgtcaaaagattttaagtttgaagttttagcaagatacttctattatatctcaacgttaaatggtttttcatttgatgatattggtaaagaacacagaagtttctactatttaatatcgtttgtataccttgaggaaggtagggctgataattttttaacgtctctaatttgcagagacgatgttgtttataataaatcggtggatgagtatatttcaagcgtagatcatttatgggaagcacacgaataa

SEQ ID NO: 182539 - DNA, 1296 bp, Klebsiella oxytoca; identical to SEQ ID NO: 166389

SEQ ID NO: 182540 - DNA, 510 bp, Klebsiella oxytoca
atggaaagtaaaacaaaaaaactaagaatgggatggatacaaaatcttactgagaatgaaaaaaagataatagatgattttctggaagaagccgctaagttaaaaggtaaagcactaaataaaaaagaaaaacaaactgtcaaatttattgctcgtgatcaagtccgctcgattagaaaagagcaaaaatcaaaaaaacaaaagaagagtagagttgatatggaagaaaaagaagatgaaacaattaataccatttcaaataatgcggatgagcaaggaagattaaagatactatcagctaaagaaagagattttatcaataatgccatatatgaagaaatgaaaattaaaggtagaaagcttgtaaaatgtgaaatgaaagaagttttaaaaattgctcgaaaaaagatcctcaacaatcgtatatcttgtcagatcaaaaatgaaagaaataaagaaaggtttgaggcagagtttgaatggagaaaaccagtgccatttcgtcgttaa

SEQ ID NO: 182541 - DNA, 1278 bp, Klebsiella oxytoca
atgaaaattaaaggactacgatggtggattatcggcctggtggcgctgggcacagccattaactatctggcgcgcagctcattaagtgttgccgcctcaaccttatttactgaactgcatattactgaacagcaatattcgtgggtcattatgtcctttcaaatggcttataccgttgcccagtctttctgcggctatattctggattccatcggtttacggattggcttttttatcttcgcactggcatggtccttcgccaatatggcccatgctctggcgtttaactggcagtcgctggcctgcttccgcggcctgcttggcctgagcgaagccgccgcgatccctgcaggcattaaaaccgcatcggaatggttcccgtcaaaagagcggggcgtggcaggtggtctgtttaatatcggaacgtccgtcggtgccatgctggcaccgccgatcgtcgtctgggcgattatttcctggcactggcagttcgcttttattattagcggggggctggggattatatttgcttttatgtggttatttttatatcgctcgccggaaaaacatcaatgggtctcagatgaagaaaaagagtatattttctcaggacaggagaaagctctgcagtctgacggcgataagcgcccttcattactctccctgctgaagcagcgtaatttctggggcatcgcgatgacgcgttttttgtccgatccggtctggggaacgttaagcttctggctgccattgtatttaattcaggttcgcgatctgccgctaaaagagattgctatgtttgcctggctcccctttctcgcggcggatattggctgcgtggcgggtggcgtgctctcgaatgtgttgatcaccaagttccacattaccactgtcaactccaggcgcattgggttcactatcggcgcgctgcttatgacctcgttgtcagccgtgggatttgtcgaaaacgtctacttcgcgattgcactgatcagccttggcggctttgcgcaccagatgctgtcaaccatggcaatgacgttagcctcggatctgttcaaaaagaaccaagtcgccaccgtgagcggcatggcgggttctgcagcatggatgggccagttgctgttcaccctggtaatggggctgctggtgcatcagattggctatacgccattctttattgcgctgagcattcttgatcttatcgcagcagcgattatttggctgaccattgttgatccgcagcgcgtcgtcgcgaaacagatacagccggcataa

SEQ ID NO: 182542 - DNA, 2070 bp, Klebsiella oxytoca
atgagccagatcgatgacgccattcttgatgccctgactcacgtctcctttcctaaagggttcgctaaaggggaaccggcttccattctgacgatcgataacgtcaactatccgctttggaaagccgatgcgctagtcgtcggcagcggggccgcggggttacgcgccgccgttgaactcaagcgccgtcagcaaaacgtattattagcgaccgccggattatatatggggacctccgcctgctccggctcggataaacagacgctgtttactgccgccacagcaggcaatggcgatagctttcttaaactggctgacgcgctggccagcggcggtgccatggactacgacaccgcctatgtcgaagcagtaggttcgctgcatactttgggtgggttgcaatttcttgggcttgaactgccggaggaccgctatggggcgatcctccgctatcaaaccgaccatgatgaagccggacgcgcgacctcctgcggcccgcgcacctcgcgtctgatggtaaaggttttgctggaagaggttcagcggctcaatatcccactgttgagcggtgcgacagttatcaaactattacgccagcgcgatgaatcaggaacggaacatgtggcgggggcaattctggcgacggggtctcgcgcccataacccgtggggactggcgctggtagtcgctcccaatgtcgtcctggcgaccggcggccccggagagctctaccgcgacagcgtctaccctaataaatgctttggctcactcgggctggcgctggaagagggaatcacgctcaccaatctgaccgaaagccagttcggtatcggcacgccgcgcagcgcctttccgtggaatttatccggcacctacgtgcaggtgattccctatatctattccgtcgatagcgatggcggcgagcacaattttctcgccgactactaccgcaccacgcaggagctggcgtccaacatcttccgcaaggggtatcagtggccgttccatgcgaccagagtgatggatttcggctccagcctgctggatatggcggtagcgcatgagcagcagctggggcgcaaagtctatatggactttcaacgcaaccctgaagcggtaccgggcgatcttcccttttcgctggaacggctcgacgacgacgtgcgggcttatctggaaaacaacgatgcgctggcagcgctacccattgaacgcctgcagcgaatgaatccgctatcgatcgccctgtataaaatgcacggccacgatttgacgcaaacaccgctgcagttcgccatgaacaatcagcatatgaatggtggtattgaggtcgatatctggggtcaaacctctctgcccggctgttttgcggtaggtgaaatcgccggaacccacggagttacccgcccaggcggcgcggcgctgaatgccggacaggtctttgccatgcgtctggcgcgctatatcgcacatgcaggcaggcgcaacgcggtcgatgacgtgcctgaactggctgctcagccgctggcggaggtaaacgacgtcattctgcgagcgcagcgcaatgagtcaggccgctccctgcaaagcgtcaaggaagagatccaggcacgcatgtctgaccacggcggctttatctgccatgtcgatgccgtcaggcaagccgcacaggaggcccgcctgttggctaccgcggtggcgaaaaatgccctatcgatccgccatctggcagaaatccccgaactgtttatgtggcgtcaaatggcactgatatcagcggcggtgctgacaatgctggacgactatatctccgcaggcggcggcagccggggtgccaggatcatccttgaccccgaaggcgattgtctgccgttaacccgtaacgggcccgcgcagctatggcgttttcgaccggagcaggcgtcagacaaagagaaaaagctgacgattcattatcagcaggccaaatttattgttcggcaaaaagccctgagaagcttagccgatagtaaagatcattattttgaaaagaactggcctgattttctcaacggcaatatttatcgctag

SEQ ID NO: 182543 - DNA, 1542 bp, Klebsiella oxytoca
atgaataaagtgacctcagccgacgccgtcgccgcgctcattgaagatggcgccacgattgctatcagcggcaacggcggcggtatggttgaagctgattatttactggcggccattgaaaaacgctttctggagaccggacatccacgcgacctgacgcttatccactcgctgggaattggcgatcgcgatagcaaaggcagcaaccgtttcgcccatgcaggaatgctcaagcgaattatcgcggggcattttacctggtcgccaaaaatgcagtctctggtaaaaaacgaagagatcgaagcttactgctttcccggcggcgtgattcaggcgctgctgcgtgaaattggctccggccggccggggcttatcacccacgtcgggctgggttcgtttgtcgatccgcgccacggcggcggtaaatcgaatgcccgaaccaccgaagatatggtggaactaattgagatcgatggtgaaaccaaactacgttaccggccattcagggtgaattacgccattgtgcgcggcacctacgccgatccgcgcggcaacgtcagcctcgaagaggaagcgatcaatatggacagctactcaatggcgctggcggcacacaatagcggcggcaaggtcttcgttcaggtgcgcgatgtactggaagcaggggcaatcgcgccacgcaacgtcaccctccccggaattctggtcgatggcatcgtggagcatcgcgagcagccgcagacctacctcggcggctacgatctaacgatcagtggccaacaccgacgcctctgttccagcgatgcaatagagctggtcagccacccggtgcgccgcctgattgcccgtcgcgcggcgcgtgaactggtcgcaggcgcatcgactaacttcggatttggtatccctggcggcattcccggtatcgccctgcgtgaaggcgtaccctatcaaagtttatggctcagcgtggagcaaggcgtgcataacggcatgatgctggacgatgcgctgtttggctgcgcgcgcaacgctgatgcaattattccttcgttggatcaattcgaattctatagcggcggcggtatcgacatcaccttcctcggcatgggggagatggaccggcacggtaacgttaacgtgtcgcatcttaacggcaacctgatcggtcctggcggttttctggaaatcgcgcagaatgctcgcaaagtggtgttctgcggcactttcgacgccaaaggcagcaagatcaacgtaacaccggatggcctgcaaatagagcaatctggccagattccgaaactagtgacggaagtggaaaaaattacctttagcgccagctacgcccggcagagcggacaagaagtgctttatgtcactgaacgcgcggtatttcagctcacggaagcgggcgttgagttaatcgagatagcaccaggcgttaatgttgagcgcgatattctgccttatatggccttccgcccgataattaaccagccgcgcctgatggacagcgcgctgtttagcgcgatggaggacgcatga

SEQ ID NO: 182544 - DNA, 777 bp, Klebsiella oxytoca
atgaatgaacaacccgttctgttcagcagagcggcggcctcctgtcgcctgacgctgaatcgcgaagataaatgccacgcgattaacgaagaaatgatcgaattactcgatcgctatttaaacgaaattgaaaatgacgccacgctgcgcctggtggaattaaccgccacgggagataagtttttctgcgcgggtggcgatattaaatcctggtctgcttattcaccgctggatatggggcggaaatggattaagcgcggcaatgaggtcttctcacgcctgcgcaatttaccccagcttaccgtggcgaatattaacggtcataccatcggcggcggcattgaactggcgctgagctgcgatatccgcatcgcccgtccgacggcaaaattctccaccccggaagtgatgctcggcatggttcccggctggctgggcatcgagcgggttctcaatcaggttggcccggttgttggccgccagatgctgatgctgggccagcgcctgagcgcccaggaggcgcagtccgctggactgattaacgaggtcgtggaaaaagatgacgcggatggctggctgatgaatcagctttgcgctctgcaaaagtgcggcccggtcgccctggcgcatattaaacagctcattctggcgctggaaaataagcatgccgactactcgcatcagctgctggccggcttgatgtcagccacccaggactgccagcaggcgacgcaggcttttgctaacaaaagcccggtaagtttccagaataagtaa

SEQ ID NO: 182545 - DNA, 846 bp, Klebsiella oxytoca
atgagagatctgttgcaatgtcccgatctgttcagcatcaacaccgcgacgctcggctataaaacgcccttacccgccattattgatgcctgcgcggaacgtggtatcggcgctatagcgccgtggagaagagagcttgccggtgaaaatttagcggacatcgcccgtcagttgacggcaaataacatggcggtgtccggattctgccgcagtacttattacaccgccccaaccctgtcggaacgtaaactcgccatcgacgataaccgtcgggcgcttgacgatgccgccaccctgagcgccgcctgctatatgcaggtggtcggcgggcttgcacggggaagtaaagatttatacgaagcgcgggagcaggtgaaatacggtatccgtcagctgctacctcactccagagacgtgggcgtgcccatcgcactggagccgctgcacccgatgaccgctgccgatcgttcctgcctgtgcacattacgtcaggcgctggactggtgcgacgaactcgatcccgatggcgaatacggcctgggcgtagcggtggacgtttaccatgtctggtgggacccggacctcgcgaatcagatcctgcgggcgggaaagcgcattctggcctttcacgtctcagactggctggtgccgaccaccgacctggtcaacgaccggggtatgccgggagacggcgtcattaatattccctcgattcgtcggctagtggaaaacgccggttttaacggcgcggtggaattagaaattttctcgccgcacaactggtggcaaaaggacatcaacagcaccctggatattagcgtcgatcgtatcgcgcattattgctaa

SEQ ID NO: 182546 - DNA, 792 bp, Klebsiella oxytoca
atgagatcaaataaatccgttgccgttattaccggagccgctcgcggcattggcaaaggctgtgcgcttgaactggcccgtgcggggttcaatcttttaattaacgatcgcccggatgctgaaagcgttgaaaagctggaaaccacccggcaggagtgcattgctgaaggcgcagaagttatctgtttcccggcggatattgccgacctgtcgctgcacgaagagatgctcgacgccgcgcaaaatcaatggggccgcctcgattgcctgctgaacaatgccgggatttctgtcaaaaaacggggcgatatcctcgacatgcagccggacagctttgacgaaaacattgccgtcaacacccgtgcccccttctttctcgcccagtcgttcagcaagcgcctgctggcgcagccgaaaccggaaaatgaactcccgcaccgctcgattattttcgtcagttcaattaacgccatcatgctggcgatgaatcgcggcgagtacacaatggccaaaactgccgtgtcagccgctgctcgcctgtttgccgcccgcctgtgcgcagagcaaatcggcgtctatgaagtccgcccaggcttgattaaaaccgaaatgacggtgcccgctaccgcctactatgacgaactgattgccaaagggctggtaccttggggccgctggggtttcccggcagatatcgcttcaaccgtacgcgccatggcggaaggtaagctgatctatacctgtgggcaggccgtggccattgacggcggcctgagcatgccgcgtttctga

SEQ ID NO: 182547 - DNA, 687 bp, Klebsiella oxytoca
atgataggcatcgcgaagggtgaatggggaagcggaatgtatcttgataccagcaatgcgcaaagcttgaaagaaaagcttcttttaagcgctgtcaatgaatttgccgaatatggctacgaaggtgccagagtcgataatatcgtcaaagcggcagattgcagtaaacagaccgtgtatcaccacttcggcaataaagaaaatttgtttatcgaagttctggaatatatctggaacgatattcgtcagaaagagaaaaacctcgatgtatcaggactttcccctgacaaagcaattgaaaaaatcattgattttacttgggactactatattgaaaacccgtggtttctcaaaattgttcataatgaaaatcaaagcaaaggcgttcattatgcaaaatcaacgcgcctcccggaaattaaccactcgcatctgcaactgatggcttcgctgcttgaggaagggaagcgacaaaatatctttaaagctgatatcgatcctctccaggtcaatattagtattgccgccctcggtgggtattacttaattaaccagcatacgttagggttggtttatcacatcagcatggtttcgccgcaggctctggaagtcaggcgtcgggtcataaaagaaacgattctaagctggcttcttgtgacgcctgactctcttaacggacgcgaataa

SEQ ID NO: 182548 - DNA, 252 bp, Klebsiella oxytoca
atgatggcggtctggcgccgaaaaccagacagcgaggttatcgtacatagcgatcagggcagccagtacggcagtgacgactggcagcgcttctaccgggccaataacctggcgccgagcatgagccggcgtggcaactgctgggataatgcggtggccgaatcgttcttcagttcgctgaaaaaagaacggatcagaaaacgcatatataaaaccagggatctggcccgggcggatcttcgattacattga

SEQ ID NO: 182549 - DNA, 837 bp, Klebsiella oxytoca; identical to SEQ ID NO: 16864

SEQ ID NO: 182550 - DNA, 984 bp, Klebsiella oxytoca; identical to SEQ ID NO: 167074

SEQ ID NO: 182551 - DNA, 657 bp, Klebsiella oxytoca; identical to SEQ ID NO: 119515

SEQ ID NO: 182552 - DNA, 297 bp, Klebsiella oxytoca; identical to SEQ ID NO: 26486

SEQ ID NO: 182553 - DNA, 489 bp, Klebsiella oxytoca; identical to SEQ ID NO: 119516

SEQ ID NO: 182554 - DNA, 300 bp, Klebsiella oxytoca; identical to SEQ ID NO: 119517

SEQ ID NO: 182555 - DNA, 855 bp, Klebsiella oxytoca; identical to SEQ ID NO: 119518

SEQ ID NO: 182556 - DNA, 2745 bp, Klebsiella oxytoca; identical to SEQ ID NO: 156463

SEQ ID NO: 182557 - DNA, 330 bp, Klebsiella oxytoca; identical to SEQ ID NO: 119089

SEQ ID NO: 182558 - DNA, 684 bp, Klebsiella oxytoca
gtgaatcacgataataaactgtcatttgcggagaagctgggatacggcatgggagatgcagcctgcggtatcgtctactcttcggtaaccatgtttctgacatggttttatacggatatttacggactctccgctgccgcagtcggagtgatgttcctggtgacgcgggttctggatgcgattaccgatccgctaaccggcatcgttgcagaccgtgtgaagacccgctggggccattttcgcccgtggcttatctggtttgccgtcccttatgccgtgctggcggtaatgaccttcactactccggaatttggcgcatcgggtaaactggtttacgcctacctgacttacaccttactcatgctgtgttacacctttatcaatattccctactgcgcgctgggcggagtcatcacgcgcgatgagaaggatcgcctatcagcccagtcatatcgttttacgatctcttctctggccggtctgatggtttctgtcgcaaccctgtttctggtggattttttaggtaaagaaaataagcagtttggttttcaggcgacaatgggaatcatgggcgcgatcgctattgtaatgctggctttctgcttcttctctactaaagaacgcgtggctccagcggttgaacagcagcatacgcgaagatctccgtcagcttctggcgaatga

SEQ ID NO: 182559 - DNA, 888 bp, Klebsiella oxytoca; identical to SEQ ID NO: 172870

SEQ ID NO: 182560 - DNA, 1161 bp, Klebsiella oxytoca
atgaagtggtttgtgtttatgttcgttgccatcgcggcaacgctgatggtcccccctgaggccaatagcggatcgtttgatccggtaaccggcgcttatactacggatccgataaccgtcacgctgacgccaaagaccgttacggccagcgcgtcggtaattcctaacggtgaaaaagttctccttagcactactacgtctgccgcacgaggaggcttgttgtactggggagcgcatacctacgccactgggagtgccgctattgccacatcagccgccgctgaaattaatgccgaattagcttgtacagcaaccgccagcggaacttctcttaccgtaaacggatgttttagctttttagatgctgacgtactctatatggggaaaagcgcctcttgtaaatccttttttagtgcatcgagtaatgtaaattctttaacgatttttggcgattttgttgggcttaattttggccctggtacaagctctgtccagttgaacaagacaggtataatagacgtcaatacgacctctttcacctatccaagtatgactcgaaaagcaagttacacctggccaactttcgatatcaatctggaggcgacactatctgccaaaacgccgccttatacctatctttattgcagcgtattgcaaggtggtgtctccaggctggacaatgggactgcatttcccctttcttttacgatagtgcctgcgaccagtaaacccgcttatgccccgacgattagttactcgccggcactccctatcatcaatactaccaccgtaaatatccgcaatattgccgcgattgatattctccccgggacggtatttaacactggaactatctccgcctggcgcacaacctatatggaacaaccgcttaccgtaaccgggcagggcaatgtaatccgcccgtttatgattaacagtacaagaaactttaacgttcttgaatcctggacctgtgcgacaacagggcaaatcgattttcgaataaagcgcgacaataccaacgccaacgtctgttcgggcgccacctatacccaccccgtgcagacgccacagtcgttgacggcgcagtggaaagcgcaaagctcgaacgcctcaggcgcctggagcgccagggcaacggtcacctttacgctaccctag

SEQ ID NO: 182561 - DNA, 195 bp, Klebsiella oxytoca
atgaagaagcgtttttccgacgaacagatcatcagtattctccgcgaagccgaagctggggtacccgcccgtgaactctgccgcaagcatgccatttccgatgccacgttttacacctggcgtaagaagtatggcggtatggaggtgcctgaagttaagcgcctgaagtcgcttgagggtaagcgtacagcgtga

SEQ ID NO: 182562 - DNA, 492 bp, Klebsiella oxytoca; identical to SEQ ID NO: 142944

SEQ ID NO: 182563 - DNA, 192 bp, Klebsiella oxytoca; identical to SEQ ID NO: 121260

SEQ ID NO: 182564 - DNA, 459 bp, Klebsiella oxytoca; identical to SEQ ID NO: 101368

SEQ ID NO: 182565 - DNA, 915 bp, Klebsiella oxytoca
atgaatatcaaacagccacaatacaccttctccgcacttgccctggcggtcgtcgtcggactgagcggaccggctctggcccaatcggcggcaggttctagcccaggtgctgcagcaccctctgccgcatccaaggcggcacagccacaggtagatgacaaggccgcccgggaagccgataaaaagcgtgccgagctcactcaagacgccatcacggcgctcaccaagacccaggaggctttgaccctccttgatgcaaacaagaccaaggaggcgcttgctgcgctggaactggccagcggaaagctggaactggtattggcacgcgacgccaaacttgctttggcgccggtcgatgtacgcgtcatcacccacgatatccacgccaacgtggaatcggtaaagaaagcggtcaagttgtctcgggagttgttgggtgatggcgaggtgcaaaaggcccggcccatcgttgccaatctggccagcgaaatcgtaatccaaaccgacaaccttccgatggcaacgtacccggcagcgatcaagtcggccgcacggctcatcgacagcggcaagatcgacaacgccaaagcggaactcgcccgagcactgaacacgctggtggtgacctcggtcgcctttcctctgcccgtgctacgggctgaagccgcgatggcaaaagctgaaaagctggccgagaccgacaggcgcgatgccaggcagaacgaggagctcagcaccttgctgtcgtccgtgcgcacggagatcgagatggcgcagatcctgggttatggcaagaaggcggacttcaaacccatcttcgatcaggtgaagtccattgagcaaaagtcggctggtggcaaaagcggcaagggatggttcgacgagttgaagacgcgcatccaaaagctgttttga

SEQ ID NO: 182566 - DNA, 888 bp, Klebsiella oxytoca
atgaatgagcaaacaccgaatcccaatgcgacgaacgaaggaaaaaacgaacaggccgcggtaagcagccttcctgtcagtccagagtccaagcctgaagtcgtcacggaggtacagcctgaggttcagaaagaaacggactcgcaggcggcagacaaacgtaaacaagtcctcgatgaggcagtctcggccttgtcgctgaccaaatcagcgctggccgcacttgacggcaaggacactgcacgcgcattggcaacgctggccgaagtgacgggaaagctggagctgatcgtcgcgcgcgaacccacgctcgccctggccggcgttgatgtgcgcaccatcgtgcacgacttgttcgccaacacggaaaccattgaggcgatgaccgacgaggcgctggatgccctcaaacatggcgaggtgcaacaggctcgccacgtgctggctttgctggccagtgaaatcgtgatcacggtcaccagcatccctttggcgtcctatcccgcagccgtgaaggcagtcgtgccgctgatcgatcagggcaagatcgaagaagccaaagccgcgctgcagtcagcgctcagcacgctggtcgaggagcgcagcgtgcttccgctgcccgtcctgcgtgcgaagctgctcctgaagcgcgccgagcccctggtagaagatggtcagcgcagcgaagcatccaatgagcgcctggagacattgttgaacgaagcccggcagcagttggaaatggcagaactgctgggctatggaaaaaggaaggactttgagcccctgtacgctgaactcaagaaaatcaaggaaaagacgggagggggaggctgcggaaaaggctggctcgatgaagtcaaggcaaaactgtccaggttgttctga

SEQ ID NO: 182567 - DNA, 642 bp, Klebsiella oxytoca
atgaaaacagacaccatcgccaattccaatgcggatgaccccaccaaagcactgtgttcgctgagccaaaattggtggctttttgtgctgcgcggtgtcttggcattgatttttgcagccctcgcgttctggatgccacaatcggctctgttggccatgaccatcatgttcggcgcattttccttggtcaatggcgcgttcaacttgtttgcagcggtgcgccatatccagaaaaaagagcgctggggctggctgctgttcagcggcattgtcggcatacttacgggcgtcgtcgtcctggttgctccttgggtcgccacgatagtcttggcttcttttttatgggctagcgtgggcttctgggcgattttcaccggtgtgctggagatatccgccgccgttcggctgcgtcgggaaatcaagggtgaaatctggcttgccctcagtggactgctctcgattatccttggtgctatcgtcttgtggatattttttacccgtccggtcgagtcattcgtggccgcaggctggctgttgggtttccatgcggcagtctatggcgtcacgcttttgttcttgagttggagtcttcgcaaacgcgcctggggtaagagcgtgccaaaccaaaatctatggatatga

SEQ ID NO: 182568 - DNA, 1146 bp, Klebsiella oxytoca
atgcagatacaatatagctatcgagctatcgacaaagagtttcatgaaccttggcagagagctttgggaaatgtgatcgagcacgccctcaagccattgctcgacaaacacactaaagattcagcgcgacttcaaatcgtccttgatcgcgacaagatcaagcggcaatttctggccagtggctatatgcacctgcccggcaaaaagattgtcagcgttactgcatcacatgacgagctgacgcccctcgcgcagatgctcgcacagtcgttgttccgtcaggccaagaagcattttgaccgactgcatgctcaggatcaaatcaagcgcaaagcacgacgcgagcgcttgcgcgagctcaaggtgcggattgccgcaaaacccgcatcagccgcccatgaggccgaggtgacccgaatgcctctactgtcgaaacttgaggctgtcgcaaggcgtgagctggcttatctgcgggccgtcggcgatttaccgcgcgattatccgacgctgcgcgacgtggtggatgaagcgattgtccgagctaaggtggaatggcaatccgtgccgggggaaaaagaggcttacaccggtcttttgaagcatctgttcgccgtcctggataacgaagtggcaagcagccggcaatttggcgaattcgtttctctggacgcgccggtcgaaccggatgcccaagacgtggccgaggccatggtggaagaggaaatcttcgaattttatcagcacgatgacacactcaagctggccgatattttcgctggcagtcagcatcccgatgtcgcaacgatcgcggaacaggaggagctgattgatcggtcgagcgagttcgcttttgcatttgacctgctgaaggacatgccgcgtttgtggcggcgcatttttctgcttatccgtgtggacgggctgaatgccagcagcgtctctgaaatcctgctgatccctagtaaggaagatgctgtccgaaggtggctcatgcaggccgaagcattcatcgctgctcatctggaagaggccggagtaagcaaaaacgggaacgattggctccaaggcgttgattggtcggcattgtctgtgacccgaagcgaggcagcctcactgtggtccaaggaggcgaaccatgaagaatga

SEQ ID NO: 182569 - DNA, 441 bp, Klebsiella oxytoca
atgaagaatgatcttcacctcgtctgcccgcattgccagtccatcaaccgcgtaccgactgcgaagctatcggaacatcccaactgtggccgctgccagcagcccttgtttacgggcgagcccatcgagttgaccacagcgacgttctcgcgccacgtggagcgcagcgatctgccgctgctggtcgatttctgggcgccatggtgcgggccgtgcaagatgatggcgccacagttccagcaagcggcgcaccagctcgaaccgaggatccggctggcgaaggtgaataccgaggctgagccccacctggccgcgcagttcggtatccgcagcatcccgacgctcgccctgttccagggtgggcgggagatcgcccgtcaggccggcgtgatgggcgcgcaggacatcgtgcgctggacgtcgacgcaagtggggcgctga

SEQ ID NO: 182570 - DNA, 1710 bp, Klebsiella oxytoca
atgcagggcttgctcggcactacgctaatcctgctggcggcttgcagcctggcggcgatggccacggcggcgttcagagtgcccgccttgctggggtatctctctgtcggcgttgtactgggcccctcagtcatcggcgtgatcgcgccgggggagacgctgagctttctgtccgagctgggcgtggcgctgctgttgttcatggtcggactggaattctccctcggagacttctggctcgcccgcaggacggtgctgatggcgggcgctctgcagatgatcgccgtggccccgccgctgatcctgctattgatgtggctggggcagcccggccagagcgccgcgctgctcggcactgcggcggccatgtcgtccacggcgctggtcagccgacaactggccgaccaaggcgagctcaccacccgccacggacgcagtgccatcgccgtgctggtctttcaggacctggccagcgtgcccctgctggccttgctggcgatctgggcgcgcggcgagtcgccgaagatcgagcatgtgctgctcgaagtattcggtgtgctgctgctgttcgcggcagcggccctcgtctcgcgccgtctgttgcatggcctgctgggctgggtggcgcggcggggccacgaggaatcgttcgtgctcatctccttgtgcgtggtggtggctgccgccgctgctgcgcacgcggtcggcgtatccgccgccctgggggccttcctcgccgggatggtgctgggcgagagcgacttccggcaccacatggaaagccacctcaggccgtttcgcgatgtgttgtcgggcgtgttcttcgtgaccatcggcctgcaactggacgcagcacagattctttcggcaccgctggcggtgctggcgtggctggtggtgctggtaccggtcaagatcctgctcaatacgctggccttgcgggcgacgcgcctgtccgccctcgatgcctggcgcacgggcatagcgttggggcacggcggcgagttcgccctgctgttgttgggcacggtcttgcagcagcatctgatccccgcgaccgtcgtccaacccatgctggtcgcgctggtgctcagcatggccctggcaccgctactgatccgccatcacgatgtacttgcccggttcttgagccgcaccggcggcgtcattcagccaccccaggctgaagaagtcgagatcgccgcgcagacgacgcgatatcgagaccatgtcatcgtttgcggcgcgggcgagcttggcctgacagtcagcgagattcttcgccacgccggcgtggcgcatctgctgctggaggcggacgcgcagaaggtagaggccgcgcgtgccgccggcgcgccggtgttccatggcgatgccagtcggcccgataccttgctggctgccggcttgacgcatgcgcacttggtggtgctaacgttcgcccatgcccagcaagcgttgcgcatcgcccaggcgattgccgagcgccgtccggcgctaaccttgtgggtgtcatgcagaagtacgaccgcggccgatgcatttcgcgccatgcctaacgtgcgcgtgtatcagcaatcctttgccgcagctattgggctggcggaacaggtgatgtcgacgcttggcatgtcgaccgagttgattgaaggacacatcagcgcaatgcgccgccgtctcgacagcagccgttttccagggagttcatag

SEQ ID NO: 182571 - DNA, 498 bp, Klebsiella oxytoca; identical to SEQ ID NO: 101361

SEQ ID NO: 182572 - DNA, 699 bp, Klebsiella oxytoca
atgacccgtcatcatccgagtgatccgcgcactgtgctcttgcaacaccgctggctcaaccgcctgcagaccgggctgttggtcctgaccctggtcgggatcgcagccgcagcagggagactgccatttggggaaggctgcctgtggctcgcgctgtttgccgttgcaggtgcgttgctgctggacccggtagccgcgtcggcgctgagcttgcgcctgtaccgcgtacggaccttgcacccgcaacaagcccacgagatgtgggccctgttgcgcgagctgcccgcccgtgccggtttgcccgccacgccggtgccgcactatgtgcccagtgccgtcgtcaacgccttcgccaccggatcgaagcaggaggcatcgatcgccctcaccgatggcctgctgcgcagcctgagcccacgcgagctggcgggtgtgttcgcgcacgaggtcgcgcacatcgctaatgaggatctgcgtgtcatggggctggcggattccgtcagtcgcctcacgtgcctactggcccttatgggacagatcgcgtcctgctcagcctgcccgcgctgctggttggcgcggcggaggtctattggcctggtctattgttattggccgcatcgccccaactggccctgctcgcacagctcggcttgtctcgcgtgcgtgagttcgacgctgaccgccttgcggcggaactga

SEQ ID NO: 182573 - DNA, 1152 bp, Klebsiella oxytoca
atggcctatctcgacccgtaccaacgccccgcgccggaccgcttcgtccggcgctggctcttcatcaccgcctgtattgccgcgctcatgctgctgtggcagtttctgcccgccatcgaggcctggttcagtccgcgcgaggcagcagaacgcaccgtgatggcgcgtggcgatctggcggcggacgagaaaaccaccatcgaactgttcgaaaaatcgcgcgcctcggtggtctacatcaccaccgcgcaattagtacgcgatgtctggacgcgcaacgtgttctccgtgccgcgcggcactggctcgggcttcatctgggacgacgccggccacgtcgtcaccaacttccacgtcatccagggcgcgtccgaagccaccgtcaaactggccgacggccgcgactaccaggccgcgctggtggggacgagccccgcgcacgacatcgccgtgctcaagatcggcgtcggtttcaagcgcccgccggccgtgccggtcggcaccagtgccgacctcaaggtgggtcagaaggtgtttgctatcggcaaccccttcggcctggactggacgctcaccactggtatcgtctccgcgctcgaccgctcgttgccgggagaagcgggcggcccggccatcgatcacctgatccagaccgacgccgccatcaaccccggcaattccggtggcccgctgctcgattcggctgggcggctgatcggcatcaataccgccatctacagtccgtctggcgcctcggccggcataggctttgcggtgccggtcgataccgtcatgcgcgtggtgccgcaactcataaagaccggcaagtacatccgtccggcgctgggcatcgaggtggatgagcagctcaacacgcgtctgcaggcgctgaccggcagtaagggcgtattcgtattgcgcgtgacgccgggctcggcggcgcacagggccgggctcgtcggcgtcgaggtcaccgcaggcggcatcgtgcccggcgatcgcgttatcagcatcgacggtatcgccgttgacgacgtcaccaccttacaggcccggctagacgacaagaacgttggagatgttgtggtcttgttagtggagcgggccggcaagactcgcgagatgcttgtggaactacaaccgggagtttga

SEQ ID NO: 182574 - DNA, 981 bp, Klebsiella oxytoca
atgaagcagatgaccttcgccgacgccgagtatgccggcaagggcaagcagacccgcaaggaactgttcctgatcgagatggatcaggtggtgccgtggaaagggctgattgccctgatcgaaccgcattatccgaaaggcgaaggtggtcgcccggcgtatcccttgatggcgatgctgcgtatccatctgatgcagaactggttcggctacagcgatccggccatggaagaagcgctgtacgagacgaccatcctacgtcagttcgccggactgagcctggagcgtattcctgacgaaaccaccatcctcaacttccgtcgtctgctggagaaacatgagctggcagccggcatcctctgcgtgaacaatggctacctgggggatcgcggtctgtcgctgcgccagggcactatcgtcgatgccacgctgatccacgcgcccagttcaaccaagaaccaggacggcaagcgcgacccggaaatgcaccagaccaagaaggggaaccagtattactttggcatgaaggcgcacatcggcgttgatgatgaatcggggctggtacacagcgtggtgggcacggcagccaccgtggcggatgtcacccaggtcgacaaactgctgcacggcgacgagaacgtcgtctgcgccgatgacggctacacaggcgtcgaaaagcgctccgagcatgccgaccgagaagtgatctggcaggtcgcagcacgccgcagcacctacaagatgctcgataaacgcagcgccctgtacaaagccaagcgcaagatcgagaaggccaaggcgcaagtgcgagcgaaggtagagcccccgtttcgcgtgatcaagcggcagttcggctacaccaaggtacgtttccgagggctggtgaagaacactgcacaactggtgacgctgtttgccctgtcgagcctatggatggcccgtcgacatttgctggcaagcgcaggaaaggtgcgcctgtaa

SEQ ID NO: 182575 - DNA, 279 bp, Klebsiella oxytoca
atgagcggtaagcgttatcccgaagagtttaaaattgaagcagtcaaacaggttgttgatcgcggttattctgttgccagcgttgcaacgcgtctcgatatcaccacccacagcctttacgcctggataaagaactacggtccggattcttccactaataaagaaccgtcagatgctcaggccgagatccgccgtcttcagaaagagctgaagcgggttaccgacgaacgggacatattaaaaaaaaccgcggcgtacttcgcaaagctgtccgactga

SEQ ID NO: 182576 - DNA, 321 bp, Klebsiella oxytoca
atgctcgccccgaattccgggcacactgtaggttatgtccgttacccaacgctcatccggagtatccggattgaactgtcgctggagcctgttgggcgacacgatactggcctcgcctttacgtgccctcgggctccggtatccgacctgagcctttatcccgacacgtttcatcagtcgccagactctgttcactccgcactgttgtccgctgtcccgcagatccagatggattttgcgataaccatagacgcatcccgattccagccagaactgtttaatctgtcctgtcagtctcaggtctgcctgatggcgttgtga

SEQ ID NO: 182577 - DNA, 903 bp, Klebsiella oxytoca
gtgattctgactctgacagtgattcggattccgacagcgactcggattcggacagcgattcggattcggacagtgattcggactccgacagcgactcggactctgacagcgattcggattccgacagcgattcggattcggacagtgattcggattcggacagtgattcggattcggacagtgattcggattccgacagcgattctgactctgacagtgactcggattccgacagcgattcggattcggacagcgattcggactctgacagtgattcggactctgacagcgattccgactctgacagtgattcggactctgacagcgattccgactctgacagcgactcggattcggacagtgattcggactccgacagcgactcggactctgacagcgattcggattccgacagcgattcggattcggacagtgattcggattcggacagtgattcggattcggacagtgattcggattccgacagcgattctgactctgacagtgactcggattccgacagcgattcggattcggacagcgattcggactctgacagtgattcggactctgacagcgattccgactctgacagtgattcggactctgacagcgattccgactctgacagcgactcggattcggacagtgattcggactccgacagcgactcggactctgacagcgattcggattcggacagcgactccgacagtgactcggatagcgacagcgactcggactctgacagcgactcggactctgacagcgattcggattcggacagcgattcggactctgacagcgactcggattccgacagcgattccgactctgacagcgatattgaggccaaccccgatagcaacagcccggacgttgtcgcgctggaaggtaacctga

SEQ ID NO: 182578 - DNA, 930 bp, Klebsiella oxytoca
atgaatgctcatcaaggaaaatacactcagcaactattatcccttccgatccttgagaatgtggacgatttatcacacgcccttaggcttccgaaagaagttatttcaaaatttagctttaataatgataaatattatcaccgtatagaaatgaaaaaaaaatccggtggtattcgacacatagagagtcctttaaaggagttaaaagcaatacagcgatgggttctaagatatattttagataaattgtcaccttcagtttatgcaaaaggctttgtaagaaaaaaatcaattattgataatgctaaaccgcacgagggaaatcaatacattttaaatcttgatttgcaagatttttttactaatgtcaaagcatcgcatgtatatactctgtttaaaaatataggatataataataacatagcttttatactaacatctttttgcgctaaaggggggtatttacctcaaggtgcaccgacttcacccgccttatctaaccttgtttgcttaagactggatcatcgtatatctacatattgtaaaaaacgggctttaacatacacacgctatgcagatgatctttgcatatcaggaaataaaatactaattttacaaaaagcatcttatttaataaaggatattatctgcgatgaaggattcatcattaactctaaaaaagaaaaatttctaggaccaaaggtacggcgagaggttacaggtttaaccgtcacacctagaatcactataagtaaaaaagattattgcatttatagaaaaaggatttatgatttagtaagaaatgaaataccaaataagaatgaaatcatagcaggtgtattatcttttgtcagaagcattgacaaggataaaggcagaaagctttctgagttctatcagaagcaaaatgccatcattatgaatgtttag

SEQ ID NO: 182579 - DNA, 879 bp, Klebsiella oxytoca
atgaaacttccccaacagagcatcattaacaaattttccgacctatatattaatcaaaccgtcgatgagattagagatctattaattaatggatttgatgattcacgaaaaacgatattcttatgtgggaaagataagtccgacaaaaaaagtcttcggtataaattttcgacttttctttctcaggaaaaaggaatcactcttacctatccagaagatttgtttgaagaccttctcgaaggacagggaaaaaatagtctactatccctcgaaacacaactcgcgaactctgttgacctgatagttcttatacctgaaagccccggttctttcgctgagttaggcgcattttctatggataaagccttagcaaagaaaatgcttgttatgagattgggggaatataaatcaggaaaaagctttatcaatcatggacctataaggcttgtccgaacgcatggtggtgaaatatttgacatcccgaaaagctttgatgaaaaaaatccaaaacatgtaaaagctgttcttgataaaattaaagaaacgcttccaaatggacgaaagaaaaaagagctagataatatattattatattcgaagcatgtcctccttttaatatatctttttgatgatttaaatttacgctcggtatacaaaaccatggaactgatcatggggagaaagtttgaaagtagagataatattgcctgtaaagctgcaacgcactctctcataagggctgggatgattaaccagcaagagggattatttactataactaaaacaggttataattcaataataaatagttttcatttgaaatcatcactcgctgaattaagaacaaaaattatgaataaacaatatgctagacactga

SEQ ID NO: 182580 - DNA, 405 bp, Klebsiella oxytoca
atgagtgaagctctcaaggcactgaacaatattcgtacacttcgcgcacatgctcgtgaaacagatctggcaactctggaagagatgctggaaaaactctctgctgtcgttgaagatcgtcgtgaggaagaaagtgccgtccgtaaagaacaagaagaacgtcaggctaagcttgaagccttccgtcagaaactgttagaagatggtattgacccggctgaactccttgctactgttggctcatctcagcctaaagccaaatcgacccgcgctcctcgccctgccaaatacaaatatacagatgaaaacggcaacgagcagacttggacgggtcagggccgtactcctaaagcgatagctgctgctattgaagcaggtaagacactggaagactttgcgctctga

SEQ ID NO: 182581 - DNA, 480 bp, Klebsiella oxytoca
atgagagaagtaaaaacagacaacagtgatttaatcgaatacgtaaatacagtcaaagaactaaaaaatcatatttcgatagaagaatacagaaatgaatatcgtaggctacgctctgatgatattccattgattaaggctcagaaatttaagtctgcacataccgaacttcgcagacttgaaaaaaagagagaatctcttattgaatactttattgatgagcttaacccaataagcagttcaaaagctaacacatcagcgaaatcatcaggtaatcttgacctgtttaacgaacgtgtattatatcgtaaagtaatctcagaaaagagtgatgatgaaataattgccttagtcataaaacagcgtacagaagccgctgttgagttccagcgttccatagaacaaagtcttgagcaactctctcatatctcgtcagagttcgagccatcaagccaaaagcgcaggaaaatgtctctttga

SEQ ID NO: 182582 - DNA, 681 bp, Klebsiella oxytoca
atggcgtctatagatgaaagatttcttgattttattagatctaggaaaaacaatatagtattggacgatataaaggatgatttcaaaaaaaatgatggtactaactcgaaaatggcagattatttgttgttcaataaagatgttattttagaaaaaaaattgctaacaaatgatagaactgatttaataaatgaaaaacttaatgagctagccaagaccgatgaatggctcaaaaggagctggttcggtagagttcatattgaggaattgattcgaaagcaccctgagtcagatgctttcagaaaaaagataatggattatgcttatagaaatataaaagatcttgtggccaccgccaatagacaaattagagcaacaaaggaatctttaaatattcctagagcagtcggtggacttgttattcttaatgaatcgataatgccttatgaatctgaaaatgtaatgacagaacttaatttccttgttgagaatccacattatgaacatgttgattttgtgctctatatatcagagctacgtagatcaacacataatatgattgatatttcagcaatgataaaaagtaaatcctctagatatgagtttgtaaactggtatataaaaaacgtattctcattcgatttcgcttcattttttaatcaccccatacagtttttataa

SEQ ID NO: 182583 - DNA, 564 bp, Klebsiella oxytoca
atgatagaaaataagatacaaactgaagtaaagaaatcaagaagaggtctcccacgtcatactaaaaacccatttcttaatgatacaagtctacatacaaaaactggcgtcagacgtattactacaggaaaagatcgattagcattagttaatgagagtacgggagaacaagtcggtaatggtggtttctttcagtctatggaagtagacaagacacagttcgtgaagctttatgtggatggcgtatcagctattgagggtttatcctcatccggtaagaaagtattcaagatactgtatcttgctatcagagataataaagatacagatacgatattaatgtcattcgatattgttgatcaagatatcgtgaaaatatcaagaactacttatttcaaaggtatgaaagaacttgctgacaagaaatttattgctgagaccatgatacagaactattattttattaatccagactatatgtttaatggtgatcgtttaactttcatgaaaacttattacttgaaggacaaaaatgcaaaaaacaaaaagaagatagaaggatag

SEQ ID NO: 182584 - DNA, 357 bp, Klebsiella oxytoca
gtggagaaaagtgccactctgtcgaaaaaatcccggttaggcgaggcgttcgcttatgcactgaaccagtgggatgccctgtgttactactgcgatgatggtctggcagagccggataataacgctgctgagcgcgcgctacgagcggtctgtctgggcaagaaaaactacatcttcttcggcagtgatcatggtggtgaacgtggtgccctgctgtatggtctgatcggaacgtgcaggctgaacggtatcgatccagagggttaccttcgccatatcctgagcgtattgccggagtggcccagcaacaaagtggccgaactgctgccatggaacgtagatctcaccaataaatag

SEQ ID NO: 182585 - DNA, 1206 bp, Klebsiella oxytoca
atgagtcaggactatctcgcccgtatcgctgcgctggaagacgcgcttcgccagaaagacagccagctcagtctcgttgctgagactgagtcgttcctgcgttcagcgctggcccgcgcagaagagaaaatagagaacgaagagcgtgaaatagaacatctgcgggctcagatagaaaaactgcgccgaatgctgttcggtacccgttcagaaaagctacgccggcaggtcgaagaagccgaagccctgctgaaacagcaggagcagcaaagcgatcgttacaacggccgggacaatgatcagcaggttccgcgtcagttgcgccagtcccgtcatcgtcgcccgttaccggaacatcttccccgcgaaataaacagactggagccagctgaaaccagctgtcctggttgcggtagtgatatggcctatctcagcgaagtcagcgcggagcaactggagctggtctccagcgccctgaaagtgatccgcacggtcagggtgaaaaaggcctgtacccgatgcgactgcgtcgttgaagcgccagcgccctcacgtcctatcgaccggggcatcgccgggccgggtctgctggcccgcgtgttaacggccaaatactgtgaacacctgccgctgtatcgccagtgcgaaatctttgcccgtcagggtgtggatctgagtcgtgcgctgctctccaactgggtggatgcgtgctgccggttaatggccccgctggatgaagccctctaccactacgtgatggactgccgcaaactgcatacggatgacactccggtgcccgtgctggcgccgggcagaaagaagacgaaaaccgggcgtatctggacatatgtccgtgataacagaagcgcgggttcatcagatccgccagcggcatggttcgccttctcaccggaccgacaggggaaacaccctcagcaacatcttcggcactatcatggcgtgctgcaggcagatgccttcgcagggtacgacaggttgttcagcgcagagcgtgaaggtggcccgttgacagaagcggcatgctgggctcatgcgcggcgcaaaatccatgacgtctatatcagcacccggacggccacagcagaggaggctctgaagcgcatcagtgagttatacgcgatagaagaggaaatacgcggccttccggcatctcagcggctggccgccagacggtcccgaagttaa

SEQ ID NO: 182586 - DNA, 351 bp, Klebsiella oxytoca; identical to SEQ ID NO: 140926

SEQ ID NO: 182587 - DNA, 183 bp, Klebsiella oxytoca
ttgctgacgccacggcctcacagtgctgagctgatgatggttctggacgggatcaacaactcagggctgggtaaagtatggtttgccggtagaggaattgccccggaatggccgatgaaacgtgagatgccttcatcggcatataccacccgctggaaggagctgccggttgcccgtttctga

SEQ ID NO: 182588 - DNA, 351 bp, Klebsiella oxytoca
atgatatccctcccgtcaggcacccgcatctggctggtcgccggggccacggatatgcgtaaatccttcaacgggctgggcgaacagatacaccacgttctggatgaggatcccttctccggccatctgtttatcttccggggacgccgtggcgataccgtgaaaatactctgggctgatgctgatggtctgtgcctgtttatcaaacgactggaagagggacagttcgtctggcctgctgtacgcgacggcaaaatcgcgatcacccgctcacaacttgccatgctccttgataagctggactggcgccagccaaaaatatcccgccttaactcactgacaatgttgtaa

SEQ ID NO: 182589 - DNA, 1593 bp, Klebsiella oxytoca
atgaatcacgactatctcgcccgtatcgctgcgctggaagacgcgcttcgccagaaagacagtcagctcagtctcgttgcagagactgagtcgttcctgcgttctgcactggcccgcgcagaagagaaaatagagaacgaagagcgcgagatagagcatctgcgggcacagatagaaaaactgcgtcgaatgttgttcggtacccgctccgaaaaacttcgccgacaggttgaagaagccgaagccctgctgaaacagcaggagcagcaaagcgatcgctacaacggacgggaagacgatccgcaggtacctcgccagttacgtcagtcccgccatcgtcgcccgttaccggcacaccttccccgcgagatacatcggctggatcctgcggaaaccagctgtccggaatgcggcagcggtatggcgtacctcagcgaagtcagcgtggagcagctggaactggtctccagcgccctgaaagtgatccgcacggtcagggtgaaaaaggcctgcacccgatgtgactgtatcgttgaagcacctgcgccatcacgtcccatcgatcggggtatcgccgggccgggtctgctggcccgcgtgttaacggccaaatactgcgaacacctgccgctgtatcgccagtgcgaaatctttgcccgtcagggcgtggatctgagccgggctctgctctccaactgggtggatgcctgttgccggttaatggccccgctggatgaggccctttaccactacgtgatggactgccacaaactgcatacggatgacactccggttccggtgcttgcaccgggcagaaagaagacgaaaaccgggcgtatctggacgtatgtacgtgacgacagaagcgcaggttcatcagatccgccagcggcatggttcgccttctcgccagaccggcagggaaaacatcctcagcaacaccttcgccactatcatggtgtgctgcaggcggatgccttcgcaggctacgatcggttgttcagtccggaacgtgaaggagggccgctgacagaagccgcatgttgggcccatgcccgccgaaaaatccatgatgtctatataagcactcacacagcgacagcagaagaagccctgaaacgtatcggtgagctgtacgcgatagaagaagaaatacgcggcctcacgacagaagagcgtctggcagccagacaatcgcaaagcaaaccactgctggcatcgctgcatgaatggctggtagaaaaaaatgagacgctgtcgaaaaagtcccgtctgggcgaagcgttcgcttatgtcctgaaccagtgggatgcgctgtgctactactgtgaagatggcctggcagagcctgataacaacgctgccgaacgagcccttcgtgccgtctgtcttgggaaaaagaattttatcttcttcggcagcgaccacggtggtgagcgcggagccctgctgtacggactgatcgggacgtgcaggctgaatggtatcgatccggaagcctaccttcgccatatcctgagcgtactgccggagtggcccagcaacaaagtggccgaactgctgccatggaacgtggttcttaccgataaataa

SEQ ID NO: 182590 - DNA, 174 bp, Klebsiella oxytoca; identical to SEQ ID NO: 107918

SEQ ID NO: 182591 - DNA, 969 bp, Klebsiella oxytoca
atgagtcagccaaatccactttgtgtgggcatcgatgtttccaaagccacactggacatcgctgccagcagtgatgttgctcagtttacagtcagcaatgactctgatggctttaacgcgattattaccggactgagacggcactccgttgctctggttctgatggaggccactggtgggctggaagttgcggtggcctgttcgcttcaggccgaaggttttgaggttgccgtggtcaatcccaggcaggcccgtgacttcgcccgtgcaatgggatatcttgcgaagaccgaccgaattgatgccagagtcctcacgcagatggctgaggttattaatcgtcaccctgagcggaaacgctttatcagggcactgccggatgctgaacgtcaggcccttgctgcgatggtggttcgcagacgccagttgattgcgatgttggtggctgagcgtaaccgactgcatccattccatccgcagaacaagaaaagcattaataccatcattaaagcgctggaagatgagcttgtcaggctcgagaaagaaatggacagtcacatccgtaaccactttaaagagattgctgagcgcctgagcagtatcaaaggtgtaggcaccatgaccgtttccgcgatgttggcggagattccggaactgggaacgctctcccggcgcgaaatcagtgcgcttataggtgttgctcctgtcaaccgggactcagggactatgcgtggccggcgaaccatttttggcggcagggctggcgtaagatcagcactgtacatggctgcgcttgtggcaacccgctttaatccggtgataaaaacgttttatgtgcgcctgcttgcagccggaaaggccaaaaaagtggcgctggtagcctgtatgcgtaagctgcttaccatcctgaacgcaatgctcagaaagaacgaagaatgggatgagtcgtaccaccacgttgctccataa

SEQ ID NO: 182592 - DNA, 309 bp, Klebsiella oxytoca
atgcgccagtcgctgatatacgggcttgaaccctggaaggcatcgggctgcatacgttttgccaaatctaatcgtattaattttaatcagtcttcaagatacaaggaaggcagtctcactgctgttgccgctggtgaacaggttgtacccgcgtcggagctggcatctgcgatgaagcagattaaagagctgcagcgcctgctgggcaagaaaaccatggaaaacgagctgctgaaagaagccgttgaatatggccgacaaaaaaagtggatagcgcacgtgcccttgttgccggaggatggcaaatag

SEQ ID NO: 182593 - DNA, 657 bp, Klebsiella oxytoca
atggcggtgatcaataccaaacgtgtataccgcatcatgcgtcagaatgcgctgctgcttgagcgtaaaccggaaataccgccctcgaagcgggcgcatacagggaaagtggccgttggagaaagtaaccagcggtggtgctctgacggcttcgggttcagctgtgataacggtgaaaaactgcgggtcacgttcgctctggactgttgcgatcgcgaggcactttactgggcggccagtaacggtggatatgacagtgaaaccgtgcaggacgtcatgctgggtgccgtggagcgtcgtttcggtaacagcctgccgacatcccccgttgagtggctgacagacaacggttcagcctaccgttcttatcagacgcgtcagttcgccagaatggtaggactggagcctaaacatacggcggtacgtagcccggaaagcaacgggatggcagagagcttcgtgaaaacgatgaagcgcgattacatcagcatcatgccgaaacccgacgggttaacagcggtaaagaaccttgcggaggccttcgaacattacaacgaatggcatccgcatagtgcgctggggtatcgttcgccacgggaatatctgcggcggcgaaccagtaatgggttaagtgataaaaagtgtatggaaatatag

SEQ ID NO: 182594 - DNA, 264 bp, Klebsiella oxytoca
ttgcgatcgcatattgtctacagtatgcgacatgcgtcacaaccggacaccggtatacgtttgctgttctacaaggacgatgagaggagttctgacgtagacccggattatagcggcatgcataactacaccacgtatgaagaacatgtgcgctatgtagaactaccgcagcatgagcatgaaaatcatcatcacgataaggagggcacggcaagtgatgttctggaaccaaaaaaagaaagagaaagcagcaaccggcaatga

SEQ ID NO: 182595 - DNA, 654 bp, Klebsiella oxytoca
atgttctggaaccaaaaaaagaaagagaaagcagcaaccggcaatgaaaaaaagcgcttcgatcacctgctttcggtggccgagaaattacctgtcatgacgctgcccgatctcattcgcgctatcgtgcgaccaatacagagtgatttcttgctggcggtagccgaggaaggaacagatgcccgaccaaatatgacccctgaaaagttcttctttgaagagcttatccatgtgaaatcgtatgaaaagatgaaagaacatgagatggacggcgctgattaccagttgtcactggcaagtgatatggtgctgccgtggccttggagcctacaacgctttatcaataacgtttcacgtattggaagctataaggggaagccgtggaagcaggataatagcaatcattatgttgagctatggttgccctggcgtattggctttgtgggtggcggaaatcattcaataacggctggcattctggccggagaagggacgctaatccctgagcacgtttacgatatgtcctggctgtttgagctggtccgaacggacggtaatcactggtttgttgacgatcataaggtcgaagcggttaagtcggggcgttcagctgcggtgtttgagatagggcggctattagtggaaggagcttaa

SEQ ID NO: 182596 - DNA, 1098 bp, Klebsiella oxytoca
gtgaagaaagtaaaccaagaaatatctaacgatatcagtaggaagagtgatttttcttttgaagtgacaggacaaacaggcaaagttactcacttcgcacctgggaacacaggcactgttcaacccgttgcgctgctaagactaggggtatttgtcccgactcccctggctacaggcaaaacacattccattgataaagtcgtgactatggacgtgtcaaacgagctccagcatatggaggtcgcttccagtgaagggtacaaggagatctccctgtcgagcccccggttggatatgaacaccgattttcgagtctggctgggaattgtcaggacgattcacgattttaacgatgtctcagtttcgggaagaataaaattacctttctcaatgttcctcaaaaactgtggatttgacccagcacgatcgaataagcacatgaaagcacgtatcgacgcctcgatggttaagctaagaatggtgacctttcagttcagaaacgaagattccacgcttattaccggcctgataaactgggcacgttataacatcaaaaccaatgagatcgagatagaaggtgacccccgcatcaaagagctttacgcgattgattataaggtttttttgcggcttaaggcactggacagcttacaacgaaaagagtctgcacaggcgttgtatacatatctggcgagcttgcctaagaacccggccccaatcagcatgaagcgattccgagaccgactgcggttaacttcccgcgtctccgctcagaatgaaattatacgtcgctcacttcatgagctacatgagataggttatctgcaataccatgaagagaaggtcggtagaaacatcaaatttcatatcctaaaaagaagcccatctctcggtgcgaaaaaggaacctattctggcacccgcgcaaaatgccccgatcctggatgactcgttgctggaaaaactgaaaatgatgaaagcagctgggtttaccggcgaagagattgctgcagttcttgtttccatcgataagatgaaaaagataaacggcacgaaaaatgatgaagaggccgaagacgcggattttagcgaggagtga

SEQ ID NO: 182597 - DNA, 147 bp, Klebsiella oxytoca
atgagactcgttcatttcctgattgccttccttcggacgcaaaaaaccctggggcatttcccatctaactatcaaaacgtcatcgttcgtacgttcaaggtctccggatgcgtgtatccggacctattgtcatcgttcgtacgttaa

SEQ ID NO: 182598 - DNA, 303 bp, Klebsiella oxytoca
atgaagaagcgtttttccgacgaacagatcatcagtattctccgtgaggctgaggccgggggttctgcccgtgagctctgccgcaagcacgccatttccgatgccaccttttatacctggcgcaagaagtatggcggtatggaagtgcctgaggttaagcgactgaagtcgcttgaggaagagaacgccagactcaagaagctgcttgccgaagccatgctggataagcaggcgcttcaggtggctctggggcgaagtactgacgacagaccagaagcgggaagccgtggtattgatgtgtga

SEQ ID NO: 182599 - DNA, 825 bp, Klebsiella oxytoca
atgtgtgatgcgaccggtctgtcgcaacgtcgtgcctgcaggcttacaggtttgtccctgtcgacctgccgttatgaggctcagcgtctggcggctgatgcgcatttatcagggcgcatcactgagctggcactggagcgcaggcgttttggctaccgtcgtatttggcaattgctgcgccgtgaagggcttcatgttaatcataagcgcgtgtaccggctttatcacctcagtggcctgggcgtaaaacgcagaagacgtcgtaaagggctggcaacagaacgtctgccgctgctccgtccggcggcgcccaatctgacctggtcgatggatttcgtcatggacgcactttccaccggtcgcaggatcaagtgtcttacctgcgtcgatgatttcacaaaggaatgcctgacggtcactgttgcctttgggatttcaggcgttcaggtctcgcgtattctggacagcattgcactgtttcgaggctatccggcgacgataagaactgaccaggggccggagttcacttgccgtgcactggatcaatgggcctttgagcatggtgttgagttgcgcttaatccagccgggcaagccaacgcagaacggatttattgagagctttaacggacgatttcgcgatgaatgcctgaatgagcactggttcagcgatatcgttcacgcaaggaaaatcattaatgactggcggcaggattataacgagtgtcgtccacattcagcactgaattatcagacgccatcagagtttgcagcacggtggcgaaatggaaaatgtgaaggtaaacaaaccgaccttactaactga

SEQ ID NO: 182600 - DNA, 417 bp, Klebsiella oxytoca
atgaagaaaacctggatgctcgacactaacatctgctcgttcatcatgcgcgagcagccggcagcggtgctgaagcgcctggagcaggcggtgctgcgcggtgatcgcatcgtggtctcggccgtgacgtatgccgagatgcgcttcggcgccaccggcccgaaggcctcgccgcgccatattcagctggtcgacgcgttctgcgcgcgcctcgatgccatcctgccctgggaccgcgccgcggtggatgccacgacggacatccgggtggcgctgcgcctcgccgggacgccgatcggcccgaacgacacggccattgccgggcacgccatcgcggccggcgcagtcctggtgacgaacaatgtgagagagtttgagcgggtgccgggtctggttctggaagactgggttaagtaa

SEQ ID NO: 182601 - DNA, 231 bp, Klebsiella oxytoca
atgcgcacagtttcgatatttaaaaacggcaataaccgcgccatccgtctgccccgggacctggattttgacggcgtcagcgagctggagatcgtccgggaaggggacagcatcattctgcgtcccgtccggccgacctggggctcgttcgcgcagctggacagggccgatccggactttatggcggagcgtgaggatgtggtcagcgatgaaggacgctttgagccatga

SEQ ID NO: 182602 - DNA, 1161 bp, Klebsiella oxytoca
atgaaacgaagaactcggattaactacacgccagagcagaaggcaattatctgggacagatataagcaaggtgattctctacatgatatcgccagaatgttcgacagatatcattcttccattatgcccactatccaccagacaggcggctatcgtcctcccgtgcgaaaacggcaccgattagcgctttcgcttgatgaaagagaggagatatccagagggctggtagcaaaactcagtatcagggatatcgccgccaaattatcaagagcgccctcaacgattagccgcgaggtcaggaggcacggtggtgcaaaacaataccgtgcagcaaaagccgatgctactgcgtgggaaaatgcactgagaccaaaaccttgcaagctaattgaaagccccgcattgtgtaaaatcattgcagagaagatgcatcaggactggtcgccggaacagatcgccggttggctgaaacgctgttatccggataatcaggaaatgcatgtgtcacacgaaacgatttataaaacgctttttatacaaacccggggagcattaaaaaaagagctgcagcaatgcctcagaagcggaagagcagtgcgtagatccagaacgtcatcgcttaaagggaaaggattagggtcaatccctaacacgatacctgtcagcgaaacgccaccagaggcggctgacagagccatcccaggtcactgggaaggtgacttgattcagggctcgaaaaactcctatatcatcaccctcgtagaacgtcattctcgttttattatgctggcgaagatcagagacaacaagaccataacggttatatctgcactcatcagacaagcccgggaattacctgctgagctttataaaacattaacttgggatcgtggcgctgaaatgaccagccacacacgatttactatagcgacagacattcagatttatttttgtgatcctcaatctccctggcaacgtggctcaaatgaaaatacgaacagattgctcagacaatattttccaaaaggaactgacttatcggttcacagccagcaaagacttaacagtgttgccagacagctcaacgaaaggccgagaaaaacgctagactatgaatcacccgcagaacggttcaatcaatgtgttgcatccatcggttga

SEQ ID NO: 182603 - DNA, 498 bp, Klebsiella oxytoca
atggcagagatcatcattagaaaaatgcacgaagaggactggtgtgcagtcagggaaatttatcaggaaggaattgcaacaaggaacgccacctttcagaccgcagcacctgagtggctggaatggaatgaagggcatcttcaggactgccgctacgtcgccactgttgataacagagtggtgggatgggctgcgctatctcctttttcccgccggcatgcataccgcggtgtcgcagagctgagcatttatgtcagtactcattttcagggaaaaggcgcaggcagggctttgctctccgggctgataaagggctcggaaggtgcgggtttctggacgctacttgctggcatctttccggaaaaccaggccagtgttgctttacatcgcagccagggattcagggaagtcggctgccgggaaaaagtgggtgaaatgaacggaaaatggagagatgttctcattctggaaaggcgtagccggacagtgggttgctga

SEQ ID NO: 182604 - DNA, 1752 bp, Klebsiella oxytoca
atgaaattcttacagaatatcccgccttacctgttttttactggcaagggaggtgtaggaaaaacttccatttcctgcgcgacggctatccgccttgccgaacagggtaagcgggttttgctggtcagtaccgacccggcctccaatgttggtcaggtattcgatcaggctatcggtaacacgattcgccctgtgacagcagttcctgcactttccgcactggagattgacccgcaggaagccgcccggcaatatcgggccagaatcgttgatcctatcaaaggtcttttgcctgatgacgttgttaacagtatcagcgagcagctttcaggagcctgtacgactgagattgctgcgttcgatgaattcacgggcttactaacagacgcttccctgctgacccgctttgatcacatcatttttgatacagcgccgacgggccacacgattcgtctgctccagcttcccggtgcctggagtagcttcattgaaagtaatccagatggtgcttcctgtcttggcccaatggccgggctggaaaagcagcgtgagcagtatgctcatgcggtagaggctttgtccgatcctgaacgtacccgcctggttctggttgcacgactgcaaaattctacactgcaggaagtcgcccgcactcatgaggaactggctgagattggcctgaaaaatcaatatctggtgattaatggtgtgctgcctgaagccgaagctgaacatgacgccctggccgcggcgatatggcaacgtgagcaggaggcactggcaaatcttcctgccggtttatctgagctaccgacagataccctgttactccagccagtcaatatggttggtgtttcagcattgaagggactgctggatacccgttctgaggcattaccgctcccggtaacgaatatcctgtacacgcctgaaaacttatctctctctggcctggtcgatgatatcgctcgcagtgaacacggcctgattatgctgatgggcaaaggtggtgtagggaaaaccacgatggctgctgccatcgccgtcaggctggcagacatgggatttgacgtgcatctcacgacctctgatcctgctgcgcacctgagtacaacgctgaacggcagcctcaaaaacctgcaggtcagccgcatcaaccctcacgatgaaaccgaacgctatcgccagcatgttcttgagacgaagggaagagatctggacgaagcagggaaacggttactggaagaggatttacgctctccctgtacagaagaaattgccgtgtttcaggccttctcccgtgtaattcgtgaagcgggtaagcgctttgttgtcatggataccgcccctaccggacacacgctgctgttgctggatgcgaccggggcttaccaccgagagattgccaaaaaaatggggagtaaaggtcattttactacccccatgatgcagcttcaggacccggatagaaccaaagttctgctggttacgcttcctgaaaccacaccggtcctggaagcggcaaacctgcaggctgaccttgaaagagcggggattcatccgtggggctggattatcaataacagcctttccattgcggatacgcgttctccgttgctttgtcagcgtgctcatcaggaattgcctcagattgaggctgttaaggatcagcatgctgaccgtatagcgcttgttccggtgctggcgtcagagcccgccggtattgaaaagctcagagagttgatgagctaa

SEQ ID NO: 182605 - DNA, 297 bp, Klebsiella oxytoca; identical to SEQ ID NO: 102391

SEQ ID NO: 182606 - DNA, 1227 bp, Klebsiella oxytoca; identical to SEQ ID NO: 152551

SEQ ID NO: 182607 - DNA, 327 bp, Klebsiella oxytoca
atgacgtttgatgagatcaaagaacgatttgctggagcaggtacgggaactgatgctttccgcgggctgtacaacgagaccttcgagttaatgaacgcagataaggaaaatgccgcggtttatttcttaatcggcgtggcagcacggtcatacgttctcagatatgacgaccaggccgtcgaccccgattttgcggaacaatctaaacaaacgatgagcgctttagtcgacaaaattgcctttgcacttcatcaaccagcggaagacaaaataaaaatcgccagtgaagtcgcgtctgagtatcactggaaagtcaccagtttctga

SEQ ID NO: 182608 - DNA, 897 bp, Klebsiella oxytoca; identical to SEQ ID NO: 101398

SEQ ID NO: 182609 - DNA, 1077 bp, Klebsiella oxytoca
atgaacaaaactcctgtatcagcagagaaaaacggattattgacgttgcgacggcctgacgattttcacctccatctacgtgacggtgaaatactaaaggctgttctgccctttactacaaagcagtttgcccgtgcggtggttatgcctaacctgaatctgcctgtcacaacagtggctgcaatggaagcctatcgcgaaatcatccttgccgcggtgccgcaaggccatgattttacgcctttgatgacgctatatctctgcgatgacactctgccggaagtcatacgtgtcgggcatcagaagggcattctgaccgccgtgaaatggtatcccgcaggggcgacgacccatgcagaatacggtgtcacgtctgttagtagaatacgcggctgtctcgatatacttcaggcgttggggatcccacttctcatccacggtgagagcactcgcccggacgtggacatttttgaccgggaacgcgtttttattgaagatacggtgatggaactacggtgcaattatccacagttaaaaatagtgcttgagcatattaccacccaggatgctgttcgctacatacaagagcaagaggatggcctgactgcggcaactatcacgcctcagcacctgcttttcaaccgcaatgtgctgtttaacggggggattcggccccactattactgtctgccggtcttgaaaagagagtatcaccgtcagtcgttgttgaaggccgcaacctctggtgaccgtcgtttttttgccggcacggattccgcccctcatcctcgtacggccaaactagccgcttgtggttgtgccggtattttcaatgctccatcagcactcgaatgttatgccacggcgtttgaagcggcgggtgcactgccacatctgcaagccttcgtcagtgaatatggggcaaggttttacggactgccgttaaacacggggacggtcaccttagcgcgacaaccgttgattctgcctgaaccgctggtagtgactgagcatgttcagatagacccatttcccggcgaggtctccttaaactggcgtctggtcggcaacgaataa

SEQ ID NO: 182610 - DNA, 1257 bp, Klebsiella oxytoca; identical to SEQ ID NO: 101400

SEQ ID NO: 182611 - DNA, 942 bp, Klebsiella oxytoca; identical to SEQ ID NO: 139831

SEQ ID NO: 182612 - DNA, 849 bp, Klebsiella oxytoca
atgggtgacacaagctgtttcaatcgtcatgcccgccaggtagcgtcacatcgctgcctggtgtcagagcatcgctgggttaacaaacgctataaatatttgcgcctctccgcagcggtggatctccatagcgcgaccctgcctgggcagttttatatgcttaaatgccccaatgtgaagtcgttacatcctttcctgctcaggcccatgagcgtttacggtaccgggcctgcgcctggaaccatcgagtttttgtacaatgtcgcaggggcggggacacaagggctggctgagttgcctgaaggtagtgagatggatattgtcgggccgctcggtaataccttcactctaaagcctgaattccgtcgggttatggtggttgcacgtggtgtgggccttgccactatggctcctttgctgcagcaagctgctcgtgccggtatcgttctcaccattgttatgtcggcacgaacgccggaagacctgatgcgtaatgcgttcctgcgcggcatcgatgctgatgttcattgcctttatgacagcgatggcacctcggcaatgagtgcgctggataagttactgcatgatattcttggcaagcatcaccacgacatgatttatacctgcggctcacaccgtatacttcgcctgcttcagtccatcctggaggtgttccctgatactggaggcgaggtcgcgcttgaacaacgcatggcgtgtggaatgggcgtttgtctctcttgcgtgaggccgatccagcagaacggacggattgaatttctgcgtgtctgccgtgaaggccccgtctttcctattcgttctgttgtcggggaggtggagtttgcctga

SEQ ID NO: 182613 - DNA, 1257 bp, Klebsiella oxytoca; identical to SEQ ID NO: 101403

SEQ ID NO: 182614 - DNA, 1266 bp, Klebsiella oxytoca; identical to SEQ ID NO: 139828

SEQ ID NO: 182615 - DNA, 714 bp, Klebsiella oxytoca
atggctgacaacgcatccccaaaaactgaaccgcgcaatcaacgtaacgctggcaatagccgcccgttagggatggtcatttcaaaattaaagccactttcaagtgagttctatacgcactttcatgaaaaaaacagagcctgcctgcgccagtttaacaccatttccaatgcaatttataatattttccggctgatagaaggtgaccaggcgacaagcactaaagttcagaaatggctctccggtgtttacgatgaactgtcgggtaatgtaaataccttcaaagagcagattgacaaaaatgtcgccagactgcctctggatgattcatcattcgaagggtttgactatggtgaatttgaaattcgctggaaccacccaatgacctataaattgctggatattatccggaccattaacgtcctgactcgtcaggcacatcagttgtggttatatggtcagatatcacaacaggttcatgaccgaattatcctgcaactcctgagctcactgcgggttgcgatggacaacatcactaaaatactgaacgctgaaaaccgcgtgaatggaaaatacgacgcattgccattcatccagagcattaagcggtttaaatcggtggaactttatattgccagtctcgaaactaaagcccctgttcagtccggtcacagtaacagttcggctttgttgaataaatcgaacttttgctga

SEQ ID NO: 182616 - DNA, 276 bp, Klebsiella oxytoca
gtggcttctgtttctatcagctgtccctcctgttcagctactgacggggtggtgcgtaacggcaaaagcactgccggacatcagcgctatctctgctctcactgccgtaaaacatggcaactgcagttcacttacaccgcctctcagcccggtacgcaccagaaaattactgatatggccatgaatggcgtcggatgtcgcgccagtgcacgcattatgggcgttggcctcaacacggttttacgtcacttaaaaaactcaggccgcagtcggtaa

SEQ ID NO: 182617 - DNA, 210 bp, Klebsiella oxytoca
atgacgaatggctggccgctgtatgaatcacgcctgaagggaaagctgcacgttatcagcaagcgttacactcagcgcattgagcgacataacctgaatctgagacaacatctggcaaggctgggacggaagtcactgtcgttctcaaaatcggtggagctgcatgacaaggtcatcgggcattatctgaacataaaacactatcagtaa

SEQ ID NO: 182618 - DNA, 804 bp, Klebsiella oxytoca
atgattaaattcccgactaaaaagcgcgttgatttatataaaaatgccgtcagttctgagcaattacagctggatctggctgcggctcaggaatttatgttcgatgcctgggaaactgatgacctggacgttgtgctgaaactcatcagaaaagctatcaaaaaatccccgctctgtgctgacgcatactcattctactgcgagatatccgaagagccccctgagtcaaaaatcggtactctggagacggctttatatgcggccagtgtcgcactgggtgaagattttcaggaatttgcgggcaatttctggggatttgtcgaaacgcgtccatatatgagagcaaaagcagcattggctgatgccctatgggagtcaggtaatttctacccggccatgtctcattgccacgaaatgctcaagctaaacccgaacgacaaccaggggattcgtcatttattagcgaactattatcttgaactcgaaatggtggatgatctgagcgtgctactggatgattattcaggtgatatgcgcccgtttcttcagtatacacgcgccctcctcgcctacagacagtcatcccccgatgccgatgatatcgctaaagcagctattagctctaataagcacatcccaagcttgttatcaaagtgcaaattacaaccaaagtctaacagtggatatatcacgttaggtgaaatggatgaagcaattgattatataaaccataatattaaaccttggatcagaacacctaatgctattgaatggatcatgaatatttcctcggccaataagtag

SEQ ID NO: 182619 - DNA, 1359 bp, Klebsiella oxytoca
atgttggtgaccatgtcagataaagagatccaccgtttaccggtgatacaggcagtttgtgaaaagcgtctgcgccgtcgtgatgcagcatcacagcttggcatttcagaacgtcaggcgcaacggcttattaatcgttaccgggtttcaggtgctgaaggacttgtcagccgcaaacgcggtaaacccagcaaccgtcggctgaccgaatctctcaaaatgcgtgtactcacgctgatacgtgaaaactacagtgactttggacccacactggccgcagaaaagctcagagagcgccataatatccggctttcaatcgagaccgtccgcaactggatgacgtctgacggaatctggatcccacatgcccgacgcaagtcacgggtttatcaaccccggcatcgacgtgattgcctgggggaactgatccagatcgacggctcccaccatgactggtttgaaggccgtgcaccaaaatgctgcctgctggtctttatcgatgatgccaccggccgtctgatgcatttgcggttcagcgaatcagaaacagcctttgactacatgctggctacccgggaatacattgagcagcatgggaagccggtatcactgtacagtgacaaacacgcaatatttcgcgtcagtggtccagagaatcgcaataccactgtttcccagttcggacgtgtgctttatgacctggcaatcgagcttatctgtgccaacagctctgaagctaaaggccgcgtggaacgtgcgaatcagactcttcaggatcgactgatcaaagaaatgcgtctggaaggaattaccggcattgaggcagcaaatgcctggcttgccactttcattgcagactttaaccgccgattctcacgtccggtcaggttccccaaagatttacatcgtccggtgaaggaaaaccccgatgagttaagagacatctttgcctggcatgatgtccgtaccgtgtcgaaatcactgaccttccagtacgataagatcctttatctcatggacccgacagaagaaaatagccgtcttgccggtgagaaaattaaagtgctggattatcccgatggcaccctcgccttccactacggacatcggagccttgagtgccaggcatttgataaactggcctgtgtcgaccaggggcagattgttgataacaaacgtctcgggactgtactcagactggctcaggtaaaacaggatgaacgggaaaacgaaggcaaacgggaacgaagcaaaaaatcgcccagccgtaaagctcaggtgcgcatccaggaacaactccgggcgatcaatcccgttctggcagacccgaacttgtttgtggcaagttcaaagcggtag

SEQ ID NO: 182620 - DNA, 471 bp, Klebsiella oxytoca
gtgatcctctacaggctgacgaaaacaaagtatctttctacggcctggaccggatatggtgcgaaagaggctggtgggcgctggaatagcgtgggggtgtcaatggtatatgtctccgaaacagcatcactaacgatgctggagacgctggtacacctgcatgcggcacagataatggactctttcacgctactgagtatcgatgtgcctgatgaactgatccaaagcgcaaacatggatgaattaccggacaactgggctgatgaggatgcgcctcaggaactggctgattacggagatgcctggtcatttaccaggagctcggttgcactgcgtgttccctcagccttatcgccggtagagttcaattatctgttaaatcctgagcaccctgagttttacgggatcgtgcagaaggctcaacagataccgttccggtttgatagtcgtcttaaacctgacaggaagtga

SEQ ID NO: 182621 - DNA, 444 bp, Klebsiella oxytoca
atgaaaacttttagtttgtcctcaagtccagccagaccacagcgcctctggcaggttgccgggttaaataatgctgatggtgtagcgctcctgggccaaatcaatgaaggcctggacgggaaggtggtgaaccggatcactgactgggccagaataacccagaatgacctgagaaaaatgtccggtatcccgtcaaccacatttagccgcagtgtgaaggcacgttttaacccggaacaaagtgaacgtctggtacggattatccgcgttattgatcgggcggtagatttgtttgaaggcgacagggaagccgcacagaagtggttgaacgaacctaaccgggcattgagctggaaagtgccagcagacctgatggcatccgaaactggagcctatgaggtcattaagctgattacgcgtctggagcatggggtgtactcgtga

SEQ ID NO: 182622 - DNA, 234 bp, Klebsiella oxytoca
atgctcaacgatttccgtccctgcggagttacccagctatcgttatttgatgaaggtaggtcgtatgcaaacagtgacgcgctcatgaacgtactggatacgataaacaactcaggcaaaggtaaagtatggtttgccggtcggggcatcgcaccggcgtggtcaatgaagagagatatgctctctccagcctatactacgaggtgggactcgataccgatcgctacactctga

SEQ ID NO: 182623 - DNA, 786 bp, Klebsiella oxytoca
atgggtttaccctggtttaagttgcgtgagcagcgcttcccggagcccgtgattgccttctccagtaactacgagctgtatgccagcatgagcgccagagtacatttctgcctggaggaattatcatcccgtgtcgaagagtattccatcgatgagtcttttatttgggctggtgggattgataactgcatgacgtttgaggaatacagacatcagctaagggatcatgttttccgctgcactggactgacgataggggtaggcctggcccctacaaaaacccttactaaagcctgccagtattccagtaagacctggccccagttcggaggggtactcgcactgactgcaggccagcgtaatcggatagataagatgctttctctgatgccggtagaggaggtgtggggggttggtggacgaaccacaagtaagcttcatgcaatgggcataaccactgcgctggagctggctcgtactaaccctgcattcataagacgaaacttcaccgtagttcttgaacgaacagtgagggaactacggggggaaagttgtatcgacctggaggatgccccgccaccaaaacaacagatcatatgcagcaggagctttgggcagcgtataacaacgcatgaatccatgcggcaggcaatttgccagtatgctgaacgtgctgcggaaaaattgcgccaggaacgtcagtactgcggtcaggtatcagttttcataaaaacctcgcctttttcaaaacatgaaccctattacagcaaagtctccagcgaatag

SEQ ID NO: 182624 - DNA, 2229 bp, Klebsiella oxytoca
atgatcgaatatttcgaattgggtgagcgcctcgattcatcggggcgcgatagcctttatccacaaacgatttcgctgcttaaagcatgcgagaatcatccttacgtcacagtcagagaattacgattttctgaaataaatgataactgctcggaatatctaatcattgatgctgctgatgggactgtggcttctggtaatcaagcccgtattcgtcgtaaagaacgattggctattgaggtcaatcccaaatcaagcatacctatcttggttcatgcattgcggaaagatttccctgttctttctcaccagcatgctggagaacctggctcaccacgaattctttgcctatatgaggtctcctggagcgcagttgagcgcagctggacacccgagagattccttgagcgcattttttggtggcttagagaatcggccgaactgcatctacatcgagaagatcagccacttgagcaacttttttatttgagtccctatcagctcattttgccagccaattaccccgattatcatcacgcgactgacaataagctcagtctccagatggtcagtaaggggcgaccgattattttaagggctgtaccagaacaagatacctcaagcgttaagccatttcgcttattaactattgcggttcctcctgtcgatgtttctacggtggctacatatccggataatctgggaaaattagaagaacaacttaatgaatggggaagcgagctcctaaaaccactaactgacgctgtttatgaagcaataccaagtgatggtatccgcccaacgtctggtaaaggagaaggcttacttatcctgctttgggtcccccgtctaagaaacggagaaacagaacgtacggatgtaatgggctatgttgtgcaaagttcattcggtgaacttgccactgcactagatatgctggcgccaaaaaatgagcgaggagtacagcatcgcgtacggcttcttggcggaccaattagtaccaagtggcgacaattaccgcttttaccagttgaaatacgttcggctatgaaggccacacatgcgagagacatatctgccgttgattcagagagtgcagcttttcgaggtattttagctggagttggcgctcttggtagtacattggctgatatttggattcgaatgggttgggggacatggacttttattgatccagatcggcttcttccacataatttgtctcgccatattgggtttgattgtcatattggagtctcaaaaccccatattattcagcatattgccgaatctatttatccgcatgagcccctccctcaggcgatccataaaagtattcttgatgacgatgatgatattgccaaggcagtgaatgaggctgacttagttgtggatgtcagcaccacctttgaggtgccgaggactctagcgttaaaagatgatatacccagaatagttagtctgtttctgactccatcaggtcagtctagcgtgatgttaatggaggatatagacagacaatgccgaattgatgcaattgaggggcaatactatcgggcaattttgagcagtgagtggggaagtactcacctacagcacaattatggcgatcgttgggtcggtggtggatgtcgggatatttctgtacgtatgtccagtgaatgtattcatgttcatgccggtatcctctcacgccaacttcgccagactgcactcaaaggagatgctcgattgtgtatctgggtatctgatgaaatttcaggcgcgatggatgcacatgaaattgaactccattccgtggtatctataatttctggcgaatgggttgttaaatatgaccagggcttagcgcaaaaattgcagcacacccgtttacaggcactgcctaatgaaacaggaggtgcaattgttggcataacagattttaagaacaaaacgattattctggttgacgtgttccctgaacctatcgacagtaaatcctctccagcctcctttgtccggggagaagcgggacaacaagaagcattagaacgggttcaccagttgaccgctcgtgttgtcgattatgttggcgaatggcactcccatcctcaaggtttttcagcaaaagccagtaatgaagatgataatgtaatcaaaaaattacatcagaaaatgcgtgtggagggtttacctgccgtgatgctgattgttgcggaaaacgatatcaatattgtagtcagataa

SEQ ID NO: 182625 - DNA, 519 bp, Klebsiella oxytoca
atgaatgcgaatgatgttaacaaacggaataaagaatggatgattgtaatcattattatctatctttttattttgttatgtatggcaacatacgctattggggctatgtctctaggatggttaccaacaccttacgcaccattaagggtgccactgatgtgcggagcaattgcctatataggtggttgtttatattgttttcgtgcaatttacctcaataaatgcattagaaaaaaatgggatccagattggcatgtatggtatttcattcgaccactgaccagtacaatcgcaggtgctatcagttatttattccttaaggcggggttgttagttttggagtctagttccaatgtaggagctagtgaaatgggtttctttgcgctggcatttattgctggttttaacgtcgataaatttgtcgcaaaaatcgaggaagttgcaaaggctgtctggggtattgaaaaaactcgaagctcgactaataatgatgcgaaaaattcggaaaaaaaagaatag

SEQ ID NO: 182626 - DNA, 468 bp, Klebsiella oxytoca
atgaacaacatcattcccctgcagaattcaccagaacgcgtttcgttattgccgatcgccccgggcgttgattttgcgaccgcggtggcactccggcggatggccacctcaacaggtgccacgccggcttacctcctggcgccggaagtgagcgccctcctctggtacatgccggaccagcgtcaccatatgctgttcgccaccatgtggaataccgggatccgtatcggcgaagcccggacgctcaccccggaatccttcgacctggatggtctgcggccttttgtgcgggtgctgtcggagaaagtacgggcacgccgcgggcgtcccccaaaagatgaagtgcgactggtaccgctgacggatgccagttttgtgcgtcagatggaaagctggatggtcaccacccgccccgccggcgggagccgttatggccggtcacggatgagacaatgcgcaactggctga

SEQ ID NO: 182627 - DNA, 288 bp, Klebsiella oxytoca
atgcgcaactggctgaaacaggcggtgaagcgggctgaagctgatggcgtgcatttttcgatcgccgtgacgccgcataccttccggcacagctatatcatgcacatgctttatcaccggcagcttaggaaggtcatccaggcgctggccgggcataaggatccgcgctcgatggaagtctatacccgggtatttgcgctggacatggctgccaccctggccgttccctttaccgctgacggtcgagatgccgcggagatccttcgctccctgccaccggccggctga

SEQ ID NO: 182628 - DNA, 165 bp, Klebsiella oxytoca; identical to SEQ ID NO: 177953

SEQ ID NO: 182629 - DNA, 621 bp, Klebsiella oxytoca
atggcgcaaaacatttcgtggtatggcatgatagcacccgaagagagtcaattcagggtggtaaatgtgaaaccagtaacgctatacgatgtcgcagagtatgccggtgtctcttatcagaccgtttcccgcgtggtgaaccaggccagccacgtctctgcgaaaacgcgggaaaaggtggaagcggcgatggcgcagctgaactacattcccaaccgcgtggcacaacaactggcggggaaacagtcgttgctgattggcgttgccacctccagtctggccctgcacgcgccgtcgcaaattgtcgcggcgattaaatctcgcgccgatcaactgggtgccagcgtggtggtgtcgatggtagaacgaagcagcgtcgaagcctgtaaagcggcggtacataaccttctcgcgcaacgcgtcagtgggctgatcattaactatccgctggatgaccaggatgccattgctgtggaagctgcctgcgctaatgttccggcgttatttcttgatgtctctgaccagactcccatcaacagtattatttttcccatgaagacggtacgcgactgggcgtggagcatctggtcgcattgggtcaccagcaaatcgcgctgttag

SEQ ID NO: 182630 - DNA, 213 bp, Klebsiella oxytoca
atgaacatcgaagcgaagcagtttcttaccggtagcggcagaagagtactgacaaatgagggcagacagggtatgggtggagttgctggtgtaggctcttcaaccgagaaaatgctgggctacgtcgctgaagctgtttttgaaaactgcggccaactggataaccaacagctcgatgacattatcagctggatacaactttataagtcctga

SEQ ID NO: 182631 - DNA, 279 bp, Klebsiella oxytoca
atgaaacctgacgttcgtgaagctccgattagtatccgagctaaaaaatcacagcgtgacctgatcgacatggccgcaagcctggtctcaaaatcactgactgattttatgcttgaggtcgcctgcagggaagcacagaacattctgcttgatcaacgcctgtttctcctcaatcacaaccagtttaaggcgtttatagaggagcttgacgccccaataacgccggagcgcaagacgcgaatcgataacctgatgaaccgcaaatcacaatgggaatga

SEQ ID NO: 182632 - DNA, 303 bp, Klebsiella oxytoca
atggctatgtcaggaatgcaccacgacatggctatgccggaacactgcgaacaaaacctcaccatggttcatcccatgatggcgggacacgctatgtccccgatggaagaaattgcctgtgggtactgtcatttactgattcatctgcctttcgtccagttcgtgctgacgataatgctctggctgatgttactctgcgttcatctgtctcttcctctacaggccattttctcaccgattttccgcgcctgggcacctcagcgtgcccgcgcccctcctgctgcttttctttctgcgaattaa

SEQ ID NO: 182633 - DNA, 2064 bp, Klebsiella oxytoca
atgaaaactcaacgctttgtacgtacccctcttgcagttctgattatggcattccagacgaatgccgttaatgctcaggagagtcacgatcacgcaactatggaggatgattccgttatggttgttacggctcctgcctcatcgccgctggaagttgtcacgtccccaaaaagacctcgtcagcctgtcccggcaagtgatggttccgattacctgaaaaccatccccggtttttcacagatacgggccggtggcacgaatggcgacccggttttccgcggtatgttcggatcgcgtctgcgtatcctgaccaataatggcgaaatgctgggggcctgcccggcccgaatggatgcccccagctcttatatctccccggaaagttttgaccttctgacgttgaccaaaggaccgcaaacggtcctttgggggccgggtaactctgcagggacaattcgtttcgatcgcgagcagccgcgttttgataaacccggcgtacagggaaatgccagcctgcttgctgcctcgaacaatcgctgggatgagaatgcggatatcagcctgggtagcgaagatggatatttgcgcctcatgggtaacaaatcacgttccgatgactataaggatggtaatggcgatcgcgtcccctcaaaatgggataaatggaacggcgatatggcgctcggctggacgcctgataaagataccctgattgaactgacggcagggaaaggggacggggaatcgcgttatgcgggtcgcagtatggacggctcccagttcaggcgagaaagcctgggtgccaggttcgaaaaatcaaatatcggggaggtattccagaaatttgaagcgaatgtctattacaactacgccgaccacattatggataactattcacttcgttcacccgacggtggtatgtcaggaggtatgtcggaaggaatgacagacagcggcatgggtgactcaatggatgcaggcatgtcaatggatatgaatatgccaatggcgatggaagtcgacagacgtactgttggcggtcgtatgatgggcacatgggagtgggcggatgtggagctgagaagcggcgccgatacccagctgaatacccatcgtaataaaatggataacagctgggtcaaagatgcccgtttccatgattatggtctcttcagtgaactcacctggaatacctctgattcaagcaagttagtggggggcgctcgccttgatcgtgtcctcgtggataatttttccgggaaaggctcctcagagcgaacggacacccttcctgccgggtttgtacgtttcgagcataccctcgcagaaatgccgctaatgctgtatgccgggcttgggtatacagaacgtttcccggactactgggaactgttttcccccacctacgggcctgacggcacctcagacgcgtttgataaagtgaaaactgaaaaaacgacccagcttgatattggcgcacagtattccggcaaacgtacaaacgcctgggtttctgcttatgtcggtcacgtaaatgattttatccttttccgctacgatcccaacgatgcatatatcagccaggtcgataacatcaacgccaccatcatgggaggcgaagccggtgtcagctataagctgaccgacagctggaaaaccgacgccagtctggcctattcctggggcaggaacatggaagatggtaaaccccttccgcaaatgcctcctctcgaagcccgtctgggattatcctgggaaagtggtaactggagcagtaccgggctggtacgtctggtcagtagccagcatcgggtggcgattaatgaaggtaatgtggtgggcaaagattttgacagcagcgccggttttgccgtggtttccgccaataccgcttaccgcgtgaacaagtactttaaagtgagcgccggtgtcgataatcttctggacaaggattacagcgagcatctcaacctggcgggtaacagtagctttggctactccgccaatacctccgttaacgaaccaggaagaacattctggggcaaaattaatgtgacattctga

SEQ ID NO: 182634 - DNA, 261 bp, Klebsiella oxytoca
atgttgaaaattctcaaaactccggaagggaaaaagtttcttattgctgtggcttgtgtgtttatcgttgcggtatgcgtggtgtcaaaagccgcgttccagggcgtggaagaccagtacaatctgccgatggatacctgggacacatccctgtttatcattcagggcgcatgggtggccatttacagctttatgttcaccattgtgggggcgctgcctttcgggttttactttctcggccctaaagatgattcagaataa

SEQ ID NO: 182635 - DNA, 1062 bp, Klebsiella oxytoca
atgaacagctcacgtcctgacgatatcgatgaactgaaacgtctccttgccgaacaggaggcgctgaatcgtgcccttctggaaaagctgaacgagcgtgaacgcgaaatagatcacctgcaggcgcaactggataagctgcgccggatgaacttcggcagccgctccgaaaatgtctcccgccgtatcgcgcagatggaagccgaccttaaccagttgcagaaagaaagcgatacccttaccggccgggtggatgacccggccgtgcagcgcccgctgcggcagacccgtacccgcaaaccgttccctgaatcacttccccgtgacgaaaaacggctgctgccggcagcgtcatgctgcccggaatgtggtggtgcgctgagttacctgggtgaagatgccgccgaacagctggagctgatgcgcagcgccttccgggtgatccggactgtacgggaaaaacatgcctgcacaaaatgtgatgccatcgtgcaggcccccgcgccttcgcgccccattgagcggggtatcgccggaccggggctgatggcccgcgtgctgacctcaaagtatgcagagcacacaccgctgtatcgtcagtctgaaatatacggtcgccagggcgtggaactgagccgttcactgctgtcgggctgggtggatgcatgctgccggctgctgtccccgctggaggaggcgcttcaggactatgtcctgactgacggtaaactccatgccgatgataccccggtccaggtgctgttgccgggcaataagaagacgaagaccgggcggttgtggacgtatgttcgtgatgaccgcaacgccgggtcagcgctggcaccggcggtgtggttcgcctacagccccgacagaaaaggcatccatccgcagacccatcttgcggggttcagcggtgtgctacaggcggatgcgtacgccgggttcaacgagctgtaccgcgatggccggataacggaagccgcctgctgggctcacgcccgccgtaaaatccacgatgtgcacgttcgcacgccgtcagccctgacggggctttgttga

SEQ ID NO: 182636 - DNA, 348 bp, Klebsiella oxytoca
atgatcccgctaccaacaggcaccaaaatctggctggttgccggtattaccgatatgagaaacggcttcaacgggctggctgcaaaagtgcagacggcgctgaaagacgaaccgatgtccggccatgtcttcatcttccggggccgcagcggcagtcaggttaaacttctgtggtccaccggcgacgggctgtgcctgctgaccaaacggctggagcgcgggcgcttcgcctggccgtcagctcgcgatggcaaagtgttcctgaccccggcgcagctggcgatgctccttgaaggtatcgactggcggcagcctaaaagactgcttacgtcactgactatgttgtag

SEQ ID NO: 182637 - DNA, 339 bp, Klebsiella oxytoca
atgcagaaaaatatgactcccggcaggcgtaaaggctgccctaattattctcctgagtttaacatctcaaaactggcgcttgaaaatggcattaatgccaatctgctctttaaatggcgccagcagtggcgcgagggaaagctgctattaccttcctctgagagtcctcagttacttcctgtgactctcgatgccaccgccgtacaaccagaaccgcccgctgaggactcagagctcagcatctgctgtgaggtaacgttccggcacgggacactccgcctcaacggcactgtcagcgaaaagcttctgactctgctgatacaggaactgaagcgatga

SEQ ID NO: 182638 - DNA, 561 bp, Klebsiella oxytoca
atgaccagacggttcacgctgtacgcttactcagaaactgacgacatggcggtgatcaatgccaaacgcgtataccgcatcatgcgtcagaatgcgctgctgcttgagcgtaaaccggaaataccgccatcgaagcgggcgcatacagggaaagtggccgttggagaaagtaaccagcggtggtgctctgacggcttcgggttcagctgtgataacggtgaaaaactgcgggtcacgttcgctctggactgttgcgatcgcgaggcactttactgggcggccagtaacggtggatatgacagtgaaaccgtgcaggacgtcatgctgggtgccgtggagcgtcgcttcggtaacagcctgccgacatcccccgttgagtggctgacagacaacggttcagcctaccgttcttatcagacgcgtcagttcgccagaatggtaggactggagcctaaacatacggcggtacgtagcccggaaagcaacggggagcaggtcacctcctgcttttggcttaactcgtcggttagccacgcatcaaaacggcccatatgcccttaa

SEQ ID NO: 182639 - DNA, 312 bp, Klebsiella oxytoca; identical to SEQ ID NO: 150549

SEQ ID NO: 182640 - DNA, 420 bp, Klebsiella oxytoca; identical to SEQ ID NO: 150548

SEQ ID NO: 182641 - DNA, 285 bp, Klebsiella oxytoca
atgaacgcagtaagaaaggagcggttcgagtttcgtctgcccgaagctgcgaagcgccgtattgaagaagctgctgttatttctaaagtgtccgtatctcaatttgtaatggagtctgcgacttttagagctgaaacagttattaatgaacatcgccgcttgatcgttgaagaggatgtttgggagcaagtcatggctgcccttgaacgccctccagcaccaacacaaagtatgtgtaaagcgtttgagcgttataactctgaggagagttggatttgcgattaa

SEQ ID NO: 182642 - DNA, 480 bp, Klebsiella oxytoca
atggcgaactttagctgtggagtcacacatttagatgagtttttgaaaaccgatctccacaaaatgcaggggcgtagcctattaaagggctacgttctgctttctgatgatgaaattccagaaattatggggtactacacgctgagcggtgcatcgttcgaacgagggcatttgagtaaccgcctgaggaagaaaattccttactcgaacatgccggcagtgctgttaggtcgtcttgctatcgatcaacgaattcagcgaaaaggttttggtgagttactaattgtcgatgctatccataaagtgagggctactgctggacagattggtatctatgccatgtttgttgaggcgcatcctggagcttcatctttttacacaagaatgggattcattccatcatcaatggctgatgataataaaacatttttctacccagctaatcagtttgatgatcttatctttggcgataaatgctag

SEQ ID NO: 182643 - DNA, 192 bp, Klebsiella oxytoca
atgactaaacaacagaaaacagcgctgaatatggctaaattcatccagaatcagtctctgcttctgctggagaagcttaacgagtttgatctcgatatcgaggccgacctttgtgagaaactccacgatgatgcggagcatcttttccgtacactgtcctcgagactggatgaattacaggatggtaactga

SEQ ID NO: 182644 - DNA, 423 bp, Klebsiella oxytoca
atggccagagtgtctattagtgaagcggcacggcttgttaaggttagtcgccccacaatttacaagatgattaacagtgggaaactaagttacacctctgttgtaaagcatgggaaaaacactaaagttattgatacatcagagcttattaggatttttggctcgctgtatggtggggaagacactgtaaaacatgatgtaaacggtgacgcaggcgctacagcggttaacatccttggtttacatgatttacagcataaaattgctttgcttgaagctgaaaacgatggtcttaaaggggctgttaaagctcgtgatgaacatatcgattctcttcgccaggctatgcagcttctggaacacaagcacgaaccctctccacaagttcattctccgtggtggaaattctggaaaaaatcctga

SEQ ID NO: 182645 - DNA, 3018 bp, Klebsiella oxytoca
gtggccggtgaacccgcgcacattgccgccatcgcccccggtctggcggaaaagcagtggctcgaaggccaccgcacggtgctgatttacggcggcactctgtcatcggcgccggatactgaacgcctgaccgccctgcgcaagctgcgccgcagccgtccgctggacggcatcgtgctggcgcttgatgaggcgcaggcgaccagcgctagcctggataaccatcttcgcaccctcgagcaggtcggggaggccctgcgctggcagccgccggtgtacctgtggcaggtgactgacagcgcctggccgcaggatacccgcatcagtcagacggtgggggcgctgttcccgcccggcgccacgccggagggggtggcgcaacaactccgcgccattctgccgtccctgggggaaaggggaatgcagcagctgtgcgccgacccggcccatgattatctgctgcgcctggggcgcacgctagaggggagcggcattgcccgctggcgtacgctgctgacgccctggctgacggagcgcctgcagcgcgttccgctgcgcggcctgatgttcagcccgccgctggcgccggacacgaccgccggggaggcgccacatcctcaccgctggtccgctccggcggtctggcagggagtgacggcggactgcgctcaggcgcggggcgtgcgggccggtctgccctggcagcgcgcatcgggggttatcgccctgtcgctgatggccctgtggggggcgggcagcctggtctccttcgccgttaaccgccagcatattgtcagcgcggcgcagctgctggtgagctctcccgcggtgaatgatgaacagctgatggcgctgcaggcgctgcgtaacgatatcggacggttacagcatcagcaggcgcacggcgcgccctggtatcagcgcttcgggctggaccataacgccccgctgctggcggccctgatgccgtggtacgggcaggcgaataaccggctgatacgcgatgcggcggcgcaggcgctcacaaagcagctgaacgcgctggcagacctgccgccgcgcagtccgctgcgcgagaaacgggcgaagcggggctacgaccagctgaaggcgtacctgatgatggcgcacccggagaaggcggacgccgcgttttttgcgcaggtgatgaaaaccgccgaaccgtcccgtccgggtctgtccccggcgctgtggcaggagatggcgccggatttgcacaccttttacatgcagagcctgcccgcgcagccgtcatggaaaatcacgccggatgcggcgctggtggcgcaggtgcgcagggtgctgctggagcaggcaggccagcgcaacgccgaaagcacgctctatgagaacatgctgacggccgtccggcgcaactatgccgatatgacgcttgaggacatgacgccgcagaccgacgcccgccgtctgttcagcacgggcgaggtggtgccgggaatgttcacccgccaggcgtgggaaggcgggattcaggacgccatcgacgccgccgtggcctcgcggcgcgatgaaatcgactgggtgctgagcgacaaccgtaacaccgtgtccacggatgtctccccggaggcgctgaaacagcggctgacgaaccgctactttaccgattttgccggagcgtggctgaacttccttaacagcatccggctgaatccggcgcacaacattaccgatgtcaccgaccagctcaccctgaccggcgatgtccgccagtcgccgctgattgcgctgatgaacactctggcctggcaggggcagaccggagagcagggggaggctctctctgatttcctggtgaggacggcgaaaaatctgccgggtaaggataaaaagccggtcattgaccagcaggcagccggtcctcgcggcccgctggacagcaccttcggcccgctgctgaccctgacgggccaaaacagcgcgcagaaggtgatggctgccgacagctcgctcagcttacagacctggctcacccgcatcacccgcgtgcgcctgaaacttcagcaggtggcgaacgccgccgacccgcaggcgatgatgcagcagctggcgcagacggtgttccggggccggagcgtggagctgaccgacacgcaggagtacggcagcctggtggcggccagcctcggtgaggcgtggcgcggtttcgggcagacgatgtttgttcagccgctgactcaggcccgggaggcggtactgcagccgtcggcggccagcctgaacgaggcgtggcagcgctccgtggtcgcgaactggaatgcggcgtttcaggggcgctatccctttgcggccgggaagagcgacgcttcgctgccgatgctggcggcgtttatccgccgcgataccggacgtattgaccgttttctcagtacggagctgggcggggtgctgcgccgggagggcagcgactgggtggcggacagcacccgcagccaggggctgaccttcagcccggccttcctgaacgcggtgaaccagctcagccagctgtccgatatcctgttcaccgacggcagccagggcatcagctttgagatgcagggggtggcgatgcgggaagtggtggaaacagcgctgacgcttgacgggcagacgctgcactattttaaccagctggccgactggcagcgcttccgctggccgggggtgatgaataaaccgggggcgatgctgacctggacgtcaacgacggcgggaagccgtctgtatgcaaaccacagcggcccgtggggcgtcatccggatgctggagccgatggcgcggcagaaagcgggggacgggctgtaccggctgaccgtcaccgcgccggacaggcggcagctgcagtggctgctgcgcacggagctgggcgacggtccgctggcgctgctgaaactgcgcaacttcaggctgccggcgcagatattcagcgccggtgtcccggcagccggccgcacggatgaagaggaatatgacgcggggaaggtgagtgaataa

SEQ ID NO: 182646 - DNA, 1326 bp, Klebsiella oxytoca
atgaataaatatcaggcagttattattggttttggcaaggctggaaaaacattagccgtcacgctggcaaaagcaggttggcgtgtggctctcatcgaacaatcaaatgcaatgtatggcgggacctgtattaatatcggctgtatcccaaccaaaacattggttcatgacgcacagcagcacacagattttgtccgtgccatacagcgtaaaaatgaagtggttaattttttacgtaataagaattttcataatcttgcggatatgcccaatatcgacgtgatcgacggccaggcggagtttatcaataatcatagcctgcgtgttcatcggcctgagggaaatttggagattcatggcgagaaaatttttattaataccggtgcacaagccgtggttccgccaattcctggaattaccaccacgcctggtgtatatgacagcaccggattacttaatctaaaagaattgcctgggcatttaggtattttgggcggcggatatattggcgttgagttcgcctctatgttcgctaattttggcagcaaagtaaccattttagaggcagcttcgctgtttttgcctcgggaagatcgggatattgctgataatatcgcgacgattttacgcgatcagggcgtcgatattatcctcaatgcccatgtggagcgaatcagtcaccatgaaaatcaagtgcaagtgcatagcgagcacgcccaactggcggtggatgcactgttaatagcttccggtcgtcaaccggctaccgcttcgttacatccagaaaatgccggtatcgcagtaaacgagcgcggggcaattgtcgttgacaagcgattacataccaccgcagacaatatttgggcgatgggagatgttaccggcgggctgcaatttacttacatatcactggatgattaccgcattgtacgtgatgagttactgggtgaaggcaaacgtagtactgatgatcggaaaaatgtgccttattccgtatttatgacaccgcccctgtccagggttggtatgacagaagaacaagccagagagagtggtgctgatattcaggtggtgacattgcctgtagctgcaattccgcgcgccagagtgatgaacgatacccgtggggtattaaaagcgattgttgataataaaacccaacgtatattaggggcatcactgctgtgtattgactcccacgagatgatcaatatagtgaaaatggtgatggatgccgggctgccttatagcatattacgcgatcagatatttactcatccgtcgatgagcgaatcactcaatgatctattttcattagtcaaataa

SEQ ID NO: 182647 - DNA, 276 bp, Klebsiella oxytoca
gtggcttctgtttctatcagctgtccctcctgttcagctactgacggggtggtgcgtaacggcaaaagcactgccggacatcagcgctatctctgctctcactgccgtaaaacatggcaactgcagttcacttacaccgcctctcagcccggtacgcaccagaaaatcattgatatggccatgaatggtgttggatgccgggcaaccgcccgcattatgggcgttggcctcaacacgattttacgtcacttaaaaaactcaggccgcagtcggtaa

SEQ ID NO: 182648 - DNA, 495 bp, Klebsiella oxytoca
atgggggatgctgataaagtcgctgccgctgtcggcggcgcggaccgcagccgtgcagacttcgagaatatccgggcggaattttgccagttcggagagatactttttcgcccggaacatgaacatgccgctgttccagtaatattctccggaggccagataggcctgcgcacgctccaggtccggcttctcgacaaagcgggcgacctgataaggcgtgtgctccccttcccccagcgcattgccgcgctggatatagccgtagccggtttcgggggtgttcggaacgataccgaaggtgaccagatggtcagcctgcgcatactgctccgcgacgcgaatggcgtcgtggaagacctgctgattattgatgatatggtccgctgccaggacaagcatcagcgggtcatcgccattctgcgtggcctgcagcgccgcgagggcgatggccggtgccgtgttgcggcccaccggctcgaggatgatattttttga

SEQ ID NO: 182649 - DNA, 378 bp, Klebsiella oxytoca
gtgctcggcgcggtggtggtgcatctgcatggagaacgccccgcccggcttgacggtgatacggttaacgttgaaccgcggcgtctggaccaccacatcgctgcggccccacggacggtagatttcgcggtgtcgtttgtattcgctgcgctggttggccttcaggtactccacgacctttttcacgtcctgggcgcggtttttattcatcaccagcaccgcatccttggtgctgacgatcaccaggtcctcaacgccgatagccgccaccagcttttcgtcgctgttgatgtagcagttctggctgttgtgcacccaggcatcgccggtcagcacgttgcccagctcatctttcgggctgacgtcccacagggctga

SEQ ID NO: 182650 - DNA, 204 bp, Klebsiella oxytoca
gtgaccgcgccgctggcgggcactatctggaaggtcattgccgcggaaggccagacggtggccgaaggcgacgtgctgctgattctggaagccatgaagatggaaaccgaaatccgcgccgcacaggccgggaccgtgcgcggtatcgcggtgaaatccggggatgcggtggcggtgggcgacaccctgctgagcctggtgtaa

SEQ ID NO: 182651 - DNA, 510 bp, Klebsiella oxytoca
gtgccgctgttatgttttttactgctgggctgtgatccggcagaaaaagaagcaccgcgcggcagcgggaagagcagctacgtggcggctaatctgctgggctataaccatatggcaggcacgaatatcaactggttctccgtcaacggctaccggggacacgccggggggtttacctgctgtatatcgctgccggaaaaatggcggcccaatatgcaggtggtagtggagtgggaggttaaccctaacccgtttccgaaggatctcccccacttctatgatccaaactatgaacattatatggaaaaatataaggctacctttcgtcagtataaagcggtggccactattcccgaatatgaagattcctgcggcctgcaggtgcatttcttgccctgtcagcagattaaagtaacggccacctgccacgggccgactcatcctgaccacccgattaaagaacctttcgatctgccggagcctggccagtgcccgccagaaacgccatga

SEQ ID NO: 182652 - DNA, 990 bp, Klebsiella oxytoca
atgaatattaaacgtattggtctcgacctggcaaaaaatgtcttccagatacatgccgtggatcaccgtgagcatgttgtccttcgtaaaaccctgcgccgtgaccgcatggcggcctttttcacccaactctcaccgtgccttatcggtattgaagcctgtggctctgcccactactgggcccgggagctgacccgtatggggcataccgtacgcattatcccgccccggctggttaagccttatcttaaaggccagaagaatgatgccaacgatgccgaagctatctgcgaggctgtcagccgccccgggatgcgcttcgtggcgatcagaacggaaaggcagcagacgctgcaggcggagcaccgcgtccgggccagactcatccgtgcccggacagccctgagcaatgagatacggggtctgctgggggagttcggtgtggtgttgccagcgggaatagcgcaactgcgtaaggcgctaccggagatagtgtcgcagcaggtgcagtgggatgagtgttttattcgtctgctgtgcgaactgtcagaagagctgcagggactggatgagcgtgtcgcccgccacgacaggcggcttcagcagtcagcacgggatgatatccggataaaaaggctgctggcgatagaggggatgggtccggtggtggccagtgccctggtggctgcagtgggtgatggcagacagttcaggagcggccgggaaatggcggcttatctggggctggttccgcggcagcactcaagcggaggaaaggcgcgactgggccatatcagcaagcggggggaccgctacgtgcggacgctgataatccatggagcgcgggcagtgctgaatgcgtgtcagaataaaactgacaggcgcagccagtggttgcaggggggtgtcggagagacgaaaccggaacatcgcgacggtggcgctggcgaacaagaatgcccgtatagcatgggcgctgctgagtcgtga

SEQ ID NO: 182653 - DNA, 867 bp, Klebsiella oxytoca
atgaagtatgtcttcatcgaaaaacatcaggctgagttcagtatcaaagccatgtgccgtgtacttcaggttacccgtagtggctggtacatctggcatcagcgtcgttatcaggtaaaccggcgtcagcagttccgccttgtctgtgataacgtcgtccgggaagcattcagtgacgcaaaacaacgctatggagcgccacgcctgacggatgagcttcgtgcccagggttaccggttcaacgtgaaaaccgtggctgccagcctgcgtcgtcaggggctacgggcgaaagcttcacgaaagttcagtccggtcagttaccgcgaacatggtctgccagtctcagagaatctgctgaagcaggacttttacgccagcggcccgaatcagaagtgggtgggtgacatcacgtatcttcgcactggtgaaggctggctttatctggccgtggttatcgatctgtggtcgcggtcagtcattggctggtcgatgtcctcacggatgacagcacaacttgcctgcgatgcgttacagatggcgctgtggcggcgtaaacgtccggaaaacgtcatcgtgcatacagacagaggcggtcagtactgttcaacggattaccagagcttgctgaaacgccacaatctgcgggggagtatgagcgccagaggttgttgttacgacaatgcctgtgcggaaagcttcttccatacgctgaaggtggaatgtatccacggagaggactttgtcagccgggaaatcatgcggacagcagtgtttaattatattgagtgtgattacaatcggtggcgtcgtcacagtgcctgtggcggtcttagtccggaacaatttgaaaaccagaacctcgcttag

SEQ ID NO: 182654 - DNA, 300 bp, Klebsiella oxytoca
atgacaaaaccaacatcaaccaccaaaaagccacgcaagcagcacactcctgaatttcgtcaggaagccctgaaactggctgaacgcattggggtggcagctgccgcccgcgaacttaacctgtatgaatcacagctctacaactggcgaagcaaacagcaaaatcagctctcttcttctgaacgcgagcaggaaatgtccgctgagatcgcccgtctgaaacgtcaactggcagaacgggatgaggaactggccattctccaaaaggccgcgacatacttcgcgaagcgcctgaaatga

SEQ ID NO: 182655 - DNA, 213 bp, Klebsiella oxytoca
atgttcctcggcatggggttcgtgctggcgtttctgtttctgctgattttcgccatccagggcatgtccgccgccgtcaaccgctttttccccgaaccggctgtcgcgccgaaggcggcacctgcgcccgccgccgcgcacgctgacgatttcgcccgcttaaagccggtgattgccgccgctctccaccaccatcgccgacttaacccttaa

SEQ ID NO: 182656 - DNA, 348 bp, Klebsiella oxytoca
atgttctatcagttcgttgattttaaggccagtgtgttcagttatatttatcgtgtcgtgttctggaagctggcgcactggctggcccgtaaataccgtaccggtatcgcatccttgatgagatggtggtgtaaatcaccgaaaccgggtcagagcaaaacgtgggttttatttggtaaaaccaatcacggtaagctcagcggtgaagtgctgtaccggttggtggggcaaggcaagaagctgtttcgctggcgactgcccgaaggtaaccattacctaaggacggaaaccagaaacacgtatacatcgcgctatactgcagtggcaatggcgttcgccagcgtttaa

SEQ ID NO: 182657 - DNA, 807 bp, Klebsiella oxytoca
atgtcgcaatatcaacgtgcggattgggtccgcttagcgcagtcgcccacccggattgagcgtatcgaagcctttttcggcggccacggctatgagtctcaccggcatgacacctacgccattggccagacgctctccggcgtgcaacgttttcactatcgcggaggtctgcagcacagccttcctggtggaacgatggttttgcaccccgatgaggtccatgacggcgatgccgggaccgaagaggggtttcgctaccggatggtttatattgagcccgcgctgattcaacagatcctcggcggcaggccattgccctttatccccggcggcatttccagcgatccgcgattgctgcgcgctgcgctgccgttgctgaaagacgtcaatgcggtcttcgcgcctctggaggaggaggatgcgctttacgatctggcgcagaccctggccgccgtcggcggccagcgctttcgacgccgggccttcgattatcccgccgcggaaagggcccgggagtatatccacgcctgttttgcgcagaatatcaccctcgacaccctggcgaacgtcagcggcagagaccgctggagcctgagccgtgatttcagagcgctgtttggcgccagcccctggcgttacgtgatgatgcggcgcctcgatttttgccgccagcggatgctggctggggataatctggcggatatcgcagcgcacgcaggctttgccgatcaaagccatatgacgcgccagttcatcagccgctttggcctctctcccggccgctggctcaggtttgtccgcgcataa

SEQ ID NO: 182658 - DNA, 363 bp, Klebsiella oxytoca
atgtatcaatcgattaatattgcgcagaaattcaccctctttaccgagcaatggcagccgaaggtggtggctgaaatgaatgactatcagttcaaggtggtcaggatcctcggcgactttatctggcatagccacccggaaacggatgaaacgttgatcgtactggagggcgtgttgcgcctggattttcgcgataactgtctgctgctgcaggccggtgagatgatcgttgtacctcgcggcgttgaacataaaacctcagcggaaacggaaaccaaacttatgctgattgagccacgcggcgtcctgaataccgggcacgagggcggagaacgcaccgcggtgaatgacgtctggatttaa

SEQ ID NO: 182659 - DNA, 1983 bp, Klebsiella oxytoca
atgtctggatactgtttttacaccccggatgcagagtctttgatagaaaagactcgtttaaagggatatatagattctttttgtgaaaggactaaaaaacagacttatgtagtttgtaagccattatctaaagatgatgctaaatatgactatgaaaaagctgttgctattttttcttctggcatgcagccatgctttatagatttgggggatgatgaagataagtttgatgaatatattgatgattttaaagaggatatatcttttttagcagagaaatttaaatatcgagagaaaataggcagaaaaaaacattgggaccgactttttcatgagtctaatgttgatgattttaattttgatgagttgaatataagccctaaggaagggcgagtagtcgatctaattatttctttgatcgtggggagcataaatgatgtttcaaaaatagatcttgatgcacaagatttattaagttcagtaaagtctaaaataatattatttgatacggatcagacaagttttgtttttagaactggcccgggtaaacgatatgttattcaggggctggctggctcaggaaaaacggagttgttgcttcataaattgaaagaaatatattcttctgagaacgatgaaagaattgcttttacttgccataataaaatacttgcatcctcaatgaggagtagaattcctgagtttttcgattttatgagagttgagaagcaaattgaatggaataagaaattattttgcttccattcatgggggagcggtagagatccgttttctggcctctatagatatatttgcttttgttatgatctaaccttttatagcctctcatctggctcttttgatgaggtctgtgcaaaaagtttattagaattaaaaaataagggtggtgaaataacgccatgctttgattatatttttatagatgaaagtcaagatttcggagaaagcttccttgagttatgcgagctggtaacagcaaaaaagatatttgtagcaggagatgtatttcagaatatttttcgtactatcgataatgaagtagttaatcgtgctgatatggtactaaaaaaatgttatagaacagatccgaaaaatctaatgttttctcatgccttaggtatggggctttatgaaaaacctgttttgcgttggttgaaggatgctgaatgggaagcttgtggatataactatcaggatgatggagtcaaagctactctctcaagagacccattacgtagatttgaagatataccgaatgactttaaaagcacatcgttgcatgttatcaataaaaatgaggttagttatcaaagaataataactataataaaaggcttgaaacagaaacatccaaatatcgaacaaggtgatattgctgttatatacctcgataaaggaagttatatatacaattcaatacatcgtttaagtggtgaaattgcgaaagagtttggttgggaggttaatatttcctatgagactaaaatcagggataataccaaattattcatttcaaatataaataatgcaaaaggcttggaattcccatttgttatttgttttgcatcaagattgcaaaggaatccttcgtttaggaatgctctttatactatgatggcgcgttcatttttagaaagtcatttggtgctaagtaacgaagcaaaaaatgaggttacagctgatattgagagggggcttaactttctaatggagaataactatatggaagttccggtaccttctgaagaagaaattgaagagctcaaagattttattgtgttagatgagtctatatctatagaggaatttgttaaggaatattgtaatgtaagaggtgcatctccgaggttagttgcaaaattgataagcagaatttctaccattgtaggtgattctgattacgaccttgactatttggaaaaattattacctatagaatatgaaaggtttaaagtattatga

SEQ ID NO: 182660 - DNA, 642 bp, Klebsiella oxytoca
atgagtgtatacttatttaaaacgttgccacgcaacttgcaaaactcattctgtgcagtgagaagtactgctgataatttgttcaacttgttaaaagttgctgagattattttaacttgtaacgattttagagtcgaagaaaataatgattttgatgtggccgtatacactggaggatataatcgcgttttagtaaggaagtcggatggttatttcacaatgaattttcctttcaaaatcgaagatcaaggtgatagtctttcattgatgtatgataactttcaaatggtaattgatttgagaactgtttcgatgatgcggaatgccattcaaacatgtaatctcactggatattcacatgaggaaataatactgtctttaaattcaaattttgatgctcccataagagaggctattgatgtttgtgatgcttttacatctctaatatcagaagatcatgggtattttagatttgatgatgatccgactaatgaaaatggtgctatccacccaaggttccattttgatttcttttttagaaatacagcatctgtaaaattaggtgcagatatgatgatatctcatgattttttttatcccttattcgatataaaacaagaaaaacactatattgggcgatga

SEQ ID NO: 182661 - DNA, 516 bp, Klebsiella oxytoca
atgagttttatcgcgcagcgccccgtcagacctgctgaaagtgatgtgacagacgtggacgacggcggcgcacagattgccgtcggtactttctggccgacggtaaaactccacgatctgcgcctcgcggcccgcatcgccggtgatattacgacttcccgattgatgcatatggctacggaggccgcgctgcatgtcgcggatcaactgaaggactggcggaagcaaagggaggcggaaggcgcggaatcgctggcttctgtactgctgacttccgccggtgaacccgtcgagctgattaacggcgaaagcgcaaaagtttaccgcttccggcgtgcggtctactccttcacgcgcgccagcgtactggaaggttacagggacgtcggcaccacgccaaagggcgacaaggacgcggaggctctggacaggcagatcgacgatctctggcgggatgggcgctggagtatcgcagacattcgggaagaagcccggatctatgcggagctgttctga

SEQ ID NO: 182662 - DNA, 201 bp, Klebsiella oxytoca
atgaaagtcagggcgctgcaaaacgacacggttgatcagctttgctggcgtcattacggcaaaaccgcaggtgtcacggagaaggtgctcgaagccaatccgggactgagcaaccagatatttttaaatgccgggcaggagatcgaaatgcccgtgataaccagcgaggtggaacgggtaaccgtccagttatgggaatga

SEQ ID NO: 182663 - DNA, 279 bp, Klebsiella oxytoca
atgactctggatcgtattaacgaatattttgcgtttgcaacatccgccctggtgaccggcgtgggcgtcatgaccgtcagcgaaaaactggcgctggctggccttcttctggggattgtttccgccgtccggcttgcgattcaccgccgccgcattgagcaggccagccagcgccgtaacgatttgatcgagcagattctccgccaggcgcaaacccgcaacctgtcggaccgcgagcggcagttgctggagcaactgcacggagacaaacctgcatga

SEQ ID NO: 182664 - DNA, 546 bp, Klebsiella oxytoca
atgaagaacatcatcaaaaaatgttcgattgcggtgatagtggctctgggcatttcgctggcgcccgggagcgtcagaacatcgaaagaagggcagcagaaaattgcaggttgggaagactgccgcagcacgccttattactgcacggcgggggtgttgacggttggcattggctccacgggcggcgtggaaaaccgcgaatatagcaaccaggaaatagcgcggcgctggatcaacgatctgcaacgggcggagaactgcatcaataacaatttccatggtgccgacatgccgcaactcacctttgaggctatgacggatgcggccctgaatctgggctgcactgggctgatgtggttcaccgataaaaacggacgcaagcagaggaccacgatctggaagcatgcccaggccagacaatggccgcagatgtgcaacaggctgactgatttcgtcaatgtgggcggtaagcgctccgccggcctggttaaccggcgcaatgattttaaagcctggtgcctgctgggcctgagtacgccgtcatga

SEQ ID NO: 182665 - DNA, 321 bp, Klebsiella oxytoca
atgcagaaggggagcgccgacgtgaagcaatgcaggccgcgttcaatggtgacgcgtgcgctgttactcctgtgcctgacgctgtcagtcgcagcctgcaaaaacgcgccgcccgcgccggtcattcagctggtccgtgaacccgtcccggagagtctgaccgaagagacaccacgcccggcgctggataagccagtgacctggggcgcggtggcgatattcagcgacaggctgatggatgcgcttgatgcctgcaatgctgacaaagcggcgatccgccagtgggacagcctgcgccagaacacccgaaaggagccataa

SEQ ID NO: 182666 - DNA, 636 bp, Klebsiella oxytoca
gtgagcgatcggatgttcagcgagctggataaggtctttcaggacattctcgacggcgtcagcccggcggggcgcacccgtactgcgcgcaaaattggtctggcattgcgccgtagtcaacaacgccgcatcgcatcacagaaaaacccggacggcaggcgctacacggcacgccgccgcaaagtttaccgcacccagcaggggatcaagttcgtctggaataatgaggtccgggcgctgaaaaactggcggggcgggcgcggtaaatatggccggacaatcacgggctttgatgagaaacgcagcggtatacgcaccttctaccgggccgatatcgagcgctatctggaaatcaaaacgcaatcagcgacgcagacagagacaaaaaaagcgccgatgtttacccgcctgcgcaccctgcgttttatgaaagtcagaccggacgcgggcggcgtcaccgtaggatttgatggcatcgccgcgcgcattgcccgtattcaccagtacggcctccaggatgaagttggcccgggcgcttacgcgcagtaccctgcgcgcgaactgctgggcatgaccccggcagacctgatcgctacggaaaacgccgttatcagcagtctgggcggtgtgtcatga

SEQ ID NO: 182667 - DNA, 588 bp, Klebsiella oxytoca
atgaatgccgagctgatgcgcctgctggaaaacattttgcgccagggcgtcgtggagcaaatcagcgccgacaagaaagcggtgcgcgttcgctccggcaggttgctgaccacctggatccgctggaatgtcacccgcgccggggcgttcagcatctggctgccgccctccataggggagcaggtctggataggttgcccgggcggcaaccctgaaaacgcgtttgtgattggctctgcatacagcgcagataacccgccaacgggcagcagtctgctggaaatcagcatcaccgcacctgatggcgcgcgcctgcattacgacgctgcagccgatgccggagcgctgtccgttaccggcattaaaaccgcgcatatccaggcagaaacccgcgtcacgctggacgcgcccgaggtggaatgcacagaaaaacttaaagctcgcactttcgaactgacccacggcggaacgatggccggtgatgtgatccactccggcggcgtgttgcagtcaaacgggatcaccgtacacgaacataaacacggtggcgtgcagtctggcgggagtaccacgggagacccgcaatga

SEQ ID NO: 182668 - DNA, 2328 bp, Klebsiella oxytoca
atggcatttaatttaactcgaatgactgtttatgcacttctttgtgcattagaagaagatcttcgtttaatagtaataaactatatcctaaagcctgaaaatatcagtaaaaaattacctattgaacttttagagaaagctaagcgaaggttggagaaagatattggtacagtcatggatggtgttgagtatattgatttagttgattatttcgatttgggtgatacatatcaagttataaactctaatggcaaagatattcctgaaaatatttttaagtttgtgaaatcaatcaccaaggatttagatactctagtcttaataagaaatagagtgatgcatataagacctttagatgttgaagattatcctactatagtcacgatttgtgataagatcataaagtcagagataaattgttgggggaatctgagggaggttgtagaaaaagtaaatagtaacccgagctttttactttcgatggaaattaaaaactatgatgaagaaaaaaataatcacaacttgccacttcctgattttgatgaaacaggattaattggaaggcaagagcaggttataaaagtaaagcaactatgttatggagcgtttcctgtaatttctattgtgggtgagggaggggtcgggaaaacagctttagctctgaaggttgcatatgaaatattggaggatgataacaatccttttgatgcaatagtatgggtttcatcaaaaaccacacaaataacagttaatgaaataaaagagatcaaagatgcgatttctgattcaattggagttattcaagaaatatcaaatcagctcataggtgtgaattcacatcagtcaaattttaatgagataattgagtatttaacaacctttagaattattttgtttatagataatcttgaaacaattctagatgataatatacgtgattttgttggtgcgcttcctcagggaagcaagatagtgataacttcaagaattggtctcggtgcatttgaatatcctgttaagctgcagggtattgatgagtctcatgcttctcagcttatgaggattttgtctaaaataagaggggttagctcgctggagaaagttgaagagaaggtaatgagaagttatgtaaatcggatgtcacgaaatccaagttacattaagtggttcgtcagttcagtgcagacaggtctaagccctgaaactgttcttcaaaactcaaatatgtttctagatttctgtatgtcgaatgtgtatgagtatctatcacccgatgcccggattctgacagcagctttgcagtgtgcacctgggttaaaagatgtacctgagttatcatatcttacaggatttgactctctccaaacgcaccaatctattcaagagttgatggcaacaaatatgttgtctcagtcatctaaaacaaaaggtgcaagtgttaaaacgacttatcaattatctgaacttgcccggttatacttaggtaagaatcataagccatctcaaacttaccaaagaagtatacatgagaaaaggaataaattaaatgctctttttgagcagcaattaatgttaagaagtgaggataaatataatcctcttaacattaagttcagagataaaactgatagagtaattgttaaaatgcttagggactctcagtcatttataaggaatggccatcatgataaggcatttgagttacttactgaagctcataagttatcacctgactattttgaggttgcacgagttatggcctatctgcaccagcagaatggtgcaataagtgatgctagagagcagtatgaattagctatagtactatcgcctaatactccgcaacttcattactggtttgcgaagtttttattgcgagaagaagataatattgatgacgctttggttcaaataaagttggctcatgacttagatcctaattcaattgaagtatcactgacattagctagggtttatatgtttcaacatggatacgatgaatcggaggagacattaatggcaatagctgaggatattggtcagtccagtgagcataatataaaaatatttaaggatactcaaattcaaattgcttatcgaagggcagacgacttcgctcaaaaaggtgaatacacagatgcaatgaattttcttgaggaaatgcgtaatctttttgatgaactccctgatttttacaaagatattcatattaggaaaaaattatcgaaatgcgattttttattgaaaactatatcgcgtagcgcggatcagttaattattcgtcgaattgatgattttaaaacatggctcaagcaggagtgtgcatag

SEQ ID NO: 182669 - DNA, 1536 bp, Klebsiella oxytoca
atgtctgtaaatactgaaaccgcccccgcgcaggggcagaccgctgtactggaaaaagagagcgtttacgcctccctgtttgacaaaatcaacctgaccccggcgtcccgcctgggcgatattaacgactttctggatgatgccgcgctgtccgacgccccggcgggcgaacgactgacggcggcgatgcaggtatttatggactgcatccgtcagtccggaaagaccgtggagaagctcgacaagaccctgattgaccaccatatcgcggagctggattatcaaatcagccgccagctggacgcggtgatgcaccatcctgagttccagaaggtggaatccctgtggcgcggcctgaagcagctggtggacagcaccgactaccgccagaacgtcaaaaccgaaattctggatgtctccaaagacgatctgcgccaggacttcgaagacgcgccggagctgattcagagcggcctctactggcacacctacaccgccgagtacgacaccccgggcggcgagccgattggctcggtgatctccgcgtatgagttcgacgccagcccgcaggacgtggcgctgctgcgcaacatctccggcgtctccgccgcggcgcatatgccgtttatcggcgccgtgggtccggccttctttctgaaagagtccatggaagaggttgccgccatcaaggatatcggcaactacttcgaccgcgccgagtacatcaaatggaaatccttccgcgacaccgacgacgcgcgctatatcggcctggtgatgccgcgcgtgctgggccgcctgccgtatggtccggacaccgtgccggtgcgcagcttcaactacgtcgagcaggtgaaaggcccggaccacgagaaatacctgtggaccagcgcctcgttctctttcgcgtccaacatggtgaaaagctttattaataacggctggtgcgtgcagatccgtggcccgcaggcgggcggagcggtgaaagatctgccgatccacctctacgatctgggcacaggcaaccaggtgaagatcccgtcggaggtgatgatcccggaaacccgcgagtttgagttcgccagcctcggctttatcccgctgtcgtactacaaaaaccgcgactacgcctgcttcttctcggccaactcggcccagaagccggcgctgtacgacaccgccgacgccaccgccaacagccgcatcaacgcgcgcctgccgtatatcttcctgctgtcgcgtattgcgcactacctgaagctcgttcagcgtgaaaacatcggtaccaccaaggatcgccgcctgctggagctggagctcaacacctgggtgcgcggtctggtgacggagatgaccgacccgggtgacgagctgcaggcctcacacccgctgcgcgacgcgaaggtggtggtggaagatatcgaggacaatccgggcttcttccgcgtgaagctgtacgcagtgccgcacttccaggtggaagggatggacgtgaacctgtctctggtttctcagatgccgaaagcgaaagcgtaa

SEQ ID NO: 182670 - DNA, 582 bp, Klebsiella oxytoca
gtggctcgtcctaagagtgaagataaaaagcaagcgttactggaggccgcaaccgccgcctttgcccaatcgggaatcgccgcctcaacctccgccatcgcccgcagcgccggggttgccgagggtacgctgtttcgctactttgccaccaaggacgatttgctcaacgagctgtatctgaccataaaagcagacctggtacagacaatgatagcgggtctcaacccgaacgagacccggccaaaagagaacacgcgcaatatctggaatagctatatcggctggggcgtgcgtaaccccatggagcataaagcgattcgccggatggcgctgagtgaacggatcaccgacgaaacccgcaaccgcgtccaggagatgtttcccgagctcaatgaactgtgccagcgctcaatcaaacccgtttttcaatccgacgagtaccgtaccttcggcgatgcgttgtttctttcgctggccgaaaccaccattgaatacgccagccacgagccggagcgcgccgtccgttttgtcgagctgggctttgaagccatgtggcaggcccttgccgaggacaatagctga

SEQ ID NO: 182671 - DNA, 1101 bp, Klebsiella oxytoca
atgaaccgtgtcactttcagcgtggtcgccatcatgttattagcgtcagcaacaactttgccgtttgtgttaaatgccggatttggtcaggcgccgcagggcgcgcagctcagcctggtggagcagtcgccgcactatcacgacggtcagtttcacaatcagcttccgacgcctggctttaccgggcaaaaaaatatgctggccgcgtggtgggagtttctggtcgccaaacgtgaaaatgccagaccggcccagccgctgccgctggtgaataccgatctggcgggcttgccgtcagggcaggacgtgatggtctggctcggtcactcctcctggtatctgcagctggcgggcaaacgcatcctgatcgatcccgtatttagcaactatgccgcaccgttttcgtttattaataaggcctttgccggggattacccgtggcacgctgagggcatgccggatatcgacctgctgattatctcgcacgatcattacgaccacctcgattacgccaccatcaaagctctgatgccgaaggtcaagcgcgtggtgacgccgctgggcgtggggtcgcacctgcgctactggggaatggagagcgcgatcatcagcgaggcggactggaatcagtcgctgcaggtgagcgatgagctgacggtacacgtcctgcccgcgcgccacttttccggccgcggcctcaagcgcaaccagaccctgtgggccagctttatgttcgttaccccgcagcagaaaatttactacagcggcgacagcggctacggcccgcactttaaagccatcggcgaacagtttggcgaagtggatttggcgatcatggaaaacggtcagtatgaccaggactggaagtacatccacatgatgccggaagagacggcgcaagccgctgacgatgttcatgcacgcgcggtgctgccgggtcacgccgggcgcttcgtgctggcaaaacacacatgggacgatccgtacaaaaggctggcggaggccagcacagggcgaccgtggcgactgctgacgccaatgttgggtgagccggtttgggtcgccgataaaacgcaatcatttaacgcctggtggcgctaa

SEQ ID NO: 182672 - DNA, 1293 bp, Klebsiella oxytoca
atgactgattataattcccagacattgtatattaagtcttatgatgtcactacctttgcttcccccagcaatacttcgccttatgaagatattggaaaaataatgtctgagatccaggatgacattatattacagcaacagacaaatcaggatgataaaggtttgcgtcctggcgcaactatttttattccagcagggcgttatcggttacaaaccacttttgttatcaccattaactacctggtaatacaaggggcgggccatggatggatgagccaggcaagtcgggatgctccggatacagatagcagtggatggcttgaaacagcccctggagccagctttattgagctggataccagttcaactctgacggcaatcaaaattgaacgagatgattttgctaccactgggcgaatatcaggcgttgagctgcgtgatttttgtatcggtctggtggttgccacgaatccctacaatacaagcggtacaaaagggatcgatatcgcgagcgatagcgattcattacggattgaaggcatggggttcagccttcttgaggaggctatggtggtcagaaatgctgactctatttcaatcactaataattttatcggtgaatgtgctaattgtattacaatgacatccagctccattgttgcgaaaataaccaataacttctttggcaactctcctggcggctattcaatttctattgaaaatggagaccgtcatcagattaccggcaacacgtttttctggaaccctcaaatagtactcctgaatactcatcacaccaatatttcggctaataagtttcaagggagctggccgggaacgattgtaatgctgagtccatgtgatgaaaacctagtatcttcaaacatgttcattcgtgttgatacagaaacggccagtgcagatgtcggaggtactatctatgatgacctgatgggaatcgttcacattagtggtaataataacagcatcacttcaaatatgtttagtataactttttcggatgtctcgaacattaggcccgcgggagccgatcccgtagcgatactcgttactgatgatagtgacaatacgcttctctcttctaaccaccttgcctacagcgataatatcagtgttaagattgtccttgattcttcctcgcgcaattcgagagtttttcaaactgcattgtatgaggagtttctaccgtctgctggcgccacttacatcttcctgggttccgatggtaaggacatgaatggaaacgttattatcccggcacaaacagcataa

SEQ ID NO: 182673 - DNA, 594 bp, Klebsiella oxytoca
atggcaaatgaacacttaacgtcgtcccccataggcgagttcgttatgtttgccagcggtgatgggaaagtacgtgttgaatgccgctttgaaagcgatacgctttggctctcgcaggcaatgatctgcaaactctatggtaaagcgaaagccaccatcagcgagcatataaagcatatatttgaagaaggcgaacttgaggaaaattcagttgttcggttttaccgaacaactgccagtgatggaaaaaattatcaggttcaacactttagtttgcctctgatacttgccgttggctatcgcgttcgctcccctcgcggcactcagttccgccagtgggtaacccagacgctccaggagtatctgatcaaaggctttgtgatggacgatgagcggctgaaaaatccgcctgttggtacatcggctgtacccgattatttcgatgagatgctggagcgcatccgagatattcgcgccagcgaacgccgggtttatttgcgggtacgagagataattgcctgttgttcgcgcctttctgccggccggcgccttgcccggcctacgcgatgcgagattatctttgggcctgtgtaa

SEQ ID NO: 182674 - DNA, 627 bp, Klebsiella oxytoca
atgccggagaaccctgaaaacgcgcgcttcgcccgctttgccgccttcagggccgatccgcaggcgaatccgctgaaaaccgccagcggtaaaattgaaattcactcgccgaccatcgccgggtttgcttatccggattgcccgccgcaccctatgtggctggagccggacgaatggcacggcaatgcgcaggaaggccagctccaggtgctgtcagcgcatccggcgcaccgcctccacagccagctcaaccatacgtcgctgcgcgaacagtacgcggtggcgggccgtgaaccgttaacccttcatccgcgcgatgcgcaggcgcgcaatatcgccgatggcgatctggtgcgggtatggaattcacgcggccaggtgctggccggcgcggtagtgaccgacggcattcgtcccggggttatctgcttgcacgaaggagcatggcccgatctcgaccctcaggcgggaatttgcaaaaacggtgcggtgaacgtgctgaccaaagatattccgacatcgcggctgggtaacggctgcgccggaaatacggcgctggcctggctggaaaagtataccgggcccgagcttacgctgacggcatttgatccgccgaccaatgcataa

SEQ ID NO: 182675 - DNA, 342 bp, Klebsiella oxytoca
atggatttcactatcgttgccgtcacggcctgcgtcagcggcgtcgctcacacctatatggctgccgagcggctggaaaaagtcggccaccaggagaaatggaatatcaaaattgaaacccagggcgcgctgggggttgagaacaaaataatggccgacgacatcgcccatgccgatgtcgttctgctggtgacggatattgaaattgacgatgccggacgctttagcggcatccgcaccattaagaccagcatcaaaacctttctgctgcagccgcagcagattgtcgacgcggtgaaatgcattatgaaaaagccggtggtttatcttgagatcccgtga

SEQ ID NO: 182676 - DNA, 876 bp, Klebsiella oxytoca
atgacattatccgccgcaccgcgcatcagctgtgaggtcctggaaacgcgcgccgataaggcgcgcatttttaatatccagcgctactctttgaatgatggtcaggggatccgcaccgtcgtgttttttaaaggctgcccgcatacctgtccctggtgcgccaatccggagtcgatctcgccgcaaattcagaccgtacgccgggagagcaagtgcctgcgctgctcccgctgccagcaggacgtggtcgagtgcccttccggcgcgtggcagcagattggccgcgacgtcaccctcgataatctgcttaaagaggtgctgaaggatgaggtcttcttccgcgcctccggcggcggcgtgaccctgtcgggcggcgaagtcctgatgcaggccgaattcgccgcgcgcctgctgcgccgcctgcgcgaatgggggatcagaacggcgattgaaacggcgggcgataccgcctaccgccgcttttttccgctggcgcaggcctgcgatgaagtgctgttcgatctgaaaatcatggatgaaacgctggcccgcgagcagctgcggatgaatatgccgcgggtgctggataactttacccgtctggtggaagcgcatattcacgtgatcccccgggtgccgctgattccgggattcacgcttgatgaagcgaatttccgccggattctggcgtttttggccccctttaagctgccggaaattcatcttctgccgttccatcagtacggcgaagccaaatatcacttactgggaaaaaaatggtcgatgtcgatgattaaagcccctgcagaatctgagattcagccattcaggacgctggccgaacgggccggttttagcgtgaccgtcggcggataa

SEQ ID NO: 182677 - DNA, 2298 bp, Klebsiella oxytoca
atgactaatcgcactcaacgcttaaaagatcgtctgttcgccaacccgcgcgaaatctccctcgagcgagcgctgctctacaccgccagccataaacagaccgagggggagccggtgatgatccgccgggcgaaagcgaccgcatgggtcctcgatcatgtgcagatttcgattcgtgatgatgaactgattgccggtaaccgtacgatcaagccgcgcgccgggatcatgtcgccggagatggatccctactggctgctcaaggagctggaccagttcccgacccgcccgcaggaccgcttcaacatcagcgaagaagataagcgcatctaccgcgaagtgctgttcccctactgggaaaatcgctcgatgaaggacttcatcaacgcccagatgaccgatgaagtgaaggccgccgtcagcacgcagatttttagcgtcaaccagaccgataaaggccagggacatatcatcatcgactaccctcgcctgctggaaaacggcctcgccgcgctggtggcggagatgaaagcggtgagtcagcggcacccgcagaacaatttttatcaggcggtgctgatcctgctggaagcctcccagcgccatattctgcgctatgcggcgcttgccgatgacatggccgccggctgcggcgacgggcagcggcgcaaagagctggagaccatcgcggacatctcccgccataacgcggtgcaccgtccggaagatttctggcaggcctgccagctcttctggtatatgaacatcattttgcagtatgaatccaacgccagctccatctcgctgggtcgctttgaccagtacatgctgccgtactatcaggcttcgctgaatcgcggccaggatccgcagtttcttcaggagctgctggagtcgctgtgggtgaagtgcaacgatattgtcctgctgcgctccaccagcagcgcgcgctacttcgcgggcttcccaaccggctataccgccctgctcggcggcctgaccgagaccggacgcagcgcggtcaatatcctgtcgtttttatccctcgacgcctaccagaacgttcgcctgccgcagccgaacctcggcgtgcgggtcaacgagctggtcgatcgccctttcctgcgcaaaaccgccgagaccattcgcctcggcaccggcattccgcaaatcttcaatgatgaagtggtgatcccggcgtttctcaaccgcggcgtctcgctggatgacgcgcgggattactcggtggttggctgcgttgagctgtcgatcccggggcgcacctacggcctgcacgatatcgccatgttcaacctgctgaaggtgatggaaatcgtgatgctggaaaacgaaagtaaccctgacatcacctgggacgggctgatcaaccagatccgcgacaagattcgctattacattaggctgatggtcgaaggcagcaatatttgcgatatcggccaccgcgactgggcgccggttcccctgctctcttcctttattgaggattgcgtgcagcacggccaggatatcaccgaaggcggcgcgcgctataacttctccggggtccagggcatcggcatcgctaacctcagcgactcgctgcacgcgcttaaagggatggtgtttgagcaaaaacggctcagcttcgctgaactgatcgcggtgctgaaagccaacttccagacgccggaaggggaaaaaatccgcgcgcgcctgatcaaccgcttcgagaaatacggcaacgatattgacgaagtggacaacatcagcgccgatctgctgcgcttctactgcaaagaggtagagcagtaccgcaacccgcgcggcggtcgctttacgccgggctcctataccgtctctgcccacgtgccgctcggctcggtcgtcggcgccactccggacggacgcctggccggagagcagctggcggacggcgggctctcgccgatgctcggccaggacgtgcaggggccgaccgcggtgcttaagtcggtcagcaagctggataactttctgctctccaacggtacgctgctgaacgtcaaattcaccccggcgacccttgccggcgacggcggcctcaataagctggccgacttcctgcaggcattcaccaggctgaagctgcagcatattcagttcaacgtggttaacgccgatacgctgcgcgaagcccagcagcggccgcaggattttgccggcctggtggtgcgcgttgcgggctacagcgcctttttcgtcgagctgtcgcaggagattcaggatgacattatccgccgcaccgcgcatcagctgtga

SEQ ID NO: 182678 - DNA, 321 bp, Klebsiella oxytoca
atgaccaaaattatcgccgttaccgcttgcccgtctggcgtcgcccacacctatatggccgccgaatcgctggagagcgccgctaaggccaaaggctggcaggtcaaagtcgagacccagggctccatcggcattgagaacgagctgaccgcagaagacgtcgccagcgccgatatggtgattctgaccaaagatatcggcatcaagtttgaggagcgttttgccggtaaaaccatcgtgcgcgtcaacatcagcgacgccgtgaagcgcgccgaagccattatgaacaaaatcgacagccacctttcgcagaatgcctga

SEQ ID NO: 182679 - DNA, 1077 bp, Klebsiella oxytoca
atgaatgaactggtgcaaatattaaaaaatacccgccagcacctcatgaccggggtttcacatatgatcccgtttgtcgtgtccggtgggatcttgctggcagtctccgtcatgttgtacggcaagggcgcggtgcccgatgccgccaccgaccctaacctgaaaaaactgtttgatatcggcgtggccggcctgacgcttatggtgccgtttctggcggcctatatcggctactccatctccgaccgcgcggcgctggctccctgcgctatcggcgcctgggtcggcaacagcttcggcgccggtttcttcggcgcgctgattgccgggatcattggcgggctggtggtctactacctgaagaaaatcccggtgcacaaggtgctgcgctcggtgatgcccatcttcgttatcccgattatcggcacctttattaccgccgggatcatgatgtggggcctcggcgagccgattggcgcgctcaccgccagcctgaccggctggctgcagggcatgcgcgaaggcagcatcgtgattctcgccatcatcatgggcctgatgctggccttcgacatgggcggtccggtgaataaggtcgcctacgccttcatgctgatttgcgtttcccagggcgtttacagcgtggtggccatcgccgccgtcggtatcgccgtgccgccgctgggcatgggcctggcaacgctgattggacgtaaatacttctccgcggaagagcgcgaaaccggtaaggccgcgctggtgatgggctgcgttggcgtgaccgaaggcgcgatccccttcgccgccgccgacccgctgcgcgttatccccgccaatatgatcggcgccgccgccggctgcgttaccgccgcgctgctcggcgcccagtgctatgccggctggggcgggcttatcgttctgccggtcgttgagggtaaaggcggatttattgctggcctcgcggttggcgccatcgtcagcgccgcctgcgtcatcctgcttaaggccctggcgaaaaagaaaacgtctgacgccaaagccgatgacgagatggatcttgatttcgaaattaactga

SEQ ID NO: 182680 - DNA, 2502 bp, Klebsiella oxytoca
atggctctggtaattgaattcatatgtgatttgcccaacggcgtgcatgcgcgtccggcaagcctggtagaaaccctgtgcaatactttttcgtcttcggtcgaatggttaaatacccgcacggaaggacgcggaaacgcgaaaagcgcgctggcgattatcggcaccaataccttgaagggggaccgctgccagctggtcgtcagcggcgaagatgaacagcaggcgtttgacgcgctgtcagcattcatcagcgaggagttcccgcactgcgatgcgccgctgccgacggcggaatccatggacgttcagccggttcctgaatccctctcgcgcctcaatcccacgctgtttcacgcccagccggtctgcgccggcagcgcgggcggcaggctcacccatcttaagtccctcgacctgcgcgattcaggcgcgctgcctgcagcgggcgcaattgaacaggaacaggcggcgctggacaagggcctgaccctgctggtgaaaaatattgagttccgcctgctggataacgacggtaccgccagcgcgatccttgaggcgcatcgctctctggccaccgacgcctcgctgcgccagcatctgctgggcgggctgctgagcggcctgagctgcgctgaggcggtggtcgcgaccggcgaacatttttgcgcccagttcagcgcttccggcaatagttatttgcaggagcgggtgctggacgtgcgcgatgtctgcttccagcttctgcagcatatctacggtgaggatcgttttccggcaccgggtaagctgacggaagaggccatctgcctcgccgatgaactcacccccagtcagtttcttgaactggataaaaccctgcttaaaggtctgctgttgcgcagcggcggcaccacttcacatacggtgatcctcgcgcgttcgttcaatattcccactctggtgggcgtcgatatggaggcgctgctgccgtgggtcgatcggcgagtgcagattgacggtaacgccgggctggtggtggtgaatcccgatgaagcggtggcgcgctactatcaacaggaggcctgggtgcaggcgcagatccgccgccagcagcaggcctggctggataaagcggggcgtacggaagacggtattcgcctggaggtggcggccaacatcgcccattcggtagaggcgacggcggccttcaacaacggcgcgcagtcggtaggcttgttccgcaccgaaatgctctatatggacaggcccagcgcgccgtcggaaaacgagctgtataacctattttgccaggcgctggagccggccaacgggcgcagcattatcatccgcaccatggatatcggcggcgacaagccggtggcctacctcaacattccggcggagaacaacccgttcctcggctaccgggcggtgcgtatttatgaggagtatcaggcgctgttccgcactcagctgcgggcgattctgcgcgcttccgcgcacggcgcgctgaaaatcatgattccgatgatctcctcgatggaggagattctgtgggtgaaagagcagctggcggatgccaaacagtcgctgcgcagcgaacagattccgtttgatgaaaagatcccgctgggcattatgctcgaggtgccgtcggtgatgtttatcatcgaccagtgctgcgaagagattgatttctttagtatcggcagcaacgacctgacccagtatctgctggcggtggatcgcgataacgccagggtgacgcgccactacaacagcctcaatccggcctttttgcgcgcgctggattacgcggttcaggcggtgcatcgccagggtaaatggatcggcctgtgcggcgagctgggggccaaaggttccgtgctgccgctgctggtggggctggggctggatgagctgagcatgagcgcgccgtcgatcccggcgaccaaggcgcgtctggcgcagcttgacagccgcgcctgccgtcagctgctgaatcaggcgatgaagtgtcgtacttcgctggaggtcgagcacctgctggcccagttccgtatgacccagcaggatgcgccgctgattacccctcagtgcattacgctgaacagcgactggcgcagtaaagaggaggtgattaagggcatgaccgacaatctgctgctggccgggcgctgccgctatccgcgtaagctggaagcggatctgtgggcccgcgaagcggtgttctccaccgggttagggtttagcttcgccattccgcacagtaaatcggagcatattgagcagtcgaccatcagcgtcgcccgtctggcgcagccggtggcgtggggcgacgacgaggcgcagtttgtgattatgctgacgctcaataagcattcggcgggggatcagcatatgcgtattttctcgcggctggcgcggcgcattatgcatgcggagttccggcaatcgctggtgacggcgcagagcagcgaggcgattgcggcgctgctgcagcgcgagctggagctgtaa

SEQ ID NO: 182681 - DNA, 1092 bp, Klebsiella oxytoca
atgaataaaaccttacgtattgccgccatccccggcgatggcatcggtaaagaagtgctgccggaaggcgtccgcgtactgcaggccgccgccgaacgctgggggctggcgttaagcttcgagcactttgagtgggccagctgcgactattacgcgcagcacggcgccatgatgcccgacgactggcgcgcgcagctgcaaacgtttgatgcgatctacttcggcgcggtcggctggccggatatcgtgccggaccacatttcactgtggggctcgctgctgaagttccgccgcgagttcgaccagtacgtcaacctgcgtccggtgcgcctgttccccggcgtcccctgcccgctggcgggtaaacagcccggcgatatcgatttctacgtggtgcgtgaaaacaccgaaggggaatattccgccctcggcggccatgtgaatccggggactgaacatgaagtggtgattcaggagtcggtatttacccgtcgcggcgttgaccggatcctgcgctacgccttcgagctggcgcagagccgaccgcgcaaaaccctgacctcggcgaccaaatccaacggtctggccatcagcatgcccttctgggaccagcgcgtcgaagcgatggcgcagcactacccggaggtgaaatgggataagcagcacattgatattctgtgcgcccgcttcgtgctgcagccggaacgttttgacgtggtggtcggctccaatttgttcggcgatatcctctccgatctcggcccggcctgtaccggcaccatcggcattgccccgtcggcaaacctcaatccggatcgcacctttccgtcgctgtttgaagcggtacacggttcggcgccggatatttacggcaaaaatatcgccaacccgattgccaccatctgggccggcgcgatgatgctcgacttcctcggcaacggggacgcgcgctaccaggccgcccacgacggcattctggcggcgattgagcagaccatcgccagcggaccgaagacgccggatatgcaaggcagcgcctccacccagcaggtgggcgaagcgatttgtcgggcgattgttgaacaaaagtag

SEQ ID NO: 182682 - DNA, 927 bp, Klebsiella oxytoca
atgaataatctgccgctgctgaacgatttacgcgtctttatgctggttgcccgccgcgccggttttgccgccgccgcggaagagctcggcgtctcgccggctttcgtcagcaagcgcgtgtcgctgctggagcaaacgctcaacgtccagctgctgcaccgtaccacccggcgcgtggctatcaccgaagagggcgagcgcatctacgaatggggactacgcattttgcaggatgtcgaccagatgatggatgagctctccgatgtgcggcaggtgccgcaggggacgctgcggattatcagcagctttggctttggccggcgggtagtcgcgccggcgctctccgagctggcccgtcgctacccgcagctggagatccgttttgacgtcgccgaccggctggtggatttggccaatgaaggggtcgatctggatattcgcgtcggcgacgatatcgcgcccaatctgatagcccgccagcttgccagcaatcaccgcatcctctgcgcctcgccggcgtttgtcgcccgctatccccggccgaaacagctcagcgatctcgccgcgctgccctgtctggtgatcaaagagcgcgaccggccctttggcgtctggcagctgcgcgatgataaagagggggagcacgccatcaaggtgaccggaccgctgtcgtctaaccacggtgaaatcgtccatcagtggtgcctggaggggcaggggattgcgctgcgctcgtggtgggacgtcagggaaaatatcgccagcggcaatctggtgcagctgctgccggagtactatcagcccgccaatatctgggcggtatacgtgtcgcggctggcgacctcggccaaaattcgtaccaccgtggagtttttgcgccactacttccagcagcgatttccgccgcgcaacggcgagaaaaaatag

SEQ ID NO: 182683 - DNA, 1281 bp, Klebsiella oxytoca
atgagcgaacataccaccagctattacgccgccagcgccaaccgctatgagccgttcccgacgctggacgaatcgatcggctgcgacgtctgcgtcgtcggcggcggctataccggcctctcttcggcgctgcatctggccgaaatgggctacgatgtggtgctgctggaaggcgcgcgcatcggcttcggcgccagcggacgcaacggcggccagctagtcaactcctatagccgcgatatcgacgttattgaaaaaacctacggcccggatgccgcgaaaatgctcggcagcatgatgtttgaaggcggcgacattattcgcgaacgtatccagcgctatcagattgcctgcgactatcgccccggcgggctgtttgtcgcgctgaatcataaacagctggagaccctggaagagcagaaagcgaactgggagcgctacggcaatacccagctggagctgctggatgccagcgccattcgtcgcgaagtggacagcgatcgctacgccggcgcgctgctggaccacagcggcggtcatatccatccgctcaatctggcgattggcgaagcggacgccattcggctcaacggcggccgggtttacgaacaatcaccggtcaccggcattcagcacagcagcccggcggtggtgaccaccgcgcgcggacaggtcaccgcccgctacgtgatcgtcgccggtaacgcctatctcggtgataagctcgagccggagctggcgaaacgcagtatgccgtgcggcacccaggtggtcaccaccgcgccgctgtctgaggatctggcgcgctcgctgatcccgaaaaactactgcgtagaagattgtaactatctgctggattactaccgcctgaccgccgacaaccgtctgctgtacggcggtggcgtggtgtacggcgcgcgggatccggacgacgttgagcggctgattatgccgaagctgctgaaaaccttcccgcagctacagggggtgaaaatcgactaccgctggaccggcaacttcctgctgaccctctcgcgaatgccgcagtttggccgcctcgataacaatatctattatatgcagggctacagcggccacggggtcacctgtacccacctcgccggacggctgatttcggagctgctgcgcggggacgccgaacgtttcgacgccttcgccaggctgccgcactatccgttccccggcgggcgcagcctgcgtattccgtttaccgccatgggcgcggcttactacagcctgcgcgatcggctcggcgtgtaa

SEQ ID NO: 182684 - DNA, 1488 bp, Klebsiella oxytoca
atggattttcacaacctggcttactggcaagaaaaagcaaacaatatcgcgattgaaacgcggctatttattaacggcgaatacagcgccgccgccgataatagcgtgttcgccaccgtcgaccctaccgcccagcagacgctcgccgaggtcgcgcgcggcaaaaaggccgacgtcgatcgcgcggtccaggccgcccgcggcgtcttcgatcgcggcgactggtcgcaggcctcccctgcccagcgcaaagcggtgctgcataaattcgccgacctgatggaagcccatcgcgaagagctggcgctgctggaaaccctcgacaccggtaaaccgattcgccacagcctgcgcgacgatgtccccggcgccgcccgcgcgatccgctggtacgccgaagccatcgataaagtgtacggcgaagtcgcccccaccggcggcaacgagctggccatgatcgtccgcgaaccgattggcgtgattgcggcggtggtgccgtggaattttccgctgctgctggcctgctggaagcttggcccggcgctggcgtccggcaacagcgtggtgcttaagccgtcggaaaaatccccgcttaccgctctgcgcctggcgggcctggcgaaacaggccgggctgccggacggcgtattcaacgtggtgagcggtttcggccatgaagcaggtcaggcgctggcgcagcatcatgacgttgaagtcatcacctttaccggctccacccgcaccggtaaacagctgctgaaagacgcgggcgacagcaatatgaagcgcgtctggctggaggcgggcggtaaaagcgccaatatcgtctttgccgactgcccggacctgcaaaaagcggttaacgccaccgccggcggtattttctacaatcagggccaggtctgtatcgccggtacccgtctgctgcttgaggagagcatcgccggccgctttctcgacctgctaaaagagcaggcaaagggctggcagcctggcaatccgctcgacccgaataccaccatgggcatgctgatcgacaacagccacgccgatagcgtccacagctttattcgcgccggcgaagcgcacagcacgctgctgctggatggacgtaaaaatccgtggcccgcggcggtcggcccgaccatcttcgtcgacgtcgaccccgcctccgccctcagccaggaggagatcttcggcccggtgctggtggtgacccgctttaaaaccgaagagcaggcgctggcgctggccaacgacagccgctacggcctcggcgcggcggtctggacccgcgatctctcccgcgctcaccgcgtcagccgccgtctgaaagccggctccgtctttgtgaacaactacaacgatggcgatatgaccgtgcccttcggcggctataagcagagcggcaacggacgcgataagtccctgcacgcgctggaaaaattcactgaactgaaaactatctggattgccctggagtcttaa

SEQ ID NO: 182685 - DNA, 558 bp, Klebsiella oxytoca
atgagcgatgacggactggcgccagggaaacgtctgtcagagatccgccaacagctgggtctctcacagcgtcgtgccgccgaactgtctgggttaacacatagtgccatcagcaccatagagcaggacaaagtcagtcctgcgatcagtacgctgcaaaagctgctgaaagtctacgggctgtcgctctcggaattcttttctgaaccagaaaaaccggctgaaccgcaggtggttatcaatcaggacgatctgattgaaatcggcagtcagggggtgtcgatgaagctggttcataatggcaatccgaaccgcacgctggcgatgatttttgaaacgtaccagcctggaaccacaaccggggagaggatcaagcatcagggtgaggagataggcaccatactggaaggtgaagtcgtgctgaccatcaacggtcaggcgtatcatctggtggctgggcaaagctatgccattaacaccggcataccgcatagcttcagcaacacctcggcgggtatctgccgaattatcagcgcccatacccccaccacattctga

SEQ ID NO: 182686 - DNA, 807 bp, Klebsiella oxytoca
atggaaaatataatgtacaagccagttattggcgtggtgatgtgtcgaaacaggcttaagggtcaccagacccagactctgcaagagaaatatctgaacgcgattgtgaacgccggcggcgtaccgattgccctgccgcacgcgctggccgagccggagctgctttctgcgctactgccgaaactggacggcatttatctgcccggcagcccgagcaacgtacagccgcacctctatggtgaaaacggcgatgagcctgacgccgatcccgggcgtgatcttctgagcatggcgctgatcgacgccgcgctcgaaaggcgcatccccattttcgccatctgccgtggactacaggaactggttgtcgccaccggcgggactctgtatcgtcgtctgttcgagcagcctgagcttcttgaacaccgcgaagaccccgaacttcccgtcgagcagcaatatgcgccctcgcatgaagttcaggttcaggaaggaggattactttctcagttaataccgggctgcaacacgttttgggtaaactcgttacacgggcagggagcaaaaacgacgggtccacggctgcgcgtggaggcgcgttctccggacgggctggtggaagcggtcagcgttaacgaccaccctttcgccctcggcgtacagtggcatcctgaatggaacagtagcgaatacgccctgtcgcgaatgttgtttgaaggttttatcaccgcctgtcagagctatagccaaaataattcgagttgcaggaaggcggcaagtgagggaatccccaggagcttactggagtaa

SEQ ID NO: 182687 - DNA, 1419 bp, Klebsiella oxytoca
atggaaaccaatatcgtagaagttgagaattttgttcagcagtcggaagagagacgggtcagcgcattcacctgggaagtgaagcgctacctcgagcgttaccccaatacgcaatacgttgatgtgctgctaaccgacctgaacggctgcttccgcggtaagcggatcccggtgtccagcctgagcaagctggagaaggggtgctatttcccggcttcggtgtttgcgatggatattctcggcaacgtggtggaagaggcggggctcggccaggagatgggcgaaccggaccgcacctgcgtgccggtgctgggaaccttaaccccgtcggcggcggacccggaatacattggtcaggttctgctgaccatggttgatgaagatggcgctccctttgacgttgagccgcggaacgtgctgaaccggctctggcagcagctgcgccagcgcgggctgttccccgtggtagcggtagagctggagttctatttacttgaccgcaagcgcgacgcggaaggttacctgcagccgccgtgcgcgccgggaaccggcgatcgcaatacccaaagccaggtttactccgtcgacaacctcaaccactttgccgacgtgcttaacgaaatcgacgagatcgcccagctccagctgatccccgccgacggcgcggtggcggaagcctctcccggccagtttgaaatcaacctccaccataccgataacgtgctcgacgcctgcgatgatgcgctggcgttaaaacgtctcgtgcgtttgatggcggagaagcataagatgcacgccacttttatggcgaaaccctatgaagagcacgccggtagcgggatgcatatccatatcagtatgcagaacaacaaaggcgagaacgtgctggcggacgcggacggcgaagattccgcgatgttaaaacgcgcgctcgccgggatgattgacctgatgccggcgtcgatggcgctgctggcgccaaacgtgaactcgtatcgtcgtttccagccgggaatgtacgtgccgacccaggcgtcgtgggggcacaacaaccggacggtggcgctgcgcattccgtgcggcgatcggcacaatcaccgcgtcgagtatcgcgtggccggggcggacgccaacccgtatctggtgatggcggcgatttttgccggcatcctccacggtctggataatccgctgccgttacaggaagaggtggagggcaacggcctcgagcaggaggggctgccgttcccgattcgccagagcgatgcgctgtgggagtttatgcaaaacgatcatctgcgcgagcggcttggcgaacgcttctgccacgtttatcacgcctgtaaaaatgacgaattactgcagtttgagcgtctgatcacagaaactgaaatcgagtggatgttgaaaaacgcctga

SEQ ID NO: 182688 - DNA, 192 bp, Klebsiella oxytoca; identical to SEQ ID NO: 178166

SEQ ID NO: 182689 - DNA, 1392 bp, Klebsiella oxytoca
atgtctattaatccctctctcgataacgcctccggggcggaaaaaccgcgcctgcgcaagtctctcaagctgtggcaggtggtgatgatgggcctcgcctatctgacgccgatgacggttttcgatactttcggcatcgtctccggcatcagcaacggccacgtcccggcgtcctatctgctggcgctggccggggtgctgtttaccgccatcagctacggcaagctggtgcgccagtttccgcaggcgggttcggcctatacctatgcgcagaagtcgatcagcccgcacgtcggttttatggtgggctggtcatcgctgctggattatctattcctgccgatgatcaacgtgctgctggcgaagatttatctttctgcgctgtttccggacgtgccgccctgggtgtgggtggtgacgtttgtggctattctcaccgcggcgaacctgaaaagcgtcaacctggtggcgaacttcaacaccctgttcgtgctggtgcagatctcgatcatggtggtctttatcgtgctggtggtgcaggggttgcataaaggggaaggggtgggcaccgtctggtcgctccagccgtttattagccagaatgcgcacctgattccgatcattaccggggcgacgatagtctgcttttcgttcctcggtttcgatgcggtgaccacgctttccgaagagacgccggacgccgcgcgggtgatcccgaaggccattttccttactgcggtctacggtggggtgatttttatcgccgcctcgttctttatgcagctctttttccccgatattagccgttttaaagacccggacgcggcgctgccggagatcgccctctacgttggcggcaagctgttccagtcgattttcctgtgcacgacgtttgtgaataccctggcctcaggcctggcttcgcacgccagcgtgtcacggctgctgtacgttatgggccgcgataacgttttcccggagcgcattttcggctacgtccatccgaaatggcgtaccccggcgctgaacgtgatcatggtggggattgtcgcgctgtcggcgctgttctttgacctggtcaccgccacggcgctgattaactttggcgcgctggtggcgtttaccttcgttaacctgtcggtatttaaccacttctggcggcgtaaaggttttaacaaaacctggaaagatcgctttcactatctgcttctgccgatggtgggcgcgctaacggttggcgtactgtggattaacctggaggcgacctcgctgacgctgggtctgatatgggcgggcctcgggctgctgtatctgacgtatctgacccgccgcttccgcaagccgccgccgcagtttgacggcgccaaagcggaacaggcctgggaatcgtaa

SEQ ID NO: 182690 - DNA, 123 bp, Klebsiella oxytoca
atgtcaggtatcctgctctttatcgtcgcggtggttttgctgggagtagccatcttcagcctggtctcctatgtgaaggatcggcgctctgcacagctgccaactcataagaaaaagaaataa

SEQ ID NO: 182691 - DNA, 225 bp, Klebsiella oxytoca; identical to SEQ ID NO: 178165

SEQ ID NO: 182692 - DNA, 1248 bp, Klebsiella oxytoca
atgagaaaaagtctactcgctgccgccgtgaccggcgttattttactctccgccggcgtccaggcgcaggaacaggcggcaccggaagggtaccagcttcagcaggtgctgatcatgagccgccataacctgcgcgcgccgctggcgaacaacggcagcgtgctggagcaatcaacgccgaagtcctggcctgagtgggatgtccccggcggccaactgaccaccaagggcggggtgctggaagtgtatatggggcactatatgcgcgaatggctggcgcagcaggggctggtgaccagcggcgaatgcccgccggagaacgcggtctacgcctatgccaatagcctgcagcgcaccgtcgccaccgcgcagttctttatcaccggcgcgtttcccggctgcggcgtgaccgtgcaccatcaggaaaaaatgggcaccatggacccgacgtttaatccggtgatcactgacgattccgccgcgtttagcgaaaaggcggtgcaggcgatggagaaagagcggcaggggatgcagctgagcgaaagctataagctgctggaggagatgaccgactaccgtaactccccgtcctgcaaagagaagcagcagtgctcgctgagcgacgcgaaagatacctttagcgccaaatatcagcaggagccgggcgtttccgggccgcttaaagtcggcaactcgctggttgacgcctttacgctgcaatattacgaaggtttcccgaaagaccaggtggcgtggggcgaaatcgccagcgataagcagtggcaggtgctgtcgaagctgaaaaacggctatcaggacagtctcttcacctcgccggaagtggcgcgcaacgtggctaaaccgctggtgaaatatatcgataacgcgctggtgggcgacgcggcgaaagcggcgaaagtcacgctgctggtggggcacgattccaatatcgcctcgctgctgacggcgctggattttaaaccttatcagctgcacaaccagtacgaacgtacgcccatcggcggcaagctggtgttccagcgctggcatgataagagcggcaatcgcgatttgatgaagattgagtacgtgtatcaaagtaccgaacagctgcgcaatgccgacgcgctgaccctgcaatcgccgccgcagcgggtgacgctggcgctgaacggttgtccggtcgatgacaacggcttctgcccgatggacacctttaaaaaggcgatggccgaggccacgaagtag

SEQ ID NO: 182693 - DNA, 228 bp, Klebsiella oxytoca
atgccgaatcaagaagcaaaggcccaccgcgtgggtgaatgggccagtctgcgcaatacgtctcccgaaattgccgaggcgatttttgaattagccaattacgatgaaaagctggcggagaaaatctgggaagaaggcagcgatgaagtcctgcccctcgccttcgccaaaaccgacaaagactccctgttctggggcgaacaaactatcgaacgcaagaacgtgtag

SEQ ID NO: 182694 - DNA, 597 bp, Klebsiella oxytoca
atggctaagattctggtgctttattattccatgtacggacacattgagaccatggcgcatgccgtcgccgaaggagcaaacaaggtagatggcgttgaagtggtcgtgaagcgcgtgccggaaaccatgcaggcagaggtttttgccaaagcaggcgggaaaacgcaaaacgcgcccgtcgccacgccgcaggagctggctgagtacgacgccatcatctttggtaccccaacccgtttcggcaatatgtccggacagatgcgcacctttctcgatcagaccggcggcctgtgggcgtccggagcgctgtacggcaaactggccagcgtattcagctcaaccggtaccggcggcggtcaggagcaaaccatcacctcgacctggaccacgcttgcccaccacgggatgattattgtaccgattggctacggcgcccaggagctgtttgatgtttcgcaggttcgcggcggcacgccttacggcgccaccaccattgccggcggcgacggctcacgccagccaagtgaagaagaattagccattgcccgctatcaggggcaacacgttgcgggtctggcagtgaaattacacggttaa

SEQ ID NO: 182695 - DNA, 174 bp, Klebsiella oxytoca
atggcaaaccatcgtggcggtgccggcaactttgccgaagaccgtgaaagagcatcagaagcaggtcgtaaaggtggccagcatagcggggggaactttaaaaacgatcctcaacgcgcttccgaagcgggcaagaaagggggcaaaaacagtcatggtagccgcgaaagctag

SEQ ID NO: 182696 - DNA, 1323 bp, Klebsiella oxytoca
atggctctcttcgattttcctcgctggcagttaacctccccctccgccgcgtccggcgtcgtggcccccgatgaacggctgtcggtcgggcaaaccgtggtgatgggcgttcagcacgcggtggcgatgtttggcgcgaccgtcctgatgccaatcctgatggggctggatcccaatctgtcgatcctgatgtccggcatcggcaccctgctgttctttttggttaccggcgggcgcgtgccgagctaccttggctccagcgctgcctttgtcggcgtggtcatcgccgttaccggcttcaacggccaggggcttaacccgcatcttagcgtcgcgctgggcggcattatcctctgcgggctggtttataccctgattggcctggtggtgatgaaaatcggtacccgctggattgagcggctgatgccgccggtagtcaccggcgcggtggtcatggcgataggccttaacctcgcgcccatcgcggtacgcagcgtatcagcaacgccgttcgacggctggatggcggtgctgacggtgctgtgcatcggcctggtcgcggtgtttacccgcgggatgctgcagcggctgctgatcctcgtcgggctgattatcgcctgcgcgctgtacgcattgctggccaacggcctcgggctgggcaagccgctggattttagcctgcttgagcaggcggcgtggttcggtttgccgcagatgaccgccccgacctttaacggccaggcaatgatgctgatcgctcccgtggcggtgattctggtggcggaaaacctcggccacctgaaggcggttgccgggatgaccgggcgcaatatggacccgtatatgggccgcgcgttcgtcggcgacggactggcaacgatgctctccggctcggttggcggcagcggcgtgaccacctacgcggagaatatcggcgtgatggcggtcaccaaagtatactcgacgctggtgttcgtcgcggcggcgctgattgcgatgctgcttgggttttcaccgaaattcggcgcgctgatccataccattccgggaccggtgatcggcggcgcatcgattgtggtgttcggcctgattgccgtcgcgggcgcgcgaatttgggtgcagaaccgcgtggatttgagccagaacgcaaatctgattatggtggcggtgacgctggtgctgggggcgggcgacttcgcgctttcgctcggcggctttaccctcggcggcatcgggacggccaccttcggcgcgatcctgctccacgctctgcttaaccgccgtccgcgtgaggccgggcaaaccaacgtcaccccggtatga

SEQ ID NO: 182697 - DNA, 495 bp, Klebsiella oxytoca
atgtctactgccgataaacaaagctttcgcgacgccatggcccacgtcggggcggcggtcaacatcatcaccaccgatggtcccgcaggccgcgccggctttaccgccagcgccgtctgcagcgttaccgacgcgccgcccacgctgctggtgtgcctgaatcgttccgcctcggtatggccgatcttcagccagcaccaggccctgtgcgttaataccctggcggccggtcaggaaggactctcgaaccttttcggcggtaaaacgccgatggcggagcgcttcgccgccgccgactggcaaaccggcgcgaccggctgtccgcgtctggaagcggcgctggtcagcttcgactgccgtatcagccagatcgtcagcgtcggaactcacgacatcctgttttgcgaagtggcggcgattgtacgccatccggaaccgcgcggactgatgtggttcgaccgcggctaccacacgctgatgcgtccagcctgttaa

SEQ ID NO: 182698 - DNA, 591 bp, Klebsiella oxytoca
atgagcgaagccattagcccggccgcctgcgccgcgctgtttaccgaggcccgaacccacaacggctggctggacaggccggtcagcgacgagcagctgcgtgaaatctacgccttgctgaaaatgggaccgacctccgctaactgctccccggcgcgcttcgttttcatccgcacaccggaaggcaaagagaagctgcgcccggccctgtcgagcggcaacgttgcgaagaccctgcaggcgccggtcaccgctatcgtcgcctgggacagcgcgttctatgaccggctgccggagctgttccctcacggcgacgcccgcagctggtttacctccagcccgcagatggtggaagagaccgcctttcgcaacggttcattgcaggcggcgtacctgattttcgcctgccgcgcgctgggtctggacaccggccccatgtcgggctttgaccgcgaaaaagtcgatgcggcgttttttgccgacggcgcctggaaaagcaacctgctgattaatatcggctacggcgatcccggcaagctgtacgctcgcctgccgcgtctgccttttgatgatgcctgccagctggcataa

SEQ ID NO: 182699 - DNA, 804 bp, Klebsiella oxytoca
atgatgaagctaaacgtctccccggcgccttatccgggcgcgccggtggtggttctgagcgccgggctcggcggcgcgggcggctactggctaccgcagcgggcagcgctcgaaccgcactatcaactggtgagctatgaccataacggcaccggtgaaaacggcggcccgctgcccgtcggctacagcatggcggccatggcgcatgagcttaacgcggcgctgcaagaggcggggattgtgcgttttgcgctggtcggtcacgccctgggcgcgctgatcggtctgcagctggcgctggaccatcccgaagcgataagcgccctggtgctggtgaacggctggctgacgctctccccgcatacccgccgctgctttctggtgcgtgaacgcctgctgcacgcgggcggcgcgcaggcgtgggtagaagcgcagccgctgttcctctatccggcggagtggatggcttctcgcctgccgcggctggaggccgaagacgcgctcgccatcagccatttccagggcaaagagaatttactgaaaaggctgaacgccctcaagcaggccgacttttcgcggcgggcggcagcgataacctgcccgacgctgattatcagcgccgctgacgatctgctggtcccggcctcctgctcccgcgtgctgcaggcggcaatccccggcagccagctggcggaaatggcctggggcggccacgcctgcaacgtcaccgataccgccacctttaaccctattttatgcgacgggctggccgcgatgctgcccgtcccccaggagaatctatga

SEQ ID NO: 182700 - DNA, 393 bp, Klebsiella oxytoca
atgcctaaacaggtgattattccgccaggcaccaccacgcctatcgccccgtttgtcccgggcacgctggccgacggcgtggtttacgtctccggcaccctgccgttcgataagcaaaacaacgtggtttatatcggcgacccaaaggcgcaaacccgccacgtgctggaaaccatcaagagcgttatcgagacggcggggggcagtatgacggatgtgaccttcaacagcatctttatcaccgactggaaaaactacgccgcgattaatgaggtctacgcggagttcttccccggcgacaaaccggcgcgtttctgtattcagtgcgggctggtgaagcccgatgcgctggtggaaatagccaccgtcgcgcatatcgggaagccggcatga

SEQ ID NO: 182701 - DNA, 711 bp, Klebsiella oxytoca
atgattaccctgcccgctcgcccggaatccctgacctttgcgccgcagcagagcgcgctgatcgttgtcgatatgcagaacgcctacgccagccagggcggctatctcgacctcgccggatttgacgtttccgccacccgcccggttatcgacaatatcaacgtcgccgtggccgccgcgcgcgccgccgggatgctgattatctggttccagaacggctgggacgaccagtacgtggaggccggcggccccggttcgccgaattttcataaatccaacgcgctgaaaaccatgcgaaagaacccggagctgcagggcaagctgctggcgaaaggcggctgggactatcagctggtcgatcagcttaagccacagcccggcgatatcgtgctgccgaaaccgcgctacagcggcttctttaacaccgcgctcgacagcattctgcgcagccgcggcatccgccatctgatctttaccggtattgccaccaacgtctgcgtggaatcgaccctgcgcgacggcttcttcctcgagtatttcggtatcgtgctggaagacgccacccatcaggccggtccggcgttcgcccagcaggcggcgctgttcaatatcgaaaccttctttggctgggtcagtgatgtcgccagcttctgtaccgcccttgagcccgccgcgccgcgcgccttttccgaggagaaacgttatgcctaa

SEQ ID NO: 182702 - DNA, 1092 bp, Klebsiella oxytoca
atgaaaattggtgtcttcgttccgattggtaataacggctggctgatttccacccatgctccccagtacatgccgacgtttgagctcaataaggccatcgtgcaaaaagccgaacactacggcttcgatttcgcgctgtcgatgattaaactgcgcggcttcggcggcaagaccgaattctgggatcataatctggagtccttcaccctgatggccggactggcggccgtcacttcgcgcattcagatctacgccaccgccgccacgctgacgctacccccggcgatcgtcgcgcgcatggcctcgactatcgactctatctccggcggccgctttggcgtcaatctggtcaccggctggcaaaagccggaatacgagcagatgggcatctggcctggcgacgactacttcgccagccgctacgactatctcaccgaatatgtccaggtgctgcgcgacctgtggggaaccgggcgcagcgactttaaaggcgactacttcacgatgaacgactgccgcgtcagcccgcagccgtcgcagccgatgaaagtgatctgcgccgggcaaagcgacgccggtatggcgttctccgcccggcacgctgactacaacttctgcttcggcaaaggggtcaacacccctgccgccttcgcccccaccgccgcgcggatgatggaggcggcggaaaaaaccggccgcgacgtcggttcctacgtcctgtttatggtgattgccgacgaaaccgacgaggcggcccgcgccaaatgggagcattacaaagccggcgccgatgacgaagcgctggcgtggctcaccgaacagagccagaaagacacccgctccggcagcgacaccaacgtgcgccagatggccgatcccacctcggcggtcaacatcaatatgggcacccttgtcggctcttacgccagcgtcgcccgcatgctcgacgaagtggcggcggtccccggtaccgacggcgtgctgctgacgtttgatgatttccttatcggtatcgaagcctttggtcagcgcattcagccgctgatgcgctgccgcgaccatatcgccaccatgactcaagaggttgcctga

SEQ ID NO: 182703 - DNA, 639 bp, Klebsiella oxytoca
atggcacagggcggcgtgaaaaagatcggcaaacgctcacaggcggtgagcgcgaaaaaagaggctatcctggccgccgcgctggacgcgttctcgcagtttggtatccacggtacccggcttgagcaggtcgccgaactggccggggtatcgaaaacgaacctgctctactactacccgtcgaaagaggcgctgtatattgccgttctgcagcagattctggctatctggctggcgccgctaaaggcctttcgcgaagatatcagcccgctggtggccatcggcgaatatatccgccttaagctggaggtttcccgcgatcacccgcaggcgtcaaggctgttctgcctggagatgctgcagggcgcgccgctgctgatgggcgagctgaccggcgatctgaaagcgctggtggatgaaaagtcggcgattatttccggctgggtcgagagcggcaggctggcgccggttgacccgcagcatctgatctttatgatctgggcgaccacacagcattacgccgatttcgccactcaggttgaggcggtaaccggcgcgacgctgcgcgatgaggcgttttttcagcaaaccgtcgataacgtccagcggatgattatcgaagggattcgcgtacgttaa

SEQ ID NO: 182704 - DNA, 396 bp, Klebsiella oxytoca
atgaaacgcactttactcgcttttgccgcgctgctggcaagcacccatgcgctggcggacgaatgcagcaacgccagcaatcaaacggaaatgaaccagtgcaccgccgagcggtaccaggctgacgacaaaaaactaaatgaaacgtaccaggaagcgctgaagcgcgcctccggcaagcagcaggagttgctgaaaaaagcgcagctgtcgtggattgccctgcgcgacgccgactgtcaattcctcgcctccggcgctgaaggcggcagcgtacagccgatgctgatcaaccagtgcatgtccgataaaaccgtcgagcgcgaatcgttcctcgcctcgctgctgcagtgcgaggatggcgatcagagctgcccgctgccgcccgccaattaa

SEQ ID NO: 182705 - DNA, 3963 bp, Klebsiella oxytoca
atgggcaccaccaccatgggtgtaaaacttgacgacgcgacgcgtgaacgcattaaatccgcggcgagccgtattgaccgcacgccgcactggctgattaaacaggccattttcaactatctggaaaagctggaaaacgacgagacgctgccggagctgccggcgctgctgtccggcgcggcgaacgaaagcgatgaagccggtcatccggctgacgaaccttatcagcccttcctcgatttcgccgagcagatcctgccgcagtccgtttcccgcgcgtcgatcaccgccgcctggcgctgggccgaaaccgacgccgtgccgatgctgctggagcaggctcgcctgccgcagactctcggcgaacaggcgcacaagctcgcctatcagctggcggagaagctgcgcaatcagaaaaccgccagcggccgcgccggaatggtgcagagcctgctgcaggagttctcgctctcctcgcaggaaggcgtggccctgatgtgcctggcggaagcgctgctgcgcattcccgacaaagccacccgcgatgccctgatccgcgacaaaatcagcaacggcaactggcagtcgcatatcggccgcagcccgtcgctgttcgtcaacgccgccacctgggggctgctgtttaccggcaagctggtctcgacccacaacgaaaccagcctgtcgcgctcgctgaaccgtattatcggcaaaagcggcgaaccgctgattcgtaaaggcgtcgatatggcgatgcgcctgatgggcgagcagttcgtcaccggcgaaaccatcgccgaagcgctggccaacgcccgcaagctggaagacaaaggcttccgctactcctacgatatgctgggcgaagcggcgctgaccgccgacgatgcccaggcttatatggtctcctaccagcaggcgatccacgccatcggcaaagcctccaacggacggggcatttatgaaggaccgggcatttcgattaagctctccgcgctgcacccgcgctacagccgcgcccagtacgaccgcgcgatggaagagctttacccgcgcctgaaatcgctgaccctgctggcgcgccagtacgatatcggtatcaacattgacgccgaagaggccgatcgcctggagatctctctcgatctgctggaaaaactctgctttgaaccggagctggcgggctggaacgggattggctttgtgatccaggcctatcaaaaacgctgcccgttcgtgattgactacctgatcgacctcgcgacccgcagccgtcgccgcctgatgattcgtctggtcaaaggcgcctactgggacagcgaaatcaaacgcgcgcagatggacggtctcgaaggctatccggtctatacccgcaaggtctacaccgacgtctcctatctggcctgtgcgaaaaagctgctggcggtgccgagcctgatctatccgcagttcgcgacccataacgctcacaccctggcggcaatttatcagctggccgggcagaactactacccgggacagtacgaattccagtgcctgcacggcatgggcgagccgctgtacgagcaggtgaccggtaaagtcgccgatggcaaactcaaccgcccgtgccgtatttacgcgccggtcggcacccacgaaacgctgctggcctaccttgtgcgtcgtctgctggaaaacggcgccaacacctcgttcgtgaaccggatcgccgacagcaccctgccgctggatgagctggttgccgacccggtcgccgcggtggaaaaactggcccagcaggagggccaggtgggtcttccgcacccgaaaatcccgctgccgcgcgacctttacggcaaagaccgcagcaattcagccggtctggatctcgccaacgagcatcgtctggcctccctctcctcctcgttattaaacagcgcgctgcataaatggcaggcgctgccgatgctggagcacccggtggccgaaggcgaaatgcagccggtcgtgaacccggcagagccaaaagatatcgtcggctacgtgcgcgaagccagcgaggacgaagttcagcaggcgctgaccagcgcggttaacaacgcgccaatctggttcgccaccccgccgcaggagcgcgcggcgatcctcgaacgcgccgcggtgctgatggaaggccagatgccgaccctgatgggcatcctggtgcgcgaagcggggaaaaccttcagcaacgcgattgccgaagtgcgcgaagcggtggacttcctccactactacgccggtcaggtgcgcaacgattttgacaacgaaacccatcgcccgctgggcccggtcgtctgtatcagcccgtggaacttcccgctggcgatctttagcggacaaattgccgccgcgctggcggcaggcaataccgtgctggcaaaaccggccgagcagacgccgctcatcgccgctcagggcgtggcgatcctgctggaagcgggcgtaccgccgggcgttattcagctgctgccgggccgcggggaaaccgtcggcgccgcgctgacttccgacgaacgcgtacgcggcgtgatgtttaccggctcaaccgaagtcgccaccctgctgcagcgcaatatcgccagccggctggatgctcagggtcgtccgacgccgctgatcgccgaaaccggcggcatgaacgcgatgatcgtcgactcttcagcattaaccgagcaggtggtgatcgatgtgctcgcctcggcgttcgacagcgcggggcagcgctgctccgccctgcgcgtactctgcctgcaggatgatatcgccgatcatacgctgaccatgctgcgcggcgcgatggccgagtgccggatgggcaatccgggccgtctgaccaccgatatcgggccggtgattgacgccgaagccaaagagaatattgagcgccacatccagacgctgcgcgccaaagggcgcaaagtcttccaggcggtgcgcgaaaacggcgaagattcccgcgagtggaccagcggtactttcgttccgccgacgctgattgagctcgacagcttcgatgagctgaaaaaagaggtcttcggcccggtgctgcacgttgtgcgctataaccgcaacgagctggacgggctggtcaaacagatcaacgcctccggctacggcctgaccctcggcgtgcatacccgtattgacgaaaccatcgctcaggtcaccggcagcgccaacgtcggcaacctgtacgtcaaccgtaatatggtcggcgccgtggtcggcgtgcagccgttcggcggcgagggcctgtcgggtacgggtccaaaagccggcggcccgctgtacctgtatcgactgctctccagccgcccgcagaacgccgtcgggattaccctcgcccgccaggacgcggagtatccgctggacgcgcagctgaagacgctgctggaaaaaccgctggtcgctttacagcagtgggcggcggatcgcccggagctgcaggctttgtgccagcagttcagcgagcaggcgcaggccggaacccagcgtctgctgccggggccaaccggcgagcgcaacaccctgacctttatgccgcgcgaccgcgtgctgtgcgtggccgataatgagcaggacgcgctcacccagctggcgggcgtgaccgccgttggctgcgaagtgctgtggccggacgcccctctgcagcgcgagctggcgaaaaagctgccgcgtgaggtcagcgcgcggatccacttcgccaaagcggaaaccctgacaaccgagcctttcgatgcggttatctaccacggcgattccgatcagctgcgggagctgtgcgaacaggtggcggcgcgcgatggcgcgatcgtgtcggtgcagggcttcgcccgcggcgagagcaatctgctgctggagcgcctctatattgaacgttcgctcagcgtcaataccgccgcggccggcggcaacgccagcctgatgacgattggctaa

SEQ ID NO: 182706 - DNA, 1509 bp, Klebsiella oxytoca
atggctattagcacacccatgttggtgacttttattgtttatatttttggcatggtactcatcggctttattgcctggcgctcgacaaagaactttgatgattatattctcggcggccgcagccttggcccattcgtcaccgcgctctccgccggagcctccgatatgagcggctggctgctgatggggctaccgggggcgatatttatttccggtatttccgaaagctggattgccattggcctgacgttaggcgcatggattaactggaagctggtggcggggcgtttgcgggtgcataccgaggcgaataataacgccctgacgctgccggattatttcaccggccgttttgaagataaaagccgcgtgctgcgaattatctcggcgctggtcattttgttatttttcaccatctattgcgcttccggtattgtggccggcgcgcgtctgtttgaaagcacctttggcatgagctacgaaaccgcgctgtgggccggggcggcggcaaccattatttatacctttgtcggcggcttcctcgcggtaagctggaccgataccgttcaggccagcctgatgatattcgccctgatcctgacgccggtgatggtggtgatttccgtcggcgggtttggcgattctctggaagtgattaagcaaaagagcattgagaacgttgatatgctcaagggcctgaacttcgtggcgattatttcgctgatgggctggggcctgggctattttggtcagccgcatattctggcgcgctttatggcggccgattcgcatcacagcatcgttcacgcccgtcgcatcagcatgacctggatgatcctctgcctggcgggcgccgtggccgtcggcttcttcggaattgcctacttcaataacaacccggccgttgccggtgcggttaatcagaacgccgaacgcgtctttatcgaactggcgcagattctgttcaacccgtggattgccgggatcctgctgtcggcgattctggcggcggtgatgtccaccctgagctgccagctgctggtgtgctcaagcgcgattactgaagatctgtataaagcgtttttacgtaaaaatgccgggcagaaagagctggtatgggtaggacgctttatggtgctgctcgtcgcgttaattgcgatcgccctggcggccaacccggaaaaccgcgtgctgggtctggtgagctacgcatgggcaggctttggcgcggcgtttggcccggtggtgctgttctcggtgatgtggtcacgaatgacccgtaacggtgcgctggccgggatgatcatcggcgccttaacggtcattatctggaagcagttcggctggctgggcctgtatgaaatcatcccaggctttatctttggtagcctggggattgtggtcttcagcctgctgggtaaagcgccctccgccgagatgcagcgacgcttcgccgaagcggacgcccattatcactccgcaccgccggtgcgcgcgaccgccgagtaa

SEQ ID NO: 182707 - DNA, 435 bp, Klebsiella oxytoca
atgagtttcaaacagggtgcagtggcgctggtactggcagggatattaagcggctgcgtagcgcccgccgcgaagagggctccggcggcggacgctaacgcctgcccggcggataacgccatggtgcaaaccacgctttatttcggcttaagccgtccggccgggaaggatattaccgcgcaggagtggcagcagttcgttgaccgcgacgtgacgccgcgctttcgcgatggcctgacggtctttgacgcgcgcgggcagtggctgggcaatgacggtaccgtggcgcgcgagcagagcaaagcgctgatgctgattcacggcaaagatgagaagagcgaagaggggattgaggcgctgcgcacgacctataaatcacgctttgcgcaggagtcggtgatgcgcgttgaccagccggtctgcgtacatttttaa

SEQ ID NO: 182708 - DNA, 1218 bp, Klebsiella oxytoca
atggcggccttattgacctgtgaaataaacgacatgactcaattcttgcacttcctgctggcgctggtggtaatcctcgcccttgcctggcttgccagctacgaccgtaaaaaaatccgcattcgctatattatccagttaattattattgaaattgccctggctttcttttttctccacgccgaaagcggcctgtggctagtgaaaaatatcgcatccttttttgaatcactgctcggctttgccgccgaaggcaccaactttgtatttggcggcatgagtgaaaaagggctggcgtttattttccttggcgtgctgtgccccattgtctttatctccgcgctcatcggtattcttcagcactggcgtattctgccaatttttattcgcctgattggcaccctgctgtcaaaggttaacggtatgggtaagctggagtccttcaacgcggtcagttcgctgattctcggtcaatcagagaactttattgcctataaaggcgtgctcggcgatctctcttcccgccgcctgttcaccatgtcggccaccgcgatgtcgacggtgtcgctctccatcgtcggcgcttatatgagtatgctcgacgcgaaatacgtcgtcgccgcgctgatcctgaatatgttcagcacctttattgtgctgtcgatcattaacccgacgcgtccgggcagcgaggaggagatcaagcttgaaaaactgcatgaatcccagagcttctttgaaatgctcggtgaatatattctggccggttttaaagtcgcgatgattattctggcgatgctgattggttttatcgccttaattagcgccataaatgccctgttcgccacgatatttggcctgagcttccagcagatcctcggctacgtcttttatcccctggcgtggctgattggcattccgcttagcgatgcgctgaacgccgggagtattatggcgacgaaactggtggccaatgaatttgtcgccatgattgagctgcaaaaaatagccgccagcatgacgccgcgcgggctgggaattttatccgtgttcctggtttccttcgccaactttgcctctatcggcattatcgccggggcgattaaaggcctgaacgagcagcaggggaatatcgtttcccgctttggcctgcgcctggtgtatggcgcaacgctggtcagcctgctctccgccagctttgcggggctggtactgtaa

SEQ ID NO: 182709 - DNA, 831 bp, Klebsiella oxytoca
atgtttgtcccatttctcatcatgttacgtgaaggcctggaagctgcgctgattgtcagcctgattgccagctatctgaaacgcacccagcgcggtagctggattggcgtcatgtggattggggtgctgcttgctgcggcgctgtgcctgggcctcggaatttttatcaacgaaaccaccggcgagtttccgcagcgcgagcaggagctgttcgaaggcatcgtggcggtggtggcggtgtgcattctgacctggatggtgttctggatgcgtaaggtgtcgcgcaacgtcaaacagcagcttgagcaggcggttgataatgccctccagcgtggaaataaccacggctgggcgctggtgatgatggtttttttcgccgtcgcgcgtgaaggcctggaatcggtctttttcctgctcgccgctttccagcaggatgtcggaatctggccgcccatcggcgcgatgctcggcctcgcgacggccatcgttttagggttcctgatctactggggcggcatccgcatgaatctcgccgtctttttcaaatggaccagcctgtttattttactggtggccgcaggtctcgccgcgggggctatccgcgccttccatgaggccggactgtggaaccatttccaggcggtcgccttcgacctgagcaacgtcatttcgacgcacaccctattcggcacgctgctggaagggatcttcggctatcaggaaacgccgaccgtcagcgaagtggcggtctactttatctatttgatcccggcgctggtgctgtacgtctcgccgccgggtaaaaaaaccaccgcatcccgggcagcgtag

SEQ ID NO: 182710 - DNA, 1128 bp, Klebsiella oxytoca
atgatgaatcattttcgtcgtaatgcgctgcagcttacgcttgctgcgctgttcagctcggctttttacgcccaggcggccgatattccgcaggtcaaagtgaccgtcaccgacaaacagtgcgagccgatgaacgtcaccgtgaaggcgggtaaaacccagttcatcattcagaaccacagccagaaagcgctggagtgggagattctgaaaggggtgatggtggtggaagagcgggagaatatcgcccccggctttacgcaaaagctgacggccaacctgcagccgggtgaatatgatatgacctgcggcctgctgactaacccgaaaggcaaactgacggtgaccggcgaggcgaccaaagatgccgccaaagccgatgcgctgctcagcctgggtgaagccattaccgcctataaagcctgggtcaccgccgagaccgcggagctggttagcggcacgaaagcctttaccgatgcggtgaaagcgggcgatatcgagaaggcgaaagcgctgtacgcgccgacgcgccagcactatgaacgtattgaaccgatcgccgaactgttctccgatctcgatggcagcattgacgcccgcgaggatgactacgagaaaaaagccgaagatccgaaattcaccggcttccaccggctggaaaaagcgctgtttggcgataacagcgtcaagggaatggataactatgccgatcaattgaacgctgacgttctcgagctgcaaaaacgcattagcgaactggcgttcccgccgtcaaaagtggtcggcggcgcggccggtctgattgaagaagtggccgccagcaaaatcagcggagaagaagatcgctacagccataccgacctgtgggatttccaggccaacattgacggcgcgcagaaaatcgtcgacctgctgcgtccgcagctgcaaaaagagaacagcgcgctgctggcgaaggtggatgccaacttcaaaaaggtggacgccattctcagcaaataccgcaccaaagatggctttgagacctatgacaagctgacggatgccgatcgtaacgcgctgaaaggcccgatcaccacgctggcggaagatttggcccagctgcgcgggatcctgggtctggactaa

SEQ ID NO: 182711 - DNA, 1281 bp, Klebsiella oxytoca
atggctgagcaaaaatatgatgttaatcaaccgtcccggcggcggttgttaaaagggatcggcgcgcttggcggcgcgctggcgatatccggcggctgcccggtggcgcacgcggcaaaagacaatagctctccgggcacggtgtcgccggatgcgcgtcaggaagcgcagccgttttatggtccacatcaggcaggagtgctgactccgcagcaggcgtcgatgatgattgtcgcctttgatgtgctggccagcgataaagcggaccttgagcggctgtttcgcctgctgacccggcgtatcgcctttctgaccaaaggcggtcccgcgccggagacgccgaacccgcggctgccgccgatggactcaggcattctcgggccgtggatcgccccggataatttgacgatcaccgtctcggtggggcattcgctgtttgacgagcgtttcggcctggctaatcatgcgccgaagaggctgcaaaagatgacgcgttttccgaacgattcgctggatgcggcgctgtgccacggcgatctgctgctgcaaatttgcgccaacacccaggatacggtgattcacgccctgcgggatgtgattaagcacaccccggatttgctcagcgtgcgctggaagcgggaagggtttatctccgacagcgccgcgcgcagcaagggtaaagagacgccggtgaatctgctgggcttcaaagacggcaccgcgaatccggtgagcaccgataaggcgctaatggataaagtggtgtgggtcaccgccgaccagggagagcctgcgtgggcgacgggcggcagctatcaggcggcgaggattattcagttccacgttgagttctgggatcgcacgccgctgaaagagcagcagactatttttggccgcgataaactgagcggcgcgccgcttgggatgcagcacgagcacgatgtcccggattacagcaaagaccctgacggcgataccattgcgcttgatagccatattcgtctggcgaacccgcgtaccccggaaaccgaatccagcctgatgatgcgccggggctatagctattcgctgggggtgaccaattccggtcagctggacatggggctgctgtttgtttgctaccagcacgatctggaaaaaggcttcctgacggtgcaaaagcgcctgaatggagaagcgctggaggagtacgtgaagcccattggcggcggctatttctttgttctgccgggggttatcgacgatcggcattatctcgggcaatcgctgctcgaagcctga

SEQ ID NO: 182712 - DNA, 1065 bp, Klebsiella oxytoca
atgcccgattgctgtaacggaaaacgtcaaaccccagaccgtactcatcagcacgggagcccaacttccggccgcgattttcacaccgcaaaatcctcctcctctatcaaagaaaaccagaacccaggcaaggttaccggtgcgcgtagccgtgaccctctgccaattcgtcaggcaagcaatggcttacaaggaagccaaacctcaatcgttagtgcgcataatcgcgtcgatcgtggcgcgtgtgatgtaaaccaacaacgcaaggtgctatccatgggaagacaaaaagcagtgaccagagctcgtcgtgaggccaaacgtgtgctgagacaggattcgcgaagccataagcagcgcgaagaagaatcggtcacatcgcttgtgcaaatgagtggcgtagaagccattggcatggcgcgggatagccgcgacgcatcgccaatcgaagcgcgcaatgacgctcaggcgcattatttgaatgccatcgacaataaacagctgatcttcgccacgggcgaggccgggtgcggtaagacctggattagcgcggcaaaagcagctgaagccctgatccataaggatgtggacagaattattgttacccgtcccgttctgcaggccgacgaagatctcggcttcttaccgggagatatcgccgagaagtttgctccctatttccgaccggtctatgacgtgctggtgagaaggctaggggcttcctttatgcagtactgcctgcgtccggaaatcggcaaggtggaaatcgcgccgttcgcctatatgcgcggacgtacatttgaaaatgcggtggtgattctggacgaggcccagaacgtgaccgctgcgcaaatgaagatgtttttgacccgcctcggggagaacgtgacggttatcgtcaacggcgacattacccagtgcgatttaccttcaggcgtacggtcgggtctgaccgatgcgctggcgcgttttgaagaggatgagatggtgggtattgtgcgctttacaaccgatgattgcgtgcgctcaacgctttgccagcgtgcgctgaaagcctactactga

SEQ ID NO: 182713 - DNA, 294 bp, Klebsiella oxytoca
atgagcaccattgccgttgttgttctgacttacgttaaaccgcttgatcaggtagacgcccagcttgctgcgcacgtggaatggcttaagcaaggctatgctgacggaatatttctcgcttcggggcgtaaaatccccaggtccggcggcgtgattctggctaaaggcgatgatatggatgggctgcaaaactggctgagccaggatccatttcagcaatcgggcgtagcgaaagtcgagatcgttccttttgaagccacgatggccgctccctcactgcaggctcttctgtag

SEQ ID NO: 182714 - DNA, 789 bp, Klebsiella oxytoca
atgatagccagaaaaatttcgccgtatatggtcgtgccgtttttaatggcgataacacccggcgcgcgtgccgatgaagccgccgcgccttccgatgggctgactatcggggtgggcggaaaatacgcgcctcgttacagcggctctgacaagcagagttggcaggtggttcccgtactacaggggcggaaaggcgctttctttattgatagtcaaaaaggcataggctatgacctggctggcgacagcggtgtctacttcgagcacacgctcggttatgacctcgggcgagcggaaaaaaactcaggctggcgcgatggggcgaatacgctgaaggggatgggtaatattaaagccaccatgaataccgccttcgccgtcggctggtcggtcacgccgtggctcaccgttgaaggtaaggctacgcttccgcttaccgacgcccagggcgtgcattatcagacctccgcaaccctcctgctgctccagaactcgcaggacaccgttgccttacagtccgccgcgctgtttggcgacggccggtacgccaatacgttttacggggtcgatcaacggcagagcgcccgttccggctatcgcccctatcgcgcacccggcggattttacggcatcgacaacgcgctgacctggagccatcaatatgacgagcattggggttccacgctcagcgccggctatacctggctcggagaacacgccgctgacagcccgatagtctcacggcgcaatgaaggttccgtgaccgcggcaatcacctggacattttaa

SEQ ID NO: 182715 - DNA, 696 bp, Klebsiella oxytoca
atgttgtccagaagagtgttgataattgaagatgacgccgatgcggccggggtgcttgaggcctatttacgccgggaaaactatgatgtggcggtcaccgtggatggcctcgccggactggatatggcgcagcgctggaaacccgatctgattctgctggacgtgatgctgcccggactgaacgggaccgaggtgctggccagcctgcggcggaaaagcgatgtgccggtgattatggttaccgcgatgggggatatgcccgatcgtattggcgcgctgcgctatggcgccgacgattatgtggtgaaaccctatcatcccggcgaagtggtggcgcgagttcaggccgtgctccggcggagccgcaaagcggagacgcaggaagacattctgcgctggcaggggctggaggtggacgtcgctgccatcgtcgcgaccgtcagcaatccgggggaatctgtccacgttctcgatcttaccccgaccgagttttcgcttctggctacgctgatgcgcgcccccgtccgtcccttttcgcgacagtatctgctggagcgctgccttcctgagagcgaagcgcttgagcgcgtggtggatacgcatatttataacctgcgtaaaaaactggagggggcgggggtatccggggtgttagtcaacgttcgcggcgtgggctacaggttcagacagccatga

SEQ ID NO: 182716 - DNA, 1197 bp, Klebsiella oxytoca
atgatgaaaacccgtcactcctctctctggcgctggatttgcgggcgcattctggcgctggccatcggcagcgtgatggttatcgccacctgtatgtggctgcgtttcgccgtgcagaactattggatcatgcacaaaatgccgcccgctttgcgggaggaattcgttgcgctcagccgcaatccggaggccaacccggcgcgttttcatcagattgtcgatacctggtggggattgagctattccacgccctctatcgcctcggcggactgggtgaccgtggcggtgctggtgctggtcatgatccccttcattgtcgttatggggctccgctacgcccgtccactctcgctgcagttcagccgtcttcgtgatgcggcgaaggacgtcaccggggggcaatttggccgccaggcggagctgattgaggacgcgccagcggaaatgatccgctttgctgccgactttaacaaaatgaccggccagctggcccgctatgataaagaactccgcgcctcgcatgttgcgatggcgcatgagcttcgctccccgctgacggcggcgattggccgtctgcagggcatgctggatggcgtttttgatacccagccgcagcagctggagatggtgatgaaacaactccagcatctgaatcgattgaccgatgagctgcatctgctttccctggcagatgccggcaatctggtgctcgatgagcggccattttgtctggatgagctccttcaggagcgagccgcatggttaacgccgcaggcggacgcgcagagcgtgacgatcgccattcagccatcgccgtcctgtcccttccgcggcgatgcttttcgcatgggccaggtatttagcgtactgatggaaaatgccgtacgctacgggcgcagggggggacatctggcaattacgctgcgccgcggcgagggcgcttacaccattgattttgtcgatgacgggcccggcgtggcgaggcattttttaccggaaatgtttgaacgttttacccgcgaggaggcgtcccgcgccagacactccggcggaagcggcctcggattatccattgcgcgcgctatctgcgtggcgcacggggggcgcatcagcgcgtcgctaccggcgagcggcggcctgcagattcgcgttgttctgccgtacgctcccgccgcagaagaaaacagcctgccttga

SEQ ID NO: 182717 - DNA, 1149 bp, Klebsiella oxytoca
atgttatatgagttagttctttcccttcgtcagtgcgtgtccgctttgctcggcgcagaacggccgctatcctggtttgcgctgttgccgccgatcgtactggtcctgatgatcgtaccgcttgtgggctgcggcgataaaagcgcccaaaagcccgcgccggcccgcccggtgcgctacgtggtggtgggttccccggcgacgcttcccgctctggaaagaacgggcgaaatccacgcgcatgatgagacggccctgagctttcgtacggcgggcaggatgctgacgcgcgcggtggatgtcggcgatcgggtcaactacgggcagctgctggcgacgcttgaagagaccagcgcgcgaaatcagctggacagcgcgacggctgacgatgagagcgcccgagcgaccgcccgggtcgccgcgctgaacgttaaccgcatgcagaagctcatcgccacgggcgcaatcgcccgctctcagctggacagcgcgcaggcggactggctggtcgccagcgcccgggtgaagagcagcgaggccgccttgcgcaacgccagggaaagcctgggctggacgcgtcttacttcgccgggtgagggggttatcacggcggtcagcgcctctcccggtcaggtggtcagcgccggagagacggtggtgacgctggcggcgggtcaggcgcgcgatgtggtgtttgatatcccggatcccgctaaggttgaggcgcaaagggcggaagaatttcaggttgctttgctcagcgatgccggggtgaaggcctatgctgttttgcgtgatattagcccacaggccgatccccagacccggacatggcgcgtcagggcaacgctcaagaaaccgcccgccgcgatggcgctgggcgccagcgtcacggtaaggctgccgtcatcaggctcgacgggatacgccataccggcttctgcgctgagccgctgcggagataaaccggccgtctttgtcatcaccccgcagatgcaggcgcagctgcgcgttgtcgttcccgccagctacacggcttcttccgcgatcatcgcctccggccttgtgcccggcgaccgggttattaccgccggcgttagcaaactgcgcccgggcgaaaaagtcgtcgccggagagaggctgccgtga

SEQ ID NO: 182718 - DNA, 3075 bp, Klebsiella oxytoca
gtgaaaatagcgccgtcaaaaaatcgctttaacctttctgcatgggcgctggaaaacccgcaaatggtcagtttctttatgctgctgattatggttatcggttcgctcagctatacgctgctgccgcgaaatgaagatccggcttttactatcaaaacggcggtagtctcggcgcagtggccgggcgcgtcggtaacggataccacgcatctggtgacggatgtcctggagaaaaaattacaggaaacgccttggctcgattatatcgaaagtgaaacccgagccgggcaaacggttatctatattaatctccgcgatgacaccccggcgcacaacgtcccggcgatctggtaccagatccgcaaaaaaatgcaggatattgcgccatcgctgccggaaggcgcgcagggaccgagcgtgaacgatgagtttgacgacacgtacggcaccatttacggatttatccctgacggatatagccttgaagaggtgcgacagcgggtggagacgatccgccgtgaactgatgtccgtgccggatatcggcaaaacggtcctccttggcgagccgcaggagcaggtagtcatcgctttttcacccgcccggctggccggtatggggcttaccattcagcaggttgcggacgctctgaaggcccagaatgccgtggcgccggcaggaaccctgcgcaccgggcaggagaatatcacgctaaacgtcagcggggccctcaggaccgaagcgagcctgcgcgccgtcatcctgcacatcaacgatcgctatcttcccctgaccgatattgccacgattgaaagaagcgcggccgaaccgccttcagcggagtttcgcgtcaacggacgtcctgccgttgggctggcgatttccatggcgccgacgggcaatatgctgcgctttggcgagacgctgaataacagaatgcgcgccatcggcgccgggctgccgcacggcatcgagatagttaaagtggctgaccagtcggcggtggtcagcggcgccgtaagcggatttgtccgggtactggtggaagccgtgctgattgtgctggcggtttcttttgtctcgctgggattaagggccgggctggtggtggccgcggcgatcccgctggtgctggcgttgacctttgccgggatgctgctggcaggcattggtctacagcgcatctctctcggggccctgatcgttgcgctagggctgctggtggatgatgccatgatcgccgtggaaaccatggtatcccggcttgaggccggcgatacgcgacggcaggcggcgacgtacgctttccaaaccacggcatttccgatgttgaccggtacgctggtcatgattgccgggtttattcccgtcggttttgcctcatccagcgcgggcgaatactgcttttcgctgtttgccgtggtgctgatggcgcttctgaattcatgggtcgtggcgattctgttctcccctttgaccggaacgtggctgctgccggaaaagctgaaacatcgtgccgcaggcccgggccgcatggcgcggggatatggacgacttctgcgtacggtactgcgccaccggcttgccacccttgggattgcgctggccgcgctgggactgtcggtgtacgggaccacgtttatgcagggggagtttttcccttcatctgatcgcccggagctgctggtcagcctgacgcttccggccaatgcttcgcagacggaaacggagaaacaaacggagaggctggaaagggcgctcgccgggaatcgcaatattgaccattattcgacctatattggggcgggcgccatccgcttttatctgccgatggatgttctgctggataatgaaaatacggcgcagctggtggtggtggcgaaagacctggccgcccgcgaccgcctgcgggaacagttaaacgcgctgctggccacgcaattcagcgatctgacctcgcgcgtttcgcctctggagctagggcctccggtgggctggccgatcaaataccgggtcagcgggcctgattatctcaaggtcagagagtatgccgggcgtctggccgaggcgatagggcgctcgtcgttaacccgggaggtaaatcagaccgccggcgagccggagagaaccatcgtcctgcaggtgaaccagactgccgcgcgggcggcgggagtgtcatcgcagagtctggcgcagacgcttaataccgtctggtcaggcacgacggtcacatcgctgagagacaatgaccggctggttgatgtggtgctgcgggcgaacgacagcgagcgattgaatcttgccaccctgtcatcgctgacggttgaggggcgcggtggagaaaaagttcccctcagcgcggtggccacgccaacctggggagtggacgatccggtgctctggcgtcggcaaagattgccgtttatcaccgtacaaaccgacctcgcgccgggaatgcgggcagaaggcgtatcgaacggtctgcgcccgacggtggatcaactgcgcgcgggtttacccaccggttacagcattgtcgaaggtggagtggtcgcggagtccgaaaaaggcaacagctcggtattgaatattttacccgtcaccctcggcattatgctgttattgctgatgcttcagctgcggcgctattctcgtatgctgctggctctgttcatggccccgttcggcttgccggggattgttatggccatgctgccgggcgacacgccaatgggatttgtggctctgctcggcgtcatcgcgctggcggggatgattatccgcaatgccgtgatacttatcactgaagttgacggcaatctggctcagggcatggaaagcgatgccgctattattgccgccgcagagcaccgggccaggccgatatttctgaccgcctgcgccgcgatactgggtatggtccccatctctcaccaggtattctggggaccgatggcgtatgccatcattggcgggctgattgtcgcgacgctcgtcacgttaaccgtgctgccggcgtcctttagcctgctgctggagaggggaggataccgggaaaaacgtcccgccgcttaa

SEQ ID NO: 182719 - DNA, 678 bp, Klebsiella oxytoca
atgtctaccccagctaactttaatggttctcgtccggttattgatgtcaatgataccgccatgctgctgattgaccaccagagcggtctgttccagaccgtgggtgatatgccgatgccggagctgcgggcgcgcgccgccgcgctggcgaagatggcttcattagccgggatcccggtgatcaccacggcgtcagtgccgcagggaccaaacggcccgctgatccctgagattcatgcgaacgcgccccatgcgcaatatattgcgcgtaaaggagagattaacgcgtgggataacccggaatttgttgccgcagtaaaagcaaccgggcgtaaaacgctgattatcgccggtaccattaccagcgtctgcatggcgttcccgtccattgccgccgtcgccgatggctataaggtttttgccgtcattgatgcttccggtacctatagcaagatggcgcaggaaatcaccctcgcccgcgtcgtccaggctggcgtcgtaccgatggataccgcagcggttgcttctgaactgcagcgcacctggaatcgcccggatgccgctgagtgggccgaggtgtataccaaggtcttcccggcataccagctgctgattgagagctactccaaagctcaggacgtggtgaagaataacgaacagcttgattcacagcgttaa

SEQ ID NO: 182720 - DNA, 861 bp, Klebsiella oxytoca
atgaaacaaattacaggtatctacaccgcgccttcacagcactgggtaggcgatggtttcccggttcgctcaatgttctcttaccagactcacggcgaacagctaagccccttcctgctgctcgactacgcaggcccccatcacttcccggcggggacaggcaaacgcggcgtcggcgaacatccgcatcgcggatttgaaaccgtcaccgtggtctattccggcgaagttgaacatcgtgactctaccggcagaggcggcgtcattggaccgggcgatgtgcagtggatgaccgcaggcgccgggatcctgcatgaagagttccactcggcggaatttacccgtaccggcggcgagctgaagatgattcagctctgggtcaacctcccggcgaaagacaaaatgacgcagccgggataccagagcatcactgctgatgtgattcctgacgttgagctgccgaataatgcgggccatatgcgggttattgccgggcgctacggagatattgtcggccctgcgcacacgttctctccgcttaacgtctgggacctgcagcttaaccagagccaggaaatcacgctgcatcagcctgccggctggagtacggcgctggtcgttctggaaggtgaagtggtggtgaacggcgagggtagcgcccgcgagggtcagctggtggtgctcagccagaaaggagaagcgctccacctctcggccagtagcaacgcaaaagtactgctgatggccggtgaaccgctgcaggagccgatcgtgggctacggcccctttgtgatgaataccaaagcacaaatcgcggaagcggttcgtgattttaatagcggccacttcggccaaatctga

SEQ ID NO: 182721 - DNA, 906 bp, Klebsiella oxytoca
atgcaggatctcaatgacttagcctggttcgtacaggtgatcgatcacggtggttttgccgcggcgggcagggcgctcgatcaacccaaatccaagttgagccgtcgtatcgcccagctagaagaacgcctcggcgtccgtttgattcaacgtacaacccggcagtttgcggtaacggaagttggcctgaccttttatcagcactgcaaagcgatgctgatcgaggcggaagcggcagaacaggcggtggaaaccctgcgttccgagccgcgcgggagcgtaaagctgacctgcccggtaacgctattgcatgcgcatatcgggccgatgctggcacggtttatggtgcgctatccgggcgtgaatctgcagctggaagcgactaaccgacgcgttgatgttgttggagagggcgtcgacgtcgcgattcgcgtacgtccaaggccgatagaagatagcgatctggtgatgcgtgttctggccgatcgcgggcaccgtctggtcgccagcccccggttggtggagcggcaggggcagcctcaggttccttcagcgctaagcgattggccggggttaagcctcggggcgggcaagcatcagcataagtggcagttgaccggcccggagggggcaagggcggaaatctactttactccccggctggtcaccacggatatgctggcgctccgtgaagcggccattgccggcgttggggtggtacagcttcctttattaatggtgcgcgatcagttggccgccggagagctggtggttgtcctcgatgagtggcaaccgcgcagggaggtgatccatgcggtgtttgcctctcgtcgcggattactcccctcggtcagggcgctggtggattttctcagcgaagagtatcagcggatggaagaggattag

SEQ ID NO: 182722 - DNA, 939 bp, Klebsiella oxytoca
atggatatcatcttttaccaccccacgttcgacacccctttctggattacggaactggaaaaacagctgcccggctcgcgcgtccgcgagtggaaacccggagataatcaacccgctgactatgcgctggtctggcatccgccggtagaaatgctccagggccgccagcttaaagccgtctttgcccttggcgccggcgtcgattcaatcctcagcaaactgcgggaacacccggaaatgctgccgctgtcaactccgctgttccgtctggaagacaccggcatggggctgcagatgcaagaatacgcggtgagccaggtgttgcactggttccgtcgttttgatgactatcaggcattaaaacaagaggcgcggtggcagccgctggaggagtatcagcgtgaagatttcaccatcggcattatgggcgcgggcgtgcttggcgcgaaagtggccgaagccctgcaaagctggggttttccgttacgcatctggagccgcagccgcaaatcctggccgcaggtcaccagctttgccggagaagaggagctgaatgcgttcctcaacggaacacgagtgctgataaacctgctgcccaacacggcggaaaccgttggaattattaatagcgcgcgcctggcgcagctgccggataacagctacgtgctgaatctggctcgcggtgttcatgtggtggaagacgatctgctggacgcgctgaatagcggcaagttgaaaggcgcgatgctggatgtgtacagccgcgaaccgctgcctgaagcgagcccgctttggcggcatccgcgagtggcgatgacgccgcatgttgccgccgtcacccggcctctggaagccatggcttatatcgccaaaaccatcggtcagttagaacgaggtgaaacggtcagcgggcaggtcgatcgccagctgggatactaa

SEQ ID NO: 182723 - DNA, 738 bp, Klebsiella oxytoca
atgtatcctgttgacctgcacatgcataccgtcgccagcacccacgcctacagtaccctgcacgattatattgcagaagcaaagcgcaaggggatcaaactctttgccattaccgaccacgggcccgatatggccgatgcgcctcactactggcattttattaatatgcgtatctggccgcggctggtggagggcgttggtattctgcgcggtatcgaagccaatatcaaaaatacccagggcgaaattgactgtaccggcccgatgctcaactcgctggacctgatcattgccggttttcacgagccggtgttccctccaaaggataaagcaacgcataccgaagcgatgatcgccacgatagcgagcggcgcggtgcatatcattagccatccgggtaatcctaagtttcccgttgatatcccggccattgccgcggcagcagcgaagcaccacgtggcgctggaaatcaataactcatcctttgtttcgtcgcgcattggcagcgaagataactgccgtgccgttgccgcggccgtacgcgatgccggcggctgggttgcgctgggttcggattcccatacggcattcacgcttggtgaatttagcgaatgtcgcaaaatcctcgatgctgttgattttccggaagagcgaattcttaacgtgacgccgcggcgtctgcttaattttcttgaatcgcgtgggatgcctgcgattcctgagtttgctgaactttaa

SEQ ID NO: 182724 - DNA, 555 bp, Klebsiella oxytoca
atgaacgagttttcaatcctctgccgcgtgctgggctctctctattatcgtcagccgcaggacccgctgctggtgccgctgtttacccttattcgcgaagggaagctggcagcgagctggccgctggagcaggatgaactgctggagcgtctgcaaaaaagctgcgatatgccgtctctggccgccgaatacaacgcgctgtttgtcggtgaagagtgccgcgtggcgccttaccgtagcgcatgggtagaaggcgctacggaagctgacgttcgtactttcctcagcgcgcatggtgtccccacgggggagggcgcggcggatcatttaggctccttgctgctggccgcttcgtggctggaagatcacgcgccggaagatgaaagcgacgttctggaaacccttttcgctgagtatattctgccgtggtgcggcgagttcctgggcaaagttgaagcccatgcaaccacgccgttctggcgcgccatggccccgctgactcgtgaagccctctccgccatgtgggatgagctgcaggaagaaaacgagcaataa

SEQ ID NO: 182725 - DNA, 504 bp, Klebsiella oxytoca
atgatacgcgccatgaacatactcttcgcaatcgcattaacgacgggcattctctccggtatctggggatgggtggcggtcgcattgggtctgctgagctgggcaggtttcctcggctgtacggcttactttgcctgtccgcaaggtgggttaaaagggctgcttatttcgacctgtacggtcatgagcggcgtggtgtgggcgctggtgattattcacggtagcgcgctggcgccgcagctggaagtggttagctatatcatgaccggcgtcgtggcgtttttgatgtgtatccaggcgcgtcagctgattctctcttttgtgccgggtacttttatcggcgcgtgtgcgacgtttgccgccggcggcgactggcgtttagttgtgccttcactcgcgctgggcctggtatttggctatgccatgaaaaatagcggcctgtggctggcgacccgggcggagaaaaataaatctctggctaatcaaagtcgcgaatctttttaa

SEQ ID NO: 182726 - DNA, 306 bp, Klebsiella oxytoca; identical to SEQ ID NO: 178156

SEQ ID NO: 182727 - DNA, 555 bp, Klebsiella oxytoca
atgtctgttcaacctgaagtggttctcggcgatattaccaggcttgaggtcgatgttatcgtcaacgcggctaatccgtcgctgcttggcggcggcggggtggacggggcgattcaccgcgcggcagggccggaactgctggctgcctgcaaagttgtgcggcaacagcagggagagtgtccgccgggtcatgcggtgattacggcggcaggaaatctgcccgccagcgcggtgattcacgccgtagggccggtctggcacggcggtgacaggcaggaggcggaattactggctgacgtttacaaaaatagcctgctgctggcctcggcaaataattaccgatccatcgcatttcctgctatcagcaccggcgtatatggttaccctaaacaggccgccgcggagatagccgtgcggacggtaactgcctttctcactcgctacaatccgctggagcgcgtttatttcgtttgttttgatagcgaaaccgccggcatctatacccaattactcgaggcgagtcgcgcgcaactcggccatcagaataagatatga

SEQ ID NO: 182728 - DNA, 606 bp, Klebsiella oxytoca
atgggagagtcatcggtgactgaagggaaggttctacaaaaacaacggcttcgccggatggaaattgttgccgcggcacaaaaatgtttcgcggaaaagggcctgcatggcgcctccgtagcggatattgcgcgtcaggctggccttagcgtaggccagctatatcgcgttttcgccagcaaagaagagatcatcgaagttatcgtcagcgagatcgtgaatgccagagtgggcgaaatggttgccgggaatcatgatttagcccgcatggcttcagttttagccggcgtgctccccgcgaccgagtctacgaaaaacgataattatctgctgatggaaattaacgccgaggcgtcccgaaatccgcgcctgcgtgaaattatgatccaggccgatcgtcgcctgaaagaggagggcgggcggcttacccgccactaccatcctgagatgaccgcggagcaaattagcgtcgcctgcgaatttatcgcgatattaacggaaggggcggcataccgttgcgacctggcgacggctccgacggtagataaagcggcgatggagagcctgtaccgcgatgtctttcagctgttgtttgcgcaaaaatag

SEQ ID NO: 182729 - DNA, 1161 bp, Klebsiella oxytoca
atgaataatactccggtacagcgtgaatattttttcgatagcatccgcgcctggctgatgctattgggcatcccttttcacatttcgctcatttactccagccacagctggcatgttaacagcgccgagccctcgtggtggctgacgttatttaacgacttcatccatgcctttcgcatgcaggtcttctttgtgatttccggctatttttcctacatgctttttctgcgctatccgctgaaaaaatggtggaaagtacgcgttgagcgcgtcggcattcccatgttaacggcgatcccgctcctgaccctgccgcagtttattatgctgcagtacgtcaacggtaaagcggataactggcatacgctgtcaggctatgacaagttcaacaccctcgcctgggagctgatctctcatctgtggtttttgttggtgctggtggtcctgacgtcgctgggcgtggtgatgttcaaatggctgacgcgaccgcgttctgccgctgcgcccacctttggtgacaccgtcacattaggccagctgtcgatgatttttctcgctctgggcgcgctgtacgcggtcatccgccgcactatttttatcctctatccgcccattctcagcaacggtctgttcaactttatcgtgatgcagacgctgttctatctgcctttctttatcctgggcgcccagacgtttattaacgcgcggctgaagacgatgttcacgactccctcgccgtggtgctttgtggcagctttcctgggatttatcgcctaccgactgaatcagcagtacggctcgggggatggctggatgtacgaaacggagtacgtgattacgatggtgctggggctatggatggtcaacgtggtcttttcgcttggccaccgtttgttaaatttccagtccgcgcgggtgacctacttcgtcaacgcatcgctatttatctacctggtgcaccaccctctgaccctgctctacggggcatggataaccccggtcattcaatcaaatacccttggatttatcaccgggctggtttttgttgtcgggattgcactagtgctgtatgaaattcatctgcggataccgctgttgcgctttcttttttccggaaaattccagcaaaagacggctaagccgcaaatttccgccagttaa

SEQ ID NO: 182730 - DNA, 1554 bp, Klebsiella oxytoca
atgaaacataaaccacagatgatgaaaatgcgttggttaagcgcagccgtaatgttgtccctgtgtacttcatctgcatgggcattcagcattgatgacgtcgcaaaagaggcacaaacgttagccggcaaaggctttgaagcgcctaaaagtaacctgccctctgccttccgcgacatgaagtatgcggactatcagcaaattcagtttaatcacgacaaagcctattggaataatctgaaaagcccgttcaagctcgagttttatcaccagggtatgtatttcgatacgccggtcaccattaatgaagtgacggcaaccagcgtacgtaaaattaaatatagcccggactattttaattttggcaacgttcagcacgataaagacacggttaaagacctcggttttgcgggctttaaggttctgtatccgatcaacagcaaagacaagaacgatgagatcgtcagcatgctcggagccagctatttccgcgtgctcggtcagggccaggtatatgggctttctgcccgcggactggctatcgataccgcgctgccgtccggagaagagttcccgcgcttccgtgagttctggattgagcgtcctaaagccaccgataaacgcctgacgatttatgcgctgcttgattccccgcgcgcaaccggcgcctatcgctttgtgatcatgcccggtcgcgataccgtggtggacgtgcagtctaaggtctatctgcgtgacaaagtcggtaaactgggcgtggcgccgttgaccagcatgttcctgttcgggccgcatcagccgtctccgaccaccaactaccgcccggcgctgcacgactccaacgggctgtccattcttgccggtaacggtgagtggatctggcgtccgctcaataacccgaaacacctggccgtcagcagctacgcaatggaaaacccgcaggggtttggcctgctgcagcgcggccgtcagttctcgcgttttgaagacctcgacgaccgctacgatctgcgcccaagcgcgtggattacgccgaaaggtgattggggcaaagggaaaatcgaactggtcgagatcccaaccaacgatgaaaccaacgataacatcgtcacctactggacgccggatcagctgccggaacccggcaaagagatgaacttcaaatacaccatcactttcagccgtgacgaagacaaactgcatgcgccggataacgcttacgttatgcagacccgccgttctaccggcgacgtcaagcaatcgaatctgatccgccagcctgatggcaccattgcctttattgtcgatttcaccggcgccgagatgaaaaagctgcccgcagatacgccagtgactgcccaggccagcatcggcgataacgctgaaatcgtcgaaaataccgtgcgctacaacccagtaacgaaaggctggcgtatgatcctgcgcgtcaaagtgaaagatcctaagaaaaccacggatatgcgcgcagccctggtcaataccgaccagacgctgagcgaaacctggagctatcagctgcctgccaatgaataa

SEQ ID NO: 182731 - DNA, 2529 bp, Klebsiella oxytoca
atgaataagataacgaagtacatcgacgcattgccgctgccggatgcagaaaaacgcgcgttacctgacgcaagtctgcaggccgtacatcaagcactggacgctgaacatcacgtttaccaccgcgaagacgactccccgctggggtcggtaaaatcgcggctggagcacagctggccagattcactggccggtaaccagctggttaaggatgacgaagggcgcactcagctcaacgccatgccgaaagcaaaacgctcctccatgtttccggacccctggcggactaacccggtcgggcgcttctgggatcggctgcgcggacgcgacgtgacgccgcgctatctttctcgcctgagccaggaagagcaggagagcgagcagaaatggcgtaccgtcggctctatccgccgctacattctgctgctgctgacgctggcgcagaccgtggtggcgacgtggtacatgaaaaccattttgccctaccagggctgggcgctgattaacccggcggatatggtggggcagaacctgtggatctcctttatgcagctgctgccctatgtgctgcagtcggggatcctgatcctgttcgccgtgcttttttgctgggtctcagcggggttctggaccgcgctgatgggcttcctgcagctgctcatcgggcgtgataagtacagtatctcagcctcgaccgtcgggaatgagccgttgaacccggagcatcgcacggcgctgatcatgccgatctgcaacgaagacgttgaccgcgtattcgcgggcctgcgtgcgacctgggagtcggtaaaggccagcggcaacgccgagcactttgatgtctatatcctgagcgatagctacaatccggatatctgcgtggcagagcaaaaggcgtggatggagctcattgccgaagtgcagggcgaagggcagatcttctatcgccgccgccgccgccgcgtgaagcgcaaaagcggtaacattgatgacttctgccgccgttggggtagccagtatagctacatggtggtgctggatgccgactccgtcatgagcggtgagtgcctgagcggcctggtgcgcctgatggaagcgaacccgaatgccggtatcatccagtcatcgcctcgcgcgtcgggcatggatacgctgtatgctcgctgtcagcaatttgccacccgcgtctacggcccgctgtttaccgccgggctgcacttctggcagctgggtgagtcgcactactggggacacaacgccattatccgggtgaaaccgtttattgagcactgtgccctcgcgccgctgccgggtgagggtaacttcgcgggttccattctgtcgcacgacttcgtcgaagccgcattgatgcgtcgcgccggatggggggtctggattgcttacgatctccccggatcttatgaagagctgccgccgaacctgctggacgagctgaagcgcgatcgccgctggtgtcaggggaacctgatgaacttccgcctgttcctggttaaagggatgcacccggttcaccgcgcggtgttcctgaccggcgtgatgtcatacctgtcggcgccgctgtggtttatgttccttgcgctctcaactgccctgcaggtggtgcatgcgttgaccgaaccgcagtactttctgcagccgcggcagctgttcccggtctggccgcagtggcgtccggagctggccattgccctgtttgcttccaccatggtgctgctgtttctgccgaagctgctgagtattatcctggtgtggtgtaaagggccaaaagagtacggcggatttatccgcgtgaccctttctctgctgctggaggtgctcttttcggtgctgctggcgccggtgcgtatgctgttccataccgtgtttgtggtcagcgcgttcctcggctgggaagtggtgtggaactcgccgcagcgtgatgacgactctaccccgtggggcgaagcgtttatgcgtcacggctcgcagatgctgttgggtctggtctgggcggtgggcatggcatggctggatctgcgcttcctgttctggctggcgccgattgtggtgtcgctgattctgtcgccgttcgtgtcggccatttccagccgcgccaccatcggcctgcgcactaaacgctggaagctgttcctgatcccggaagagtactccccgccgcaggtgcttaaagatactgacgcttacctgacgcttaaccgtcagcgttcgctggacgacggctttatgcatgcggtatttaacccgtcgtttaacgcgctggcaacggcgatggccaccgcgcgccaccgtcacgggcatattctggatatcgctcgcgaacgtcacgttgagcaggcgctgaacgagacgccggataaactaaaccgcgatcgtcgtctggtattgctgagcgacccggtcacgatgtcacgcttgcactatcgcgtgtgggccgcgccggagaaatactcttcgtgggtcggcgcctatcagcagctgacgttgaatccgctggcgttaaaaacgaagtaa

SEQ ID NO: 182732 - DNA, 228 bp, Klebsiella oxytoca
atgagagttttactggttatcgcaatggcgctgtttctcagcggctgcgggagtattatcagccgcacagtgcctggccagggccatggaaaccagtactatcccggcgttcagtgggatgttcgtgattcagcatggcgctatatcactattctcgatctgcccttttcgctggtgtttgatacgctactgctgccgcttgacgccagccacggcccctataactaa

SEQ ID NO: 182733 - DNA, 387 bp, Klebsiella oxytoca
atgccaaaggattcgatgttctatgccacgcttgaagaagcaatcgatgcagcccgcgaggagtttctggctaataatcccgatagcgacgaagagagcgccagcattgagcagctaaatatccagaagtacgtactccaggacggtgatattgcctggcaggccgaatttttcgccgacgaggatgaacagggcgaatgtctgccggtcctcagcggtcaggctgcgcagagcgtctttgacggcgattatgatgagattgagcttcgccaggagtggctggaagaaaacacgctgcatgaatgggatgaaggcgagtttcagcttgaaccctctctcgataccgaggagggccaggctgccgccgatgaatgggatgaacgctaa

SEQ ID NO: 182734 - DNA, 1251 bp, Klebsiella oxytoca
atgccctctgctgatacccccattaactggaaacgtaatctcaccgtcacctggctcggctgctttttaaccggcgccgcctttagcctggtgatgccgttcctcccgctctacgtcgaacaactcggcgtaaccggccatagcgccctcaatatgtggtcagggctggttttcagcattacctttttattttccgccgtggcctcccccttctggggcggtctcgcggaccgcaaagggcgcaaaattatgctgctgcgctcggccctcggtatggcaatcgtcatgctgctgatgggcctggcgcagaatatctggcagtttctgatcctgcgcgcgctgttaggtctgctcggcggatttattcctaacgccaatgcgctgatagcgacgcaaattccccgtcataagagcggctgggcgctggggactctctctaccggggcggtcagcggcgcgctgctggggccgctggccggcggtttcctggccgatcactggggattgcgtaccgtcttctttatgacggcaggcgtgctgtttatttgtttcttatttaccctttttctcatccgcgaaaattttgtcgccgtcagtaaaaaagagatgctcagcgcgaaagacgttttcacgtcgcttaaaaatccgaagctggtgctgagtctgtttgtgacatcgctgattatccaggtggctaccggttctatcgcgccgattttgacgctttacgtgcgcgatctcgccggcaacgtcagtaatattgcgtttatcagcggcatgatagcttcagtccccggtattgccgccctgcttagcgcccctcgcctcggtaaactcggcgaccgtatcggtccggaaaagatcctgatcgttgcgctggtgatttctgtcctgctcctgattcccatgtcgtttgtccagacgccgctgcagctggggatcctgcgcttcctgttaggcgccgccgatggcgcgctgctgccggcagtgcaaacgctgctggtgtacaactccaccagccaaatctcgggcagaatattcagctataaccagtcgttccgcgatatcggcaacgtcacgggcccgctcatcggcgcatcggtttccgccaactacggcttccgggcagtctttttagtcaccgccggtgtggtgctgttcaatgcggtttactcgaccctgaccctcggtcgctcccgccgcccccgggcaacggacaatccgggttccggcacgcattcggtaaattaa

SEQ ID NO: 182735 - DNA, 921 bp, Klebsiella oxytoca
atgacccatttacctaaattttccgcagcgttgctgcacccgcgttactggttgctttggctcgggatcggcctgctctggttggttgttcaactgccttatccgctgatttatcgcctcggaaccggtcttggccgcctcgccatgcggctaatgaagcgccgggccaaaatagccaaccggaatctggagctctgttttcccgataagagcgagcaagagcgtcaccgcatggtcgtggcaaactttgaatccgtcggcatggggttaatggaaaccggcatggcctggttctggccgacgaagcgtattgcgcgctggactgactccatcggcgtcgagcatatccgtgatgttcaggcgcaaaagcgcggcattttgctgattggcattcatttcctcacgctggagatgggcgcgcgcatgttcggtatcaacgagccgggcattggcgtttatcgtccaaacgataacccggttatcgactggctgcagacatggggacgcctgcgctccaacaaagacatgatcgatcgtaaagatctgaaaggcatgatccgcgcgctgaaaaagggtgaagtgatctggtatgcgccggatcacgactatggcccggccgccagcgtatttgtgccgtttttcgccgttgaccaggccgcgaccacttcgggcacctggatgctggcaaagatgtctaaagcctgcgttgtgccgttcgtgccgcgccgtaaaccggacggtaaaggctatgagctgattatcctgccgccggagtgcgatccgccgctggacgatgcggagactaccgccgtctggatgaacaaagtggtagagaagtgcatattgatggcgccggaacagtatatgtggatgcatcgccgctttaaaacgcgtcctgaaggcattccttctcgttactag

SEQ ID NO: 182736 - DNA, 1065 bp, Klebsiella oxytoca
atgccagtgttacataaccgcatttcaaatgagacgttaaaggcgcaaatgttggctgagaccgagccgcgcacgacgatctcgttttataaatatttcactattatcgacccaaaagccacgcgcgatgcgctgtggattgcgttgactaagctgaacgtctttggccgaatttatctggctcacgaaggtattaacgcgcaaattagcgttccgcaaagccgggtcgatgcgctgcgcgaattcttatacgcttttgatcctgccctgaatggtctgcgcctgaatatcgccctcgatgatgacggtaaatccttctgggttctgcgtctcaaggtacgcgatcggatcgtcgcggatgggattgacgatccgacgtttgatgcatcggacgtgggcgattatttaaaggctgcggaagtcaacgcgatgctggacgacccggatgcggtctttattgatatgcgtaaccattacgaatatgaggtcggccatttcgagaatgcgctggagatcccggcggatacgtttcgcgaccagctgccgaaggccgttgagatgatgcaggaacataaagataaaaatatcgtgatgtactgcaccggcggtatccgctgcgaaaaagccagcgcgtggatgaagcacaatgggttcactaaggtctcgcatattgagggcgggattatcgaatacgcgcgacgcgcgcgcgaacaggggctgccggttcgctttatcggtaagaactttgtcttcgatgagcgtatgggagagcgtatctcagatgatgttatcgcccattgccatcagtgcggcgctccctgcgacagccataccaactgcctgaacgatggttgccacctgctgtttattcagtgtcctgcctgcgcggagaaattcgccggctgctgtagcgaagcctgcatggaagagcataagctgccggaagaggagcagcgaaaactgcgcgccggccgcgagaatggcaataagatctttaataaatctcgcggtcggttgaatacgaagctggggatcccggatcctgagccttcagaaaaaccatag

SEQ ID NO: 182737 - DNA, 129 bp, Klebsiella oxytoca; identical to SEQ ID NO: 178154

SEQ ID NO: 182738 - DNA, 1119 bp, Klebsiella oxytoca
atgcaatacgatcttatcattatcggtagcggctcggtcggcgctgccgcaggctattatgcgcggcaggcagggctcaatgtactgatgattgatgcccatcagccgccgcatcaggaaggcagccatcacggcagcacccgcctcattcgtcacgcctacggcgaaggcgaaagatatgtccccctggtactgcgcgcgcaacagctatgggatgagtttgccgccgccagcggtgaagccgtctttgaacgtacaggagtgattaacctcgggcctgccggttccgactttctgcgcaatgttgccagcagcgcgcgcgagttccagctcaatatcgaagaaatggatgcgcagacggtgatgactcgctggccggaaattcgtattcctgatgattatcgggcgatatttgaacccgcatccggcatactgcgcagcgaactgtccgttgaaagctggatccgtctggcacgcgaagcgggcgccgcacagctcttcaactgcccggtgtcggccattcaccacgcgccgaacggcgtaaccgtcgagacgcttgatggtgaatacagcggcaaaaaactgctggttagcgccggtacctgggttacccggctgatgccagaactccctgtccagccggtacgtaaaattttcgcctggtttcaggcggatggccgctacagcagcaaaaataatttcccggcgtttaccggtgagttagcgaatggcgatcagttttacggtttcccggcagaagataacgaattgaaaatcggcaagcataacggcgggcagcctatttccacgccggaagagcgtaagccgtttggtgccgttgcaacagacggctctgaagcttttagcttcttgcgtaatgtgttgcccggtatcggcggctgcctgcatggcgcatcctgtacctatgacaacaccgccgacgaggactttatcattgatacgctgcccggccagccggatacgctattgattaccggcctgagcgggcacggctttaagttcgcaccggtactcggtgaactggccacacggtttgcgcttgaagaaccctttgggtttgatctatccccgttttcactggcgcggtttaagaaataa

SEQ ID NO: 182739 - DNA, 255 bp, Klebsiella oxytoca
atggaaaagaataatgaagtcatccagacccatcccctcgtcggatgggacatcagcaccgttgatagttacgatgcgctgatgttgcgcctgcactaccaaaaccccgctcaagaaagcagtagagacgcagagattggccagacgctatggctaacgacggacgtcgcacgtcagtttatttcgattctggaagcaggtattgcgaagattgaatctggcgaataccaggaaaatgagtatcgaaggcattaa

SEQ ID NO: 182740 - DNA, 246 bp, Klebsiella oxytoca
atgcgtattgaagtctctatcgccaaatcaacagccttacccaacggcgccttagatgcgctgaacaatgaactctcgcgtcgtatcgaacagcagtttccctctacctcaagtcaggtaacggttcggtacgcggctaataacaatctgtcggttatcggcggcctgaaagaagacaaagaccggattagcgaaatcctgcaagaaacctgggaaagcgctgacgactggtttgtccgcgactag

SEQ ID NO: 182741 - DNA, 1047 bp, Klebsiella oxytoca
atgacagcacaatcccaggtattgaaaatccgccgccctgatgactggcatatccatctgcgcgatgacgatatgttaaaaaccgtcgtgccttataccagtgaattttatggccgggcaatcgtgatgccaaacctggtaccgcctgtcactaccgtcgaagccgccctcgcctatcgccagcgtatcgttgatgcgatccctgcgggccatgattttacgccgctgatgacctgctatctgacggatacgctcgacccggctgagctggagcgcggatttaacgaaggcgtattcactgccgccaagctctatccggccaacgctacaaccaactccagccacggcgtcaccagtacggatgccattatgccggtgctggaacgcatggaaaagctggggatgcctctgctggttcacggtgaggtcacccatgctgatatcgatatttttgaccgggaagcgcgctttattgaaacggtcatggagccgctgcgtcagcgcctgcccggcctgaaggtggtcttcgaacacatcacgaccaaagatgccgctgaatacgtacgcgacggtaacgagctgctggcggccaccatcaccccgcagcacctgatgttcaaccgtaaccatatgctggttggcggcgtgcgtccccacctttattgcctgccgatcctgaaacgcaatattcaccagcaagcgctgcgcgaactggttgccagcggttttgaccgcgctttcctcggcacggattccgctccccatgcccgccatcgtaaggaagccagctgcggatgcgcaggctgttttaacgcgccgaccgcgctgggcagctacgccacggtatttgaggagatgaacgccctgcaacactttgaagccttctgttcgcttaacggcccccgcttctatggcctgccggtcaatgagggctacgtggagctggtgcgcgaagagagccaggtggtcgagagtatcgccctgccaggcgacgcgctggtgccgttccttgccggggaaaccgtgcgctggacgatgaaaaaataa

SEQ ID NO: 182742 - DNA, 561 bp, Klebsiella oxytoca
atgaaaaagatgtttatcgcggccgcgcttatcgttagcggcctgcttagcgcctgtaatcagctcacgcaatattccgtgagcgagcaggaaatcaatcaggcgctgcagaaacgtaaccacttcgctaaggatattggcctgccaggcgtagcggatgcccatattgaactgcaaaatcttaccagcgctattggccgtgaagaaccaaacaaagtcacgttaagcggcgtggccaatttagatctgaattcacttttcgggaaccagaaagcgaccatcgatctgaagctcaaagcgctgccggctttcaataaagaaaagggggccattttcctgcaggagatggaagtcgtcgatgctaaagttcagccggaaaagctccagtctgtcgtacagacgctgatcccttacctgaatcagtccctgcgtagctacttcaatcagcagcctgcctacgtcctgcgcgaggatgccagcaccggtgaagcgctggcgaaaaagtatgctaaagggattgaagtgaagcccggcgagattattatcccgttcaccaactga

SEQ ID NO: 182743 - DNA, 648 bp, Klebsiella oxytoca
gtgaagttatatatctacgatcactgcccgttctgccttaaagcccgcatgattttcggcctgaaaaatatccccgtcgaactgattgtgctcctgaacgatgatgaattaacccccacccgaatgatcggccagaaaatggcgccaatcctgcaaaaagacgatagccgctatatgccggaaagcatggatatcgtgcactatgtcgataagctggacggcaaaccgctgcttaccggcccgcgtaatccggcggtggaaacctggctgcggaaggtcaacggctacgcgaaccgcctgctgatcccccgctttgccaaatccgcgtttgatgaattcgccacgccagaggcgcgcgcctattttgtgaaaaagaaagaggcggctatcggcagctttgctgaccatctcgcccattcccccggtctggtgaagaacatcagcgacgatctgcgggcgctggataaactgattgtccagccgaacgccgtcaacggagaactctctgaagatgatattcagctctttcctctgctgaggaatctgacgctggttgccggcgtgaactggccgagtcgggtggccgcctatcgtgacaacatggccaaacagacgcagatcaacctgctttcttcaatggctatttaa

SEQ ID NO: 182744 - DNA, 1209 bp, Klebsiella oxytoca
atgtcccgcgtatcgcaggcaaggagcctgggtaaatatttcctgttagtcgataacatgcttgtcgtactcggctttttcgttgtgttcccgcttatctccattcgctttgtcgaccagatgggatgggctgcgctgatggtcgggattgcgctcggcctgcgtcagctggtgcagcaaggcttaggaatatttggcggcgccattgccgaccgttttggcgccaaaccgatgatcgttaccggtatgctgatgcgcgcggccggcttcgcggcgatggccgtcgctcatgaaccctgggtgctgtggctctcctgtattctttctggcctcggcggcacgctattcgatcccccgcgggcggcgctggtggtcaagctggtacgcccgcaccagcgcggacgtttcttctctatcctgatgatgcaggacagcgcaggagcggtgatcggcgcgctgctgggcagctggctgctgcaatatgattttcgcctggtgtgcagcgccggagcggcgctgtttatcgcctgtgcggcattcaacgcctggtatcttcccgcctggaagctgtcgacggtcaaaacgccggttcgtgaaggactggggcgcgtgttgcgcgacaaacgctttgtcacctatgtgctgacgctgaccgggtattatatgctggcggtgcaggtgatgctgatgctgccgattatggttaatgatattgcgggttctccggcggcggtcaaatggatgtacgccattgaagccaccatttcgctaacgctgctgtatccgatcgcccgctggagcgaaaagcgttttcgcctggagcagcgcctgatggccggcctgctgatcatgacgctcgcgatgatgccaattggcctgagcagcaatttgcagcagctgtttacgctgatctgcgtattttatatggggtcaatcatcgctgaacccgcgcgtgaaacgctgggagcgtcgctggcggatgccagagcgcgcggcagctatatgggctttagccggttaggcctggccttcggcggcgctttcggctacgcaggcggcggctggctgttcgatgccgggaaggccgtcggtcagcccgagctgccgtggctgatgctgggcattatcggcctcgcgacgtttattgcgctgtggtggcagttcagtccaaaacgttcggcctccggaatgctggagccgcgaacctga

SEQ ID NO: 182745 - DNA, 585 bp, Klebsiella oxytoca
atgtttggctatcgcagtaacgtaccgaaggtgcgtttgacgacggaccggctggtggttcggctggtgcacgatcgtgacgcctggcgtctggccgattattacgcggaaaataaagggttcttaaaaccctgggaaccggtgcgcgatgacagccactgttatccttccggctggcaggcgcgtttatcgatgatttctgagtttcataagcagggctcggcgttctattttgctctgcttgacccggaagaaaaagagatcatcggcgtggcgaatttttcgaacgtggtgcgcggatcgtttcatgcctgctatctcggctactccatcggggagaaatggcaagggcaggggctgatgtatgaagcgctgacgtcggccattcgctatatgcagcgcacgcaacatatccatcgcataatggcaaactatatgccgcataatcagcgcagcggcgatttgctggcgcgtctgggctttgaaaaagagggttacgccaaagattacctgctcattgatgggcagtggcgcgatcacgtactgacggcgttgacgacaccggactggaccccgggtcgctaa

SEQ ID NO: 182746 - DNA, 648 bp, Klebsiella oxytoca
atgaaatatcagttaaccgcgcatgaggcgcgggtcattggctgcctgctggaaaagcaggtcaccacgccggagcagtaccccctgtcggtcaacgcggtggtcaccgcctgtaaccagaaaacaaaccgtgaaccggtaatgtcgctcagcgaaagtgaagttcaggatctgctcgatacgctagtcaaacgccattatttgcgtacggtcagcggtttcggcaatcgggtgaccaagtatgaacaacgcttctgcaactctgaattcggcgatctgaaattcacgccggcggaagtcgctatcgtgaccacactgctgctgcgcggggcgcagacgcctggcgaactccgcggtcgcgcgcagcgaatgcatgaattcagcgatatggccgaggttgaaagcgtcctcgaaaacctggcttcgcgagaagatggcccctatgttgcgcgtctgccgcgggagcctggcaagcgtgaaagccgctatatgcatctgttctgcgatgatatggattcactgattaccgtcgtggaggccgtgtcgccgcccggcgacgatcttcagatgcgcgttgaggcgctggaggcggaggttgccgagctaaaagcgcgtctcgattcactgctggctcacctgggagattaa

SEQ ID NO: 182747 - DNA, 924 bp, Klebsiella oxytoca
atgtcggcgaaactacgtataggagtggttggcctgggcggtatcgcgcaaaaggcgtggttaccggtgctgggggccgcagatgactggacgctgcaggctgcgtggtcgcccgggaaagagaaagcgctgcgtatctgtgaaacctggcgtattccctatgcggattctctggaacagctggcggcgcagtgtgatgccgtattcgtgcatacttcaacggcttcacattatgaagtggtttcccgcctgctcaatgccggagtgcatgtctgcgttgataaaccgctggcggataaactcagcgatgcggaggcgctggttgagctggccgctcgccgtcatctcacgctaatggtcgggtttaaccgccgttttgcccccctctatcgcgagctgaaggcccagctcgggagcgctgcgtcgctgcggatggataagcaccgtagcgacagcgtgggccacgatctgcgcttcacgctgttggatgactatctgcacgtcgtcgataccgcgctatggctggcgggcgataaagcgcgtttaagcggcggtgcgctgcacaccaccgctcaaggggagatgctgtatgccgaacaccatttcagttgcggaatgatgcagataaccaccagtatgcaccgccgcgccggaagccagcgggagtgggtacaggcggtaaccgacggcggattatatgaagtccgggatatgcgggagtggcaggaggagcgggggcgcggcgtgatccagcgcccgatccctggctggcagaccacccttgagcagcgtggatttaccggctgcgcgcggcattttatcgaatgcgtgcaaaatcagacggttcctgaaacgtccggcgagcaggcgctgcttgctcagcgcgttatagagaaactctggcgcgaagcgatgagcgaataa

SEQ ID NO: 182748 - DNA, 1536 bp, Klebsiella oxytoca
atgaatcttttaaaatcactggcggccgtcagttcgatgaccatgttctcgcgcgtgctgggctttgcgcgcgatgcgattgtggcgcgtatttttggcgcggggatggccaccgacgccttcttcgttgcttttaaactcccgaaccttttacggcgtatttttgctgaaggcgctttctcacaggcttttgtgccgattctggcggagtataaaagcaagcagggtgaagatgcgacccgggtgttcgtcgcctatgtttcggggctgctgacgctggttctggcgctggtcaccgtcgccggtatgctggcggcaccgtgggtgattactatcaccgcgccgggatttgccaatacgcccgaaaagttcgccctgaccacgcagctcttgcgcatcacttttccctatattctgttgatctccctggcttcactcgtgggcgccatcctgaatacctggaaccgcttttcggtgcctgcttttgccccgaccttcctgaacgtcagcatgattggttttgcgctgtttgccgcgccctattttaatccgccgatgctggcaatggcgtgggcggtaacggttggcggtattttgcagctagcctggcagctgccgcatctgaaaaaaatcggcatgctggtgctgccgcgggtcaaccttaaagatgctggcgcggtgcgggtggtaaaacagatgggcccggcgatcctcggcgtctccgtcagccaaatctcgctgatcattaacacgatttttgcctcattcctcgtttccggctccgtatcgtggatgtactacgccgatcgtctgatggagtttccgtccggcgtactgggcgtggcgctggggaccattttgctgccttcgctgtctaaaagcttcgccagcggcaatcacgatgaatattgccgtttgatggactggggattacgcctgtgcttcctgctcgcgctaccgagcgcggtggcgttagggatcctggccaagccgctgacggtcgcgttattccagtacgggaaatttaccgcttttgatgccgcgatgacccagcgcgcgctggtggcgtattctgtcgggctgatggggctcatcgtcgtgaaggtgctggctcccggattctattcgcggcaggacattaaaacgccggtgaaaattgccatcgtcacgctgatcatgacgcaggtgatgaacctcgcctttattggccccctgaagcacgctggtctgtcgttgtcgattggtctggcggcctgcctgaacgccgcgctgctctactggcagctgcggaaacagaaaatttttacgcctcagccgggctggttcctgttcctgctgcgcctggtcatcgcggtgattattatgtcagcggcgctgctgggcgtgatgtacctgatgccggagtggtcgcaggggacgatgccgttccgcctgctgcgcttgatggtggtcgtggtggccggcgttgtcgcctatttcgcgacgctgctgctgctgggctttcgcgtgaaagagtttgctcgccgcacggtttga

SEQ ID NO: 182749 - DNA, 1215 bp, Klebsiella oxytoca
atgacaccaactccactcacctcccgcgccgccgggtgggtcattttcatccttgcgctgggcgcgggcttcagcgtcgcctcaatctattacgcgcaaccgctgctgccgctgatgggggctaacctccatttgagcgttgagggtatgggtctggttccgaccctgacccaggccggctacgcgctgggcatacttttccttctcccgcttggcgaccgccacgaccgcagaaagctgatcctgatgaaaagcgccgcgctggccgtcctgttgctgctctgcagccttaccggtcagctaagctccctgctgattgtcagcctgcttatcggtatggccgcgaccatggcgcaggatatcgtaccggcagccgcgattctggctcccgcgggcaagcaggggaaaatggtgggtacggtgatgaccggcctgctgctggggatcctgctgtcgcgaaccgttagtggtctggtgggggcgctattcggctggcgggtaatgtatcaggcggctgcggtcagcatcgcgatgattggtgtggtgatgtggcgcgtgctgccgcgcttcgaaattcactcaaccctcagctacccgcagctgatgaaatcaatggcgcatctgtggaaacgctatccggcactccgtcgcgccgcattcgcccagggattcctctctatcgcctttagcgccttctggtccacgcttgcggtcatgctgttggcgcactatcagatgggcagcgcggtagccggtggcttcggtatcgcaggggctgccggggcgcttgccgccccgctggccggcggcctggccgacaagtttggcgcagaaaaagtcacgcaaatgggcgcggcgctggtgacggtttcgtttgccctgatgtttttgctgcctgcgctaccgccgcatggtcagctaatcctgattgccatctcggccgtcggttttgacctggggctgcaatccagcctcgtggcgcaccagaatctggtgtatggcctggagccgcaggcgcgcggacgcctcaacgcgctgctgttcaccggcgtgtttattgggatgtcgctgggttcagtactgggaagcaaactgtatgtgctcgcaggctggagcggcgtggtgaccctcgccgtcgtaaccggtgcgattgcccttgggatccgcctgctggaaagcgccagggtcgtatcggcgcagcgaaccgtcaggtaa

SEQ ID NO: 182750 - DNA, 936 bp, Klebsiella oxytoca
atgaagaagcaagagcgtatagatcgtatcgaactgatgcgtacgttcattcgtatcgtggaggccgggtctctctccgccgccgcggtacagatgaatacgacccaggcgacggtaagtcgacgacttcagtctctggaggggctgcttggcgcaaagctgattctgcgcacgactcacgcgatgaagctgaccgatgacggtgagcgctgttatcagcatgcccgccaggtcgtcgatgcctggctggcgctggaggacgacctgcggatcaccgatgaccggccggtggggattttaagagtgcgggccccgcatgcgtttggtcagcaacagctgctggggccactggtggattttttgcagcgctatccccagctggcggttgaatggatgctgaacgataagacggtcgattttctgagcgatggtatcgactgcgcgattcgcgtgggggccgaggtggatccggctacggtatcggtactgctggccgaggttccccgcagcgtggtggcatccccatcgctgctggcgaacttgccgccgttaagcgcgccgcaggagatgtcgttgctgccgtggatagccatcagcacgttctatcagcatgaggtgaggctgcagtcgcaggtggatgagcagcttattacctttgccatcgcgccgtgtctgagtaccgatagcgtgcatgtggcgcgtaataccgcgctggcggggctgggcgcggcgattgtgtcgagctgggcggtagcggacgatattgccgccgggcggctggtggagctgttcccgcagtggcgagcctcaccgctgccggtacacctggtgtatccctgggcgcgctactatccaacgcggttgcgtaagtttctcgatctgatgcgtgaggtcatgccgcagattgcggggatgcagcgtccggaaggggaataa

SEQ ID NO: 182751 - DNA, 3255 bp, Klebsiella oxytoca
atgaaaagaatgttaatcaacgcaactcagcaggaagagttgcgcgtcgcccttgttgatgggcagcgcctgtacgacctggatatcgaaagccccgggcacgaacagaaaaaagcgaacatctacaaaggcaaaatcactcgtattgaacctagcctcgaagccgcatttgttgattatggtgccgagcgtcatggtttcctccctctcaaagaaattgcccgcgaatacttccctgccaactacaattctcacggtcgtccaaacatcaaggacgtgctgcgtgaaggccaggaagtgattgtccagatcgataaagaagagcgtggcaataaaggcgccgcgctgaccacctttatcagcctggcgggtagctatctggtgctgatgccgaataacccacgcgctggcggtatttcacgccgcatcgagggtgacgatcgcaccgaactcaaagaagcgctggccagccttgagctgccggacggcatgggacttatcgttcgcaccgctggcgtcggcaaatccgccgaagcgctgcagtgggacttaagcttccgcctgaagcactgggaagccatccagaaagccgcagacagccgtcctgctccgttcctgatccatcaggaaagcaacgtcatcgtgcgcgctttccgcgactatctgcgtcaggatatcggcgaaatccttatcgataacccgaaggtgcttgagctggctcgccagcacattgcagcgctgggtcgtccggatttcagcagcaaaatcaaactgtacaccggggaaatcccgctgttcagccactatcaaatcgaatcgcagattgagtccgctttccagcgtgaagtgcgtctgccttccggcggttctatcgttatcgacagcaccgaagcgcttaccgctatcgatatcaactccgcacgcgccacccgcggcggcgacatcgaagaaacggcgtttaataccaaccttgaagcagccgatgaaatcgctcgtcagctgcgtctgcgcgaccttggcggcctgatcgttatcgacttcatcgatatgaccccggttcgccaccagcgtgcggtagaaaaccgcctgcgcgaagccgtccgtcaggacagagcgcgcatccagatcagccatatttcccgctttggactgctggagatgtcgcgtcagcgcctgagcccgtcgctcggggagtccagccatcacgtctgcccgcgctgtagcggaacgggtaccgtgcgcgataacgaatcgctgtcgctttctattctgcgtttgatcgaagaagaagcgctgaaagagaacaccaaagaagttcacgctatcgtaccggtgccgattgcctcttacctgctgaacgaaaaacgtgccgcggtaagcgcgattgaaacccgtcaggccgatgtgcgcgttattatcgtgccaaacgaccagatggaaacgccgcactactctgttctgcgcgtgcgtaagggcgaagagacctccacgctgagctatctgctgccgaaactgcacgaagaagagatggccatgccttctgatgaagagccggccgagcgtaaactcccggaacaaccggcgctggctgcttttgtcatgcctgacgcgcctccggctccggcccaggaagagccggccagagccgcggctaccgttgcgcctgccgcatccgcaccgaaagcggcagcgccggcgcagcctggcctggttgcccgcttcttcagcgcgctgaaaaatatgttctccagcgaggaagagactaaaccggcagaagttcaggttgagaaaaaagcggaagagaaatccgagcgtcagcaggatcgtcgtaaaccgcgctccaacaaccgccgcgatcgcaatgaccgccgcgacaaccgggataatcgcgatagccgcgagaaccgcgatagtcgtgccgagaacagcgaaggccgcgagtctcgtgaagaaaaccgccgcaaccgtcgtgagaagcagcagcagaacgctgagccgcgcgaaatccgccagacaacggtcgaagatagcgaaaaaggcaaagcgcgcgacgagcagcagccgcgccgcgaacgtaatcgccgtcgtaacgatgataaacgtcaggttcagcaggaagccaaagcgcaaacccgcgaagagccggttgttcaggagagtgagcaggaagagcgcgtgcagacgatgccgcgtcgtaaacctcgccagctggcgcagaaggtgcgtattgaatctgcagccgctgaacaggttgtcgagccggtagccgcgcctcaggtcgccgaagcgccggtcgtccagccggaagccgcagcgccgcgcactgaactggcgaaagtcgacctgccggcggttgttgaaaccactgcggaacatgacgacaacggtgaagcccgcgaatccaacggtatgccgcgtcgttcacgtcgttcccctcgtcacctgcgcgtcagcggccagcgccgtcgtcgctaccgtgatgagcgttacccgacgcaatccccgatgccgctgaccgtagcctgcgcatcgccggaaatggcgtctggtaaagtgtggatccgctacccggtcgttcgccctcaggaccagcagcaggaagacgtgcaggttcaggagttctcaaccactgcggctgagcccgtcgtcgcgccagtggctgccgctgagccggttgtctctgaagtgattgccccggctgtcaccgcagaaagcgtagtcgagccagtggccactaccgagcctgtggcggtgattaacgaacctgaagttccggtcgtagaaaccacgcatccggaggctatcgccgccccggttgatgaacagccgcagctgattgccgaagccgatgaagccgtggccgaagaagttgtcgcagaagccgttgacgtcgttgcgcaagaggctgtcgaaccggaagctgcggtcgctgaacctgttgcggttgaagagactgcggtggttgttgaggaagcgcctgttgtttccgaaccggtggttgaacctgcaccagcggcggagccggtcgttgcgactcaacctgttgtcacggctgcgccggtcgttaaggtcgccaatcgtcacgccacggcgccgatgacccgcgccccagcgccagactacgtacctgaagcgcctcgtcaaagcgagtgggttcgcccgaactttgattttgacggtaaaggttctgctggcggccatagcgccacgcacaaagccgctgccggacctacccgtccgcagcccgtagagtaa

SEQ ID NO: 182752 - DNA, 996 bp, Klebsiella oxytoca
atgagtggcgctaatgcgtcgggctatttagaatcgcgcaccatgaaaactgagatcccaagcgtaaaaatggttgccattgctgatgatgaagccgggcaacgtatcgacaactttttgcgtacgcagctgaagggcgtaccgaagagcatgatttatcgcatcttgcgtaaaggcgaggtgcgggttaacaaaaagcgcgtgaagccggaatataagctggaagccggcgacgaagtgcgcatcccgccggttcgcgtctctgagaaagaagaagaggcggtctctccacacctgcaaaaagtagccgcgctggccgatgtgattttatatgaagacgatcatatcctggtgcttaacaagccttccggaacggcggtacacggcggcagcggattgagctttggcgtaattgaaggtctgcgcgcgctgcgtccggaagcgcgtttcctggagctggtgcatcgcctggatcgcgacacctccggcgtgctgctggtcgccaaaaagcgctccgcgctgcgttccctgcacgagcagctgcgcgacaaaggaatgcagaaggattacctggcgctggtgcgcgggcagtggcagtcgcatactaaagtggtgcaggcgccgctgctgaaaaatattctgcagagcggtgagcgcattgtgcgggttaaccaggaggggaaaccgtcggagacgcgctttaaagttgaagagcgttatacccatgcgacgctggtgcgctgcagtccggtgaccggtcgtacgcatcaaatccgcgtacatacgcaatacgccggccaccctattgcttttgacgaccgctacggcgaccgtgaatttgataagcagctggcgggcaccggccttaaccggctgtttctgcatgcggcggcgctgaagtttacccatccgggtagcggggagattatgcgcattgaagcccccttagataatcagcttaagcgctgcctgcaggtcttgcgtaacgcgaaataa

SEQ ID NO: 182753 - DNA, 1146 bp, Klebsiella oxytoca
atgccaacccgcgctacgcttttgaccctcaccctgctggccgccgccggcgttaatgcccatgactggcagcgccagggcatcgtagagggcaatctccccgcctcctggcagcagttgaaagcgcagatgacctacccggactcgtggctctctggccactaccgtgattttgagcaatggcgacagcaggctcgtacgctgcttcggcagtctctgctaaccccggcgtcgacactccccttcgcgccgcaaacgctgatgagagaaaatcgaggcgcgtataccgccgagaagctggccttcaacgtaaccgacgataacaggattgccgcgctgatgttgacgccaaattcccccggccctcacccggcaattgttctgctgcacgaccatggctcaaagtttgatatcggtaaggagaagctaatccgtccgtggaacgacgctgcacggctggccagcgccgaggcgtgggcggataaatttttcagcggtcggtttatcggcgatgaactggcgcagcgcggctatgtcgtcatcgccattgatagcccgggttggggggaccgagggccgatggtctacgagcagcagcaggccctcgccagcaactactttaacctggggcgctcgctggctggtgaaattgcctatgaagatctgcgtaccgtcgatttcctcagcactttaaaaacggttgatagtcaacgcattggggtcgtgggtttctcaatgggcggttttcgcgcctggcagctggccgccctgtctgacaaagtcgccgcgactgcggttatctcctggtttggaacctggaacggcctgatgcagcctggcaacaacgttttgcgcggccagtcggcgttttatatgcttcaccctggcttatccggacgcctcgatattcccgatatcgccagcattgccgcgccaaaaccgatgcttatttacagcggcggacaagataagctcttcccggcggaagccgttaacgacgccttcgcaaaagtacataaagtgtgggcgtcgcaaaacgcgcaggataagctggaaacaaaaacgtggccggaactgggccacgtttttaatcaacaacagcaggatgaagttttcccctggcttgccaggtggctcaaaccctga

SEQ ID NO: 182754 - DNA, 585 bp, Klebsiella oxytoca
atgtctgaactaatcctcgcgtcaacctcgccgtggcggcgaatgctgctggaaaaactgtcggtgccttttgaatgcgctgcgccgaacgttgatgaaaccccgctgcccggcgaacctgcccgccagctggtgatgcgtctggcgcaggcaaaggcgcaggcccttgccgcacgctacccacagcacctcattataggctccgatcaggtttgtgtcctggacggtgaaattaccggcaaaccgcatacggaagaaaacgcccatcgccagctgagaaaggccagcggcaccatcgtcacgttctataccggcctggcgctgtacaattccgccaacggtcatctacaaacggaatgcgaacctttcgacgttcatttccgccgtttaagcgaccaggaaattgagagctatatccgcaaggaaaacccgctgcagtgcgccggaagctttaaaagcgaaggtttaggcatcacgctattcgaacggcttgaggggcgcgatcccaacgcgctggtcggtttgccgctcattgccctgtgccagatgctgcgccgggaagcgttgaatcccctgctcacgtaa

SEQ ID NO: 182755 - DNA, 522 bp, Klebsiella oxytoca
atgcaaaaggtaaaattacccctgactctcgatccggttcgcacggctcaaaaacgcttagattaccaaggtatctatacccgtgatcaggctgtgcgtgtcgctgattctgttgtcagcgtggacagcgatgtggaatgcagcatgtcgttcgctatcgataaccagcgtcttgccgttttaagcggcgatgcgacggtgtcggtaaccctcgaatgtcagcgttgcgggaaaccgttcccccatcatgttcacacaacgtattgtttcagccccgtcagaaatgacgaacaggccgaagcactgccggaagcgtatgagccgattgaggttaacgaattcggtgaaatcgatctgctggcgctggttgaagatgaaatcatcctcgccttgcccgtagttccggtgcatgattctgaacactgtgaagtgtccgacgcggacatggtctttggtgaactgcctgaagaggcacaaaaaccaaatccatttgccgtattagccagcttaaagcataagtaa

SEQ ID NO: 182756 - DNA, 174 bp, Klebsiella oxytoca
atggccgtacaacagaataaaccaacccgttccaaacgtggcatgcgtcgttcccatgacgcgctgaccgcagtcaccagcctgtctgtagacaaagcttctggtgaaaaacacctgcgtcaccacatcactgccgacggtttctaccgcggtcgcaaggttatcgctaagtaa

SEQ ID NO: 182757 - DNA, 840 bp, Klebsiella oxytoca
atgcgcattgcgcttgagttagtgaaagaagggcgggcggaggcctgcgtcagtgcgggtaataccggagcgctgatggggctggcgaagctgctgcttaagcccattgaggggattgagcgccctgcgctggttactatgttgccgcatcagctgaagggcaaaacggtggtgctggatttaggcgctaacgtggattgcgatagcacaatgctggtgcagtttgccatcatgggggcggttcttgccgaagaagcgatcggtattaaggatccccgcgttgcgcttctgaatatcggcgaagaagagatgaaaggtctcagcagcattcgcgacgcggcggcggttttgaagaccctgccaaccctcaactatattgggtatctggaagccaacgaattgttgacgggcaagacggatgttttggtttgtgatggattcacgggcaacgtcacattaaaaacgatggaaggtgttgtcagaatgttcctttcactgttgaaatcacagggagaggggaaaaaaaggtcgtggtggctgcttttattaaagcgttggttacaaaaaagcctgtcgaggcgattcagtcacctcaaccccgaccagtataatggtgcctgtctgttaggattacgcggttccgtgattaaaagtcatggggctgccaatcagcgcgctttttgcgtcgcgatagagcaggcagtgcaggctgtgcagcggcaggttcctcagcgaattgccgctcgcctggaatctttataccctgcaggtttcgaattgcctgaaggcggcagaagcggaaattccaggcctcaaacccggatgaccggcaacgactga

SEQ ID NO: 182758 - DNA, 954 bp, Klebsiella oxytoca
atgtatacgaagattattggtaccggcagctatctgcctgagcacgtgcgtacgaacgctgaactggaaaatatggtcgatacgtctgacgagtggattgttactcgtaccggtatccgcgagcgtcgtattgccgcaccgaatgaaacagttgctacgatgggccttgaagccgctaagaatgcgctggacatggcgggcgtcaagccggagcaaattggtctgattattgttgcgaccacctccggtacccatgcgtttcctagctcggcttgccagattcaatcaatgttgggtattaaaggctgcccggcgtttgacgtcgctgcggcctgcgcggggttcacctacgcgctcagcgttgccgatcaatacgtgaaaaacggtgcggtggattacgcgctggtgatcggcgctgacgtgctggcgcgcacctgcgatcctgccgatcgcggaaccattattatttttggcgatggcgccggcgccgtggtgctgggcgcttctgaagagccgggcatcatctccacccatctgcacgcggatggcagctacggcgagctgctgacgctgccgaacgccgatcgcgtcgaaccggaaaaccccatctatctgacgatggcgggtaatgaagtctttaaggtggcggtaaccgagctggcgcacatcgtggacgagactttagctgcgaacaacctcgagcgctctgcgcttgactggctggtgccgcatcaggccaacctgcgtattatcagcgccacggcgaagaagctgggcatgtcgatggacaacgtggtcgtcacgctcgacagacacggcaatacgtcggcggcatctgttccctgtgcgctggatgaagccgttcgcgatggccgcattcaacgtggtcagcttattctgctggaagccttcggtggtggtttcacctggggttccgcgctggttcgtttttag

SEQ ID NO: 182759 - DNA, 930 bp, Klebsiella oxytoca
atgacgcaatttgcttttgtgttcccgggacagggctctcagagtgtcgggatgctgtcagatatggcggccgcttacccggtcattgaagagacgttccgtgaagcctctgcggcgttgggttacgatctgtgggcgcttgcacagcagggcccggcggaagagttgaacaaaacctggcagacgcagccggctctgctgaccgcctccgtagcgctgtatcgcgtctggcagcagcagggcggtaaagcgcccgctatgctggcgggccacagcctcggcgaatactctgcgctggtatgcgcaggcgttatcgattttgctgatgccgtccgcctggttgagatgcgcggcaggtttatgcaggaagcggtaccggaaggtaccggcgcgatgtccgcgatcatcgggcttgacgacgctgcgattgccaaagcctgcgaagaatctgctgaagggcaggtggtttctccggtaaactttaactcgccaggacaggtggttattgcgggtaacaaagaggccgtcgagcgcgcgggagccgcctgtaaggctgcgggtgcgaaacgtgccctgccgctgccggtcagcgtaccgtcccactgcgcgctgatgaagccggcggcggaaaaactggcggttgagctgcagaaaatcacctttaacgcgccgacgattgcggtggtaaacaacgtcgacgtgaaaagtgaaacggcgcctgatgctatccgtgatgccctggttcgccagctgtatagtccggttcagtggaccaaaaccgttgagtttatggcatcacagggcgtagagcatctgtatgaagttggtccgggtaaagtcctcaccggtctgactaaacgtattgttgacaccctgaccgcttccgcgcttaacgagccggcggcgatgtctgcggcgcttgagcaataa

SEQ ID NO: 182760 - DNA, 735 bp, Klebsiella oxytoca
atgagttttgaaggaaaaatcgcgctggttaccggtgcaagtcgcgggattggccgcgcaatcgctgaaacgctcgttgcccgtggcgcgaaagttatcggtactgcgaccagcgagagcggcgcgcaggcgatcagcgattatttaggtgctaacggtaaaggtctgctgctgaatgtgaccgatcctgcatctatcgaatctgttctgggaaatattcgcgcagaatttggtgaagttgatatcctggtgaacaatgccgggattactcgtgataacctgttaatgcgcatgaaagatgatgagtggaacgatattatcgaaaccaacctgtcatctgttttccgtctgtcaaaagcggtaatgcgcgctatgatgaaaaagcgtcatggacgtattatcactatcggttctgtggttggtaccatgggaaatgcgggtcaggccaactacgctgcggcgaaagcgggtctgattggcttcagtaaatcactggctcgcgaagttgcgtcccgcggtattactgtaaacgttgttgctccgggctttattgaaacggacatgacgcgtgcgctgaccgatgagcagcgtgcgggtacgctggcggcagttcctgcggggcgcttaggctctccaaatgaaatcgccagcgcggtggcatttttagcctctgacgaagcgagttacatcaccggtgaaactctgcacgtcaacggcggaatgtatatggtctga

SEQ ID NO: 182761 - DNA, 237 bp, Klebsiella oxytoca; identical to SEQ ID NO: 174201

SEQ ID NO: 182762 - DNA, 1242 bp, Klebsiella oxytoca
gtgtctaagcgtcgtgtagttgtgaccggactgggcatgttgtctcctgtcggcaataccgtagagtctacctggaaagctctccttgccggtcagagtggcatcagcctgatcgaccatttcgatactagcgcctatgcaacgaaatttgctggcttagtaaaggattttaactgtgatgacttcatctcgcgcaaagaacagcgcaagatggacgccttcattcaatatggaattgtcgctggcattcaggccatgcaggattctggccttgaagtgacggaagagaatgctacccgcatcggtgccgctattggttccggtattggcgggcttggcctgatcgaagaaaaccacagttcgctggtaaaaggcggaccgcgtaagatcagcccgttctttgttccttccacaatcgttaacatggtggccgggcatctgaccatcatgtttggtctgcgtggaccaagcatttccatcgcaaccgcctgcacgtctggcgtacacaacattggtcacgccgcgcgcgttatcgcctatggcgatgctgacgcaatggtcgccggtggtgcggaaaaagccagtaccccgctgggcgtaggcggctttggtgcagcgcgcgcgctgtccacgcgcaatgacaacccgcaggcggcaagccgtccatgggataaagagcgtgacggtttcgtgctcggcgacggcgccggcatggtcgtgctggaagagtatgagcacgcgaaaaaacgcggcgcgaaaatctatgcggaaatcgtcggctttggtatgagcagcgatgcctaccatatgacttcgccaccggaagatggtgctggagccgcgctggcgatggtgaacgccattcgtgatgctggcattgaagctagccagattggctacgtcaatgcccacggcacctctacgccggcaggcgataaagcagaagcgcaggcggtgaaatctgtcttcggtgacgctgccagccgcgtcatggtcagctcgactaagtcaatgaccggccacctgctgggcgccgcgggcgcagtagagtctatctactccatcctcgcgctgcgcgatcgggcggttccgccaaccatcaacctggataacccggatgacggttgcgatctggacttcgttccgcacgaagcgcgtcaggttagcgatctggagtataccctgtgtaactccttcggcttcggcggcactaacggctcgctaatctttaaaagggtgtga

SEQ ID NO: 182763 - DNA, 810 bp, Klebsiella oxytoca
atgtatttgataaatggcgctgaaagtgaaacgcttgcggtgaacgatcgcagcgttcagttcggcgatggctgctttaccacggcgcgcatcgtcagaggccgggttcagctgctgtcagcccatctggcccgcctgcagaaggcctgtgaacagctctttatcccctacgacgactgggcgctattagcgcaggagatggcgcatctggcacagccccatcaggatggcgtgctgaaggtcatcatcacgcgcggggcgggggggcgcggatacagcgctgccggctgcgtgaatcccgtgagaatcctcagcgtatcgccctggccggagcactatcttcgctggcgcgaggaggggatctccgtgacgttgagccctgtcaggctgggacgcaatccctcgctcgccggcctcaaacaccttaatcggctggagcaggtgctgattcgttctcatcttgagcagacggacgccgatgaagcgctggtccttgacagcgacgggtggcttacggaatgctgtgccgcgaacttattctggcgtaaaggatccgacgtctttaccccgcgcctcgatcaggcgggggtcaacggtattatgcgccagtacattctcgctaagctggcaccatcgccgtttcgcgttgtcgaagccaccatgcgccccgaggcgttacgcgaagccgacgaggtccttgtctgtaacgcattaatgccgctggtgcctgttcgccgctggaacgataaacgttggtccacgcgcgagctttatcattttttagcccccttgtgtgagctgtctgattag

SEQ ID NO: 182764 - DNA, 1023 bp, Klebsiella oxytoca
atgaagaaaatgttacgtttcattctgctgttggtggtggtgctgggcatcgccgcgggcatcggtatgtggaaagttcgccagctggcggacagtaagttactgattaaagaagagaccatctttacccttgaggccggaacggggcgcctggcgcttgggcaacagctgtatagcgataaagtcattaaccgccctcgggtgttccagtggttgctgcgcatcaagcctgagctgtcccactttaaagccgggacctatcgcttcacgcctgatatgacggtacgccagatgctgcagctgctcgccagcggtaaagaggcgcagtttccgctgcgcttcgttgaaggtatgcgggtgagtgactacctgcgtcagctgcgcgatgcgccttacgtcaagcatacgctggcggatgacagctatgaaaccgtggcgaaggcccttgaactggaacatcccgattgggtcgaaggctggttctggccggatacctggatgtataccgccaataccagcgatgtggcgatccttaagcgcgcgcatcagaagatggttgccgcggtcgataaagcctgggaagggcggatggagaatctgccgtatcatgataagaatcagctgctgacgatggcctctatcattgaaaaagagacggcgctgccggaagagcgcgaccgcgtcgcatcggtatttattaatcgtttacgtatcggcatgcgtctgcaaaccgatcccaccgtgatttacgggatgggggagagttataatggcaaattgacgcgtaaagacctggaaacgccgaccgcttacaatacctatgccattaacggtatgccgcccggacccatcgccgcaccgggcgaggcctcgctgaacgccgccgcgcatccggcgaaaacgccgtatctttattttgtcgcggacggtaagggcgggcatacgtttaacaccaacctggccagccataaccgctcggttcaggattatttgaaagtacttaaggaaaaaaatgcgcagtaa

SEQ ID NO: 182765 - DNA, 642 bp, Klebsiella oxytoca
atgcgcagtaactatatcgtcatcgagggcctggagggcgcagggaaaaccaccgcgcgtgaatgtgtggtagagacgctaaaacagctgggcgttagcgatatggtgtttacccgcgaaccgggcggcaccattctggccgagaagctgcgcagcctggtgctggatattcagtccaccggcgatgaagtgattaatgataaagcggaagtgctgatgttttacgcggcgcgcgtacagctggtagagacggtgattaaacccgctctggcgcgcggtcaatgggtcattggcgatcgtcacgatctctctacccaggcctatcagggcggcggtcgcggtatcgaccaaacgatgctggcgaccctgcgtgacgcggtactgggagactttcgtccccatctgacgctttatcttgatgtgactccggaggtgggcctgaagcgcgcccgcgcccgcggcgaacttgaccgaattgagcaggagtcgctggatttctttaatcgaactcgtgcgcgctaccttgaactggcggcccaggatcccaccatccgcaccgttgacgccacccagccgctggaggccgtcgagcgcgacatccgtgcggtggtgaatcggtgggttgcggagcaactcccatga

SEQ ID NO: 182766 - DNA, 1005 bp, Klebsiella oxytoca
atgaaatggtatccgtggttacgcccgccctttgaacagctggttgccagctatcaggcgggacggggccaccatgcgctgatggtccaggcgctgccgggcatggggagcgatgcgctgatttacgcgctttgtcgctttctgatgtgccgccagccggaagggcataaaagctgcggtcattgccacagctgtcagctgatgcaggccggtacccatcctgattattatgcgttgaccccggaaaaggggaagagctcgctcgggatcgatgccgtgcgcgaagtgagcgaaaagctttatgagcacgcccggcttggcggcgcgaaggtggtgtggataggcgatgccgctatgctgacggatgcggcggcaaacgcgctgctgaaaacgctggaggagccgccggagaatacctggttcttcctggcctgtcaggagccagcgcgcctgctggcaacgctgcgcagccgctgtcgtttgtatcaccttgctccgccttcagaacgttacgcgctggcgtggttagagcgggaagtgacgatgtcacaagacgcgctgctcgcggcgctgcggctgagcgccaacgcgccagcggcagcgctggatctgctgcaggatgctcactgggcaccgcgccagcagctttgtcagatcctgggtaatattttaactcacggcgactggctgacgctgttgccgattttgaaccatgaacaggccgcgattcgcctgcactggctggcatcgctgctggtcgatgcgcaaaaaaggcagcaggggattacgcttatcagcaatccggacgcctggccactggtcaatcagctggccgctgcgctgccggcggcgcgcctgcaggcgattgcgcgtgacgtcagcgcctgccgcgaacagcttttgagcgttgtcggcattaatcgcgaactgctgctaaccgagcgccttctgcgctgggaacattacctgcaacccggggcggttcttcccgtatcccacctctga

SEQ ID NO: 182767 - DNA, 795 bp, Klebsiella oxytoca
atgtttttagtcgactcccattgccatctcgatggcctggattatcaaacgctgcataaagatgtggacgatgtactggcaaaggcttccgcgcgcgatgtgaaattttgcctggcggtggcgacgacgctgccgggataccgcggtatgcgcgagctggtggggcagcgtcacgacgtcgttttttcctgcggcgtccatccgttaaaccaggatgaagagtatgacgttgaagagctgcgcaaactcgcagcagaggacggcgtcgtcgcgatgggcgagaccgggctcgattatttctacacgccggaaacaaaagcgcgtcagcaggcgtcgtttcgcgatcatatccgtataggccgggagctgaataagccggttattgttcacacccgcgatgcccgcgccgatacgctggaaattttacgcgaagaaaaagtgacggattgcggtggcgtactacactgtttcactgaggatagggagacagcgggtaagctgctggatatggggttctatatctcgttttccggcattgtgacgttccgtaatgcggagcagcttcgcgatgctgcgcgctatgtacctctcgatcgcctgctggtggagaccgattcgccgtatctggcgccggtaccgcatcgcggcaaagagaaccagccggcaatggtcagggacgtcgccgagtatatggcggtcctcaagggcgtatcgctggagcagctggcacaacagacgactgaaaatttcgcgacgctttttcatattgacccctcccggctgcaacctctctga

SEQ ID NO: 182768 - DNA, 1434 bp, Klebsiella oxytoca
atgtttaagaatgcatttgctaacctgcagaaggtcggtaaatcgctgatgctgccggtatccgtactgcctatcgcaggtatcctgctgggcgtcggttccgcaaacttcagctggctgccagccgtagtttcccacgtcatggcggaagcgggcggttcggtcttcgctaacatgccgctgatttttgctatcggtgtcgcacttggcttcaccaataacgacggcgtatccgctctggcatcggtcgtcgcttacggcatcatggtgaaaaccatggccgtggttgcacctctggttctgcatttacctgctgaagagattgcggctaaacacctggcggataccggcgtcctcggcggtatcatctccggtgccatcgcagcctacatgttcaaccgcttctatcgcattaagctgcctgagtatctgggcttctttgcgggcaagcgttttgtgccaattatctccggcctggcagcgatcttcactggcgtgatcctgtcctttatctggccaccgatcggtaccgcaatccagactttctcccagtgggccgcttaccagaacccggttgtcgcgttcggtatctacggcttcattgagcgctgcctggtgccgtttggtctgcaccacatctggaacgttcctttccagatgcagattggtgaatacaccaacgcagcaggtcaggtcttccacggtgatattccgcgctatatggcaggcgacccgactgcgggcaaactgtccggcggcttcctgttcaaaatgtacggtctgccggccgccgctatcgctatctggcactctgctaaaccagaaaaccgcgcgaaagtgggcggtataatgatctccgcagcgctgacctcgttcctgaccggtattaccgagccgatcgagttctcgttcatgttcgttgcgccgatcctgtacatcatccacgcgattctggcaggtctggccttcccgatctgtatcctgctgggtatgcgtgacggtacgtcgttctctcacggcctgatcgacttcatcgttctgtctggcaacagcagcaagctgtggctgttcccgatcgtcggtatctgctatgcgattgtttactacgtggtgttccgcgtgctgatcaaagcgctggatctgaaaaccccgggtcgtgaagacgccaccgaagacagcaaagctggtgcgaccagcgaaatggctccggctctgattgccgcgttcggcggtaaagagaacattactaacctcgacgcatgtatcactcgtctgcgcgtgagcgtggcggatgtggcgaaagttgatcaggctggcctgaaaaaactgggtgccgcaggcgtggttgttgcaggttcaggcgttcaggctattttcggtaccaaatccgataacctgaaaactgaaatggatgaatacatccgcaacagctaa

SEQ ID NO: 182769 - DNA, 2184 bp, Klebsiella oxytoca
atgtctctctccaccaactttcgggatgggcgtaacgcgccgtccctgcttgctatgggtatcgcgctggcgatctttcccaacctcagtcaggcagccggcacgtccgaagacactcttattgtagaaggttccgcagatagcgcctcggagacacaagagcaggactacagcgtcagaaccacctcagccgggactaaaatggagatggcccagcgcgatatcccgcaatcgatcagtatcattaccgaacagcggatgcaggatcagcagctgcaaacgctgggcgacgtcatggaccataccatggggatcagcagcagccaggcggactcagaccgcaccagctattattcccgcggttttgagatcgacaattatatggtcgatggcattccgacctggtttgaatctcgctggaatctgggcgacgcgctttccgatatggccctcttcgaacgggttgaggtcgtacgcggcgccaacggcttgctgaccggtaccggcaaccctgccgcgtcggtcaatatgatccgcaagcacgcgaccagtcgggagttcaagggaaatgtctctgcggagtacggcagctggaataagcagcgctacgttgctgatatgcaaagcccgctgactgacgatggcagcgtacgggcgcgcattatcgccggttatcaaaataatgactcgtggctggatggctataacagcgaaaaaacgttcttctccggcattcttgatgccgatctcggtacgtcgtccgctttatccgctggctacgagtatcagcgtatcgacgtgaatagcccgacatggggtggcctgcctcgctggaataccgatggcagcaagaaccgctatgatcgcgcccacagcaccgcgcccgactgggcctataacgacaaagagatcaacaaggtcttcgtcacgctgaaacagcgctttgccgatacctggcaggcaacgctgaatgccacccattctgagatcacgttcgacagcaagatgatgtacgtggacgcgtacgtcaacaaagcgaccggaatgctggtgggcccctatagcagttacggcccgggctatgattacgtcggcggtaccggctggaatagcggcaaacgtaaagtcgacgccgttgacctgttcgccgccggcggctacgacctgtttggtcgccagcacaacctgatgatcggcaccagctacagtaaacaaaacaaccgctatttcagttcgtgggcaaacgtctttcccgatgaggttggcagcttctatagcttcaatagcgcgacattcccggaagccagctggggcccgcagagcctggcgcaggacgataccacgcgaatgaagtcgctgtatgcggcgacgcgtttttccctgcttgacccgctgcatctgattcttggcgtccgctataacaactggagcatcgagacgctaacctacacgatggagaaaaaccataccaccccgtacgccgggctggtttacgacatcaacgacagctggtcggcctacaccagctatacctcggtcttccagccgcagaataagcgcgatagttccggaaaatacctgaccccggttaccggaaacaactatgaagtgggcctgaagtcggactggatggacagccggttaacgacgacgctcgccctattccgcattgagcaggataacctcggccaggcgaccggcgggcaaatccccggcagcaacggcgaagcagcctataaaaccgtcgacggtaccgtcagcaaaggggtggagttcgaaatcaacggggcgattaccgataactggcagatgacctttggggcgacgcgttttgtcgctgaagacaatgaaggcaatgcggtgaatcccaacctgccgcgtaccagcgtcaagctgttcacccgctaccgtctgccggtaatgcctgaactgaccgtcggcggcggcgttaactggcagaaccgggtgtataaagataccgcgacgccgtacgggacgttccgtgcggaacaaggcagctacgcgctggtggatgtgttcactcgctaccaggtcactaaaaattttgctgtgcagggtaacgtcaataacctgttcgacaaaacctacgacaccaacgtcgatagttccatcgtctacggcgaaccgcgcaacgtcagcattacggccagctatcagttctga

SEQ ID NO: 182770 - DNA, 357 bp, Klebsiella oxytoca
atggcagaagaaacgattttcagcaaaatcattcgccgggagatcccgtcggatgtggtttatcaggatgagctcgtgaccgcttttcgcgacatctctccgcaggcgccaacccatattctgatcgttcccaatatcctgattcccaccgtcaacgatgtgaccgcagagcacgagcttgccctgggacgcatgatgaccgtcgcggcgaaaatcgcccgcgatgaggggcttgccgacgatggctatcgcctgatcgtcaactgcaatcgccacgggggccaggaggtctaccatgtccatatgcacctgctgggcggccgtccgttaggcccgatgctggctcataaaggttaa

SEQ ID NO: 182771 - DNA, 375 bp, Klebsiella oxytoca
atgcgcgcagcccacttcggcgcacttctggccgtgacgttactggccgggtgcagttcgcatccggaaattccggtcagcgatcagcaaagtctggtgatggaatcaaacgtactggcagcgggtatcagcgctgaagtaccgacggtgaccgcatccgagattcaggcgacggcgaccacccgtttgttcaatgaacgccaggtaccggtgaccgtgcattatcgctttttctggtatgacgccagagggctggaaatgcatccgctggagtccgcgcgcagcataacggtgcctgcgcactcttccgttacgctttatggcagcgccaatattctgggggcgcacaaggcccgactttatctttatctgtaa

SEQ ID NO: 182772 - DNA, 636 bp, Klebsiella oxytoca
atgattaaactatgtcgctatgcattagttaccgcactggcgatattccttgccggatgcgtgggtcaacgtcaggaacccgctcccgttgaggaagcgcagccgaagccgcagcagcccgttcagccgcagccgactgtgccgactattcccgtgatacctacgcagcctggtccgattgaacacggcgagcagccagcgcagccggcgccgcgcgtgcgtcattttgactggaattccgcggtgcagccgatgatagggcagatgctgcaggccagcggcgtaaatgcgggcagcattttgctggtcgacagcgtcaataaccgcaccaacggcacgttgaatgcgggagaggccaccacggcgctgcgcaatgcgctggaaggcaatggaaaattcaccctggtctcgcagcagcagctgggcgtagccaaacagcagcttggcctgtcgccgcaggatagccttggcagccgcagtaaagcgatgggcattgcgcgtaccgttggcgcacagtacgtgctctattccaacgcgaccggcaacgttaattcccctgagctgaaaatgcagctaatgctggtccagaccggcgaaattatctggtcaggcaaaggtgctgttcagcaacaataa

SEQ ID NO: 182773 - DNA, 819 bp, Klebsiella oxytoca
gtgctgttcagcaacaataagctcacgcgcgacgaagtgctgtcgcgctttttcccgcgctatacgcctgtcgccgcgccgccccaaaacgggctgagcggcggcagctgcattctcagcgatggtcggcaaaagcgggtgctgcgccagccgcacgatccgcatgcgccggcctgcgactttcgccgtcaatatcacgttctgtcacgccttcccgattcgttagcgcccgcgccggtgttttattctcccgcctggatggtggtggaatattgctcaggcgatgtggttaacgcattaccggagtgtccggcgctcgcagggttactgtatcatctgcaccagcagccgcgctttggctggcgtatcgcgctgcggccgctgcttgagcggtactggcaacagtgcagccctgcgcggcgcacaccgcagtggctacgttggcacaaacggctgctgcgtcgcggcgagccccggccgctgcgtctcgccccgttacatatggatgtccatgcgggcaacatcgttcacggcgaggcggggctgcggctgattgactgggaatatgcgggcgatggcgatgttgcgctggagctggcggcggtgtggatcgagcccgccgcgcatcgtcggctagccgcagaatacgcgagacgggcgagcatcgatgagcctcagctctggcggcaaattcagcgctggcgtccgtgggtgcagctgctgatggcgggctggtacgagcgacgctggcagcaaaccggcgaccggcagtttattgcgctggcggatgaggtatggcgccagttagacaaaaagtaa

SEQ ID NO: 182774 - DNA, 1029 bp, Klebsiella oxytoca
gtggatgtgggcccggtaatgttggatgtcgaaggttttgaactggatgcggaagagcgtgagattctggcgcatcctttggttggcgggctgatcctgtttacccgcaactatcacgatccggcgcagctgcgtgagctggtccgccagatccgcgaggcctcgcgcaaccatttggtggtggcggtagatcaggaaggcgggcgcgtacagcgtttccgcgagggctttacccgccttcccgcggcgcaatctttcgccgcgctgctcggcatggaggagggcggtaagctggccgcagaggccggctggctgatggccagcgaaatgatcgccatggatattgatatcagctttgcgccggttctggacgttgggcatatcagcgccgctattggcgagcgatcctatcacgacgatcccgacaaagccctggcgatagctcgtcattttattgacggcatgcacgccgcgggaatgaaaaccaccggtaagcactttcccggacacggcgcggtgacggccgattcccataaagagacgccgcgcgatccgcgcgcggaagcggaaattcgcgccagagatatggccatcttccgtacgctgattggcgagcagcggcttgatgcgatcatgcccgctcacgtcatctacagcgacgttgacccgcgtccggccagcggatctgcgcactggctaaaaacggttctgcgcggtgagctgggatttgaaggggtgattttctctgacgatctgtcgatggaaggggcggcgattatgggcagctacgccgagcgcggccaggcatcgctggatgcgggttgcgatatgatccttgtctgcaataatcgtaagggtgcggtcagcgtgctggataacctgtcgccgatcaaagcagaacgtgttacgaaattgtatcataaaggttcctttagccgtcaggcgttaagggattccgcccgctggaagacgatcagcgcgcagcttgagcagcttcacgcgcgctggcaagaggcgaaatccgcgtaa

SEQ ID NO: 182775 - DNA, 543 bp, Klebsiella oxytoca
atgattatctatttacatggttttgactcaaacagccccggtaaccatgagaaggtgcttcagcttcagtttattgaccccgatgttcggttgattagctacagcacgcggcatcccaaacatgatatgcagcacttattaaaagaggtcgataagatgctgcagctgagcgccgacgatcggccgctgatttgcggcgtgggtctcggcggcttctgggcggagcgaattggctttctttgcgatatccgccaggccatttttaacccgaacctgtttcccaatgaaaacatggaagggaaaattgatcggccggaagagtatgcggatattgccaccaaatgcgtgaataatttccgcgaaaaaaaccgcgatcgctgcctggtggtgctatctcgtcaggacgaagcgctgaatagccagcgttcggcggacctgctgcaccattactatgagataatctgggatgaagaacagacccacaagttcaagaatatctccccgcatctccagcgcataaaagccttcaaaaccctcggctaa

SEQ ID NO: 182776 - DNA, 1305 bp, Klebsiella oxytoca
gtgactacgccattgaaaaaaatagtgattgtgggtggtggtgccggtgggctggagctggctacccagttgggtaaaaagctgggccgtaataaaaaggccaaaatcacgctggttgatcgtaaccacagccacctgtggaaaccgctgctgcatgaagtggcgaccggttcacttgatgaaggtgtagacgcgctgagctatcttgctcacgcccgtaaccacgacttccagttccagctgggatcggtggtggatattaaccgtgaaaccaaaacgatcaccctcgccgagctgcataacgagaagggcgagctgctggtgcccgagcgtaagctgccgtacgacacgctggtcatggcgctgggaagtacgtcgaacgacttcaacacgcctggcgtgaaagagaactgcatcttcctcgataatccgcatcaggcgcgtcgtttccatcaggaaatgctggatctgttcctcaagtattcggcgaacctcggggcgaacggcaaggtgaatatcgccatcgtcggcggcggcgcgaccggcgttgagctgtcggccgagctgcacaatgcggtgaaacagctgcacagctacggctacaaaggtctgactaacgaagctctgaacgtgacgctggttgaagctggcgagcgtattctgcccgcgctgccgccgcgcatttccggcgccgcgcacagcgagctgaccaagcttggcgttcgcgtattgaccaaaaccatggtcaccagcgccgatgcaaacggtctgcacacgaaagaaggcgaatttatcaacgctgacctgatggtctgggcggccgggattaaggcgccggactttatgaaagagattggcggactggagactaaccgtattaaccagctggtggtcgaaccgacgctgcaaacgacgcgcgatgcggatatttacgccatcggcgactgcgcgtcctgcgcgcgcccggaaggcggttttgtcccgccgcgcgctcaggctgcgcaccagatggcgacctgcgccctgcacaatattctggcgcagatgaaaggtaagccgctgaaagcttatacctataaagatcacggttcgctggtgtcgctctctaactattccaccgtgggcagcctgatgggcaacctgatgcgcggttcaatgatgatcgaaggtcgcattgcgcgcttcgtctatatctcgctgtatcgcatgcaccagattgcgctgcacggctactttaaaaccggtctgatgatgctggtaggacgtatcaaccgcattattcgtccgcgcctgaagctgcattaa

SEQ ID NO: 182777 - DNA, 540 bp, Klebsiella oxytoca
gtgaataaatcaatgttggcgggtataggaattggcgtggctgccgcgctgggcgtcgcagccgttgccggtcttaacgtgttagatcgcggcccgcagtatgcacaggtagtgtccagtacgccgataaaagagagcgtcaaaaccccgcgccaggagtgccggaacgtcaccgtgacccatcgtcgaccggtgcaggatgaaaaccgcatcgccggatccgtgctgggcgcggtggccggtggggttattggccatcagttcggcggcggacgcggccgcgacgttgccaccgtcgtgggcgcgctgggcggcggctatgccggtaaccagattcagggttcaatgcaggaaggggataccttcaccacgacgcagcagcgctgcaaaacggtgtacgataaatcagaaaaaatgctcggctacgatgtcacttacaaaatcggcgaccagcagggcaaaatccgtatggatcgcgaccctggtacgcaaatcccgctggacagcaatggccaactgattctgactaacaaagcgtaa

SEQ ID NO: 182778 - DNA, 2178 bp, Klebsiella oxytoca
atgaacaagcgtctctgggtgcttaacccactgctgctggcaaccgccctgcccgcctgggccgctgatgacagcatgatcgtcagcgcaaaccgaacgcaccgcaccgtcgctgaaatggcccagaccacctgggttatcgaaggccaggaaattgaacagcaagttcagggcggaaaagaatttaaagacgtgctggcgcagctgatccccggcatcgacgtcagcagccagggacgcaccaactacggcatgaatatgcgcggccgcgcgattgtcgtgctgattgacggcgttcgccttaactcttcccgtaccgatagccgccagctggattctatcgatccgtttaacattgagcatatcgaggtgatctccggcgccacatcgctgtacggcggtggtagtaccggcggccttattaatatcgtcaccaaaaagggccagcaggagcgccaggttgacctggagctggggagcaaaaccggttttgccaacagcaacgatcatgatgaacgcgtggcggcagcggtcagcggcggtaccgaccacgcttccggccgtttatcggtcgcctatcagcgttttggcggctggtatgatggcaataatgatgcgctgatccttgataatacccagaccgggcttcagcattccgaccgcctggatgtgatgggaacgggaaccattgagattgacgagaaccgtcagctgcagctggtaacccagtactataaaagccagggcgacgattacggtctgtacctcgggaaaaatatgtcggcggtgaccggcgacggcaaagcctttaccaccgatggcctgaactccgaccgcgtccccggcaccgaacgtcacctgataagcctgcagtattccgatgccgatttcctcggccagaatctggtcagccaggtctattatcgtgatgaatccctgactttttaccctttccctacgctcagcaaaggccaggtcagcagcttctcctcttcaaagcaggataccgatcagtacggcgcgaagatcaccctgaatagccagccgctggatggctgggatctgacctggggagtggacgccgaccacgaaaccttcaacgccaatcagatgttcttcgatttgggccagtctatgtcttccggcggtctgaataaccaggctatctacaccaccggccgttatcccggctacagcattaccaacctggcgccgttcctgcagtccagctatgacctgaacgacatcttcactatcagcggcggcgtacgttatcagtggacggaaaaccgggtcgatgattttgtcggctatgcccagcagcaggatgtcgccagcggcaaggtcagctcagcggatgccattccgggcggaaaaaccgattacgacaacttcctgtttaacgccgggattgtcgcccatctcaccgatcgtcagcagacctggtttaacttctcccagggcgttgagctgccggatccgggcaaatactacggcatcggtaagtacggcgcggcggtcaacggccatcttccgcttctctcaagcgtgaacgttggcgattcgccgctgcagggaattaaagttaactcgtacgaactgggctggcgctacaccggcgataatctacgcactcagctggcggcttactactcgacctccgataaaacgatcgtcgttaaccgtaccgatatgaccatcgatgtgcagtccgataaacgccgtatttatggcgtagagggcgcggtggactactacttcccgaacagcgactggagcgccggagctaactttaacgtactgaaatcgcaggtgaaaagcgacggtagctggcagaagtgggacgtcactctcgcctcgccgtcaaaagccaccgcgtgggttggctgggcgccggagccgtggtcgctgcgggtgcagagccagcaggtgtttgatatcagcgatgccagcggcaataagctcgacggctacaatacggtagactttatcggcagctacgcgctccctctcggcaagctgaccttcagcattgagaacctgctcaatgaagattatgtcaccctctggggccagcgcgcgccgctgctgtatagcccgacctacggcagcagctctctctacgagtataaaggtcgcggacgcaccttcggcctgaactacgctttgagcttctga

SEQ ID NO: 182779 - DNA, 636 bp, Klebsiella oxytoca
atgacaactgacgttcaaagttgcacgaaaaaaagccgtggccgacctaaagtgttcgacagggaagcggcgctggataaggccatgacactcttctggcagcacggctatgaagcgacctctctcgccgatttagtggaggcgacgggcgcaaaagcgcctacgctttacgcggaatttgtgaataaagaggggttgtttcgcgcggtgctggatcgctacatcgcgcgttttgccgccaggcacgaagcgctcctctttgacgaagagaaaagcgtcgatcgggcattacgcgactacttcaccgccgtcgcgacttgctttaccagcaaagaaacgccggcaggctgctttatgattaatacctccgcagcgctggcggcggcgtccaccgatatcgccaataccgttaagtcccggcacgcaatgcaggaacagacgctaacgcagtttctccagcagcggcagctgcgcggcgagctgccgccagacggtgacgtacgtcagctggcgcagttccttaactgcatattacaaggcatgtcgatcagcgcccgcgaaggcgccgacttcactaaaatcatgcaaatcgccgaaaccacgctgcgtctgtggccccaggttcttcagcgctaa

SEQ ID NO: 182780 - DNA, 258 bp, Klebsiella oxytoca
atgaaaaatgttaaaacactcgctatcgccgctgttcttagctcactctctttcgccagcttcgccgctgtagaagttcagtcaacgccggcgggtcagcataaaatcggtaccgtttccgcctcagccgggaccaacctgggttcgctggaagatcagctggcgcaaaaagcggaagagatgggcgcaacctcttaccgtattacgtccgtaaccggtcctaacacccttcacgggactgcggttatctacaaataa

SEQ ID NO: 182781 - DNA, 960 bp, Klebsiella oxytoca
atgaaaagctttacgcgaatttctctctggctggggatgatggctatcgccgccgcgctggcgctgcccgctcgcgccaatacctggcccctgccgcctccgggcagccgtctggtcgggcaaaaccagtttcatgtcgtcgagaataacggcggctcgctcgaagcgatcgccaaaaagtacaacgtcggttttctggccctgctccaggctaaccccggggtggatccgtatgttccacgagccggtagcgtgctgacgattccgctgcaaaccctgctgcccgacgcgccgcgcgaaggattagtccttaacctggccgaacttcgcctctattactatccgccaggaagaagtgaagtgaccgtttatcctatcggcattggtcagctcggcggcgataccatcacgccgacgatggtcaccaccgtctccgacaaacgcgccaacccgacctggacgccgacggccaatattcgcgcccgctataaagcaatgggcattgacctgcccgccgtcatgcccgctggcccggataaccccatggggcaccacgctattcgcctggcggcgtacggcggcgtgtatctgctgcacggcaccaacgccgacttcggcatcggcatgcgcgtcagctccggctgtattcgcctgcgcgatgacgacatcaaagcgttgtacaacgaaatcacccctggcaccagggtgacgattatcaatacgccaatcaaggtgtccgtggagccgaacggctcccgtctggtggaggtccatcagccgctgtcaaaacatattgatgacgacccgcagacgctgcccattacccttaccgacagcatgcaggcgtttaagcaggcacagttgaccgacaccgaggtaatggaacgcgcgatgatgctgcgttcgggcatgccgattgacgtcacccgccaccatcgcgtaacggagcagtcgctctag

SEQ ID NO: 182782 - DNA, 3564 bp, Klebsiella oxytoca
atgtttgcgatacgggttggcgaatccgggtcgatcgcggataatctcactattgaatatcagcgagttgccctccatatcggcagagcgaatacccaagagatcatgataccgtctatgcctgaacaataccgatactctctgccggttaaagccggcgatcagcgccagattggcgaactgaccggcgcggcctgcgccactctggtggcggaaatggccgagcgccacggcggaccggtggtactgattgcccccgatatgcaaaacgccctgcgtctgaatgatgaaatcaggcagtttaccgatagcatggtggcgggcctggcggattgggaaaccctcccctacgatagcttttccccgcaccaggacattatctcttcccgtctcgccaccctgtaccagctcccgaccatggaacgcggcgtactgattatcccggtcagcaccctgatgcagcgcgtctgtccgcataatttcctccacggccacgcgctggtgatgaaaaaaggccagcgcctgtcgcgggatgcgctgcgctcccagctggatagcgccggctatcgtcacgtcgaccaggtgatggagcacggcgagtacgccacgcgcggcgcattgcttgacctttttcctatgggcagcgagcagccctaccgtctcgatttttttgatgatgagatagacagcctgcgtctgttcgacgtcgacagccagcgtacgctggaggaagtcgccagcattaacctgcttccggcgcacgaattcccgacggatcaggccgctatcgagctattccgcagccagtggcgcgaccgctttgaggtcaaacgcgacgccgagcatatttatcagcaggttagtaaaggcacgctgcccgcgggaatcgaatactggcagccgctgttctttaacgagccgctgccgccgctgttcagctatttcccggcgaaaacgctgatcgttaataccggcgatctggaggccagcgccgaacgcttccagaacgaaacccgcgcccgctttgaaaaccgcggcgtcgacccgatgcgcccgcttttgccgccggaacagctgtggctgcgcagcgatgagctgtttagcgagctcaaaaaatggccgcgcgtccagctcaaaaccgagcgtctggcggaaaaagccgccaacaccaatctcggttatcagaaattacccgagctggcgatccaggcgcagaacaaagcgccgctggataacctgcgccgattcctcgagtccttcagcgggccggtgattttttcggtcgagagcgaggggcgtcgagaggcgcttggcgaaatgctggcgcgtattaagatcgcgccaaagcatatcctgcgtcttgaagaggcgacgggtaatggctgctatctgatgatcggcgccgccgagcatggtttcgtcgatagccagcgtaatctggcgctgatttgcgaaagcgacctgctgggcgagcgcgtcgcgcgccgtcgtcaggactctcgccgaaccatcaatcccgatacgttgattcgtaacctggcggagctgcatatcggccaaccggtggtgcatcttgagcatggagttgggcgctacgccggaatgaccacccttgaagcgggcggcatcaatggcgaatacctgatgctgacctacgccaacgatgccaaactgtacgtgccggtgtcgtcgctgcatctgattagccgctatgcgggcggcgcggaagagaatgcgccgctgcataaactgggcggcgacgtctgggcgcgggcgcggcagaaagccgccgagaaagtgcgcgacgtggccgccgaactgctggatatctacgcccagcgcgcggcgaaagcgggctacgcgtttaaacatgataaagagcaatatcagctgttctgcgacggcttcccgttcgagaccacgcccgatcaggcgcaggctattaacgccgtactgagcgatatgtgtcagccgctggcgatggaccgtctggtgtgcggcgatgtcggcttcggcaaaacggaagtggcgatgcgcgccgcgtttctggcggttgaaaaccataagcaggtggcagtgctggtgccgaccaccctgctcgcccagcagcacttcgataactttcgcgatcgcttcgccaactggccggtgcgcatcgagatgctctcgcgctttcgtagcgccaaagagcaggcgcagatcctcgagcaggtcgcggaagggaaagtcgatattcttatcggcacccataaactgctgcagccggacgttaagctgcgcgatctcggcctgctgattgttgatgaagagcaccgctttggcgtgcgccataaagagcgcatcaaggcgatgcgcgccgacgtcgatatcctgaccctgaccgccacgcctattccgcgtacgctgaatatggcgatgagcggtatgcgcgatctgtcgatcatcgccaccccgcccgcccgccgtctggcggtcaaaaccttcgtccgcgaatatgacgcgctggtggtccgcgaggcgatcctgcgtgaggtactgcgcggcggccaggtttactacctctataatgacgtggaaaacatccagaaagccgccgagaggctggcggagctggtgccggaagcgcgcattaccatcggtcacggccagatgcgcgagcgcgaactcgaacgggtgatgaacgattttcatcaccagcgctttaacgtgctggtgtgcaccaccattatcgaaaccgggatcgacattccaacggcgaacaccattattattgagcgcgccgatcacttcggtctcgcacagctgcaccagctgcgcggtcgcgtcggtcgttcgcaccatcaggcttatgcctggctgctgacgccgcatccgaaggcgatgaccaccgatgcgcaaaaacgccttgaggctattgcatcgctggaagatctcggcgctggtttcgctctggcaacgcatgacctcgaaattcgcggcgcgggtgaactgttgggcgaggatcagagcggttccatggaaaccatcggcttctccctctatatggagctgctggaaaatgccgttgacgcgctgaaagcaggccgcgaaccctcgctggaggatcttaccagtcagcagaccgaagttgagctacggatgccgtcgctgctgccggatgactttatcccggatgtgaatacgcgcctgtcgttctacaaacgcattgccagcgcgaagaacgagaatgagctggaggagatcaaagtcgagcttatcgatcgctttggcctgctgcccgacccggcaagaaacctgctcgatatcgcccgactgcgccagcaggcgcagaagctggggatccgcaagctggagagcaacgaaaagggcggcaccattgagtttaacgagaagaataacgtgaatccgatgtggctgattggcctgttgcaaaagcagcctcagcactatcgcctggatggcccaacgcgcctcaagtttacgcaggaccttgccgagcgtaaaacgcggatggagtgggtgcgccagtttatgcgccagctcgaagagaacgccgccgcctga

SEQ ID NO: 182783 - DNA, 1200 bp, Klebsiella oxytoca
atgtatcaacctgccgcactctttatcggccttcgctatatgcgtgggcgcgcagccgaccgcttcggtcgtttcgtctcctggctttcgaccatcggcattacgcttggcgtgatggcgctggtgaccgttctttcggtgatgaacggctttgaacgcgagctgcaaaacaacatcctggggctgatgccgcaggccattcttagcgccaagcaggggtctgtaaacccgcaacagctgccggaaagcgcggccagattacagggggtcacccgcgtggcgccgctgaccaccggcgatgtggtgctgcaaagcgcccgcagcgtggcggtcggcgtgatgctcggcatcgacccggcgcaaaaagatcccctgacgccctacctggttaacgtcaagcagagcgatctgcaggccggcaagtataacgtcatcctgggtgaacagctggcaggacagctgggcgtcaatcgcggcgatcaaatccgcgtgatggtgccttccgccagccagtttaccccgatggggcggcttcccagccagcgcctgtttaacgtaatcggtacctttgccgccagcagtgaagtcgatggttatcaaatgttgaccaacatcgacgacgcctcgcgcctgatgcgctacccgcagggaaatattaccggctggcggctgtggctgaatcagcctttacaggtggataccctcagccagcagacgctgccggaagggaccaaatggcaggactggcgcgagcgtaaaggcgaactgttccaggccgtgcggatggaaaaaaatatgatgggcctgctgctgagcctgatcgtcgccgtcgccgcctttaacatcattacctctctgggaatgatggtgatggaaaagcagggcgaggtggcgattctccagaccctcggcctgacgccgcggcagatcatgctggtctttatggttcagggggccagcgccgggatcgtcggcgcgctgcttggcgccgggctgggcgcgctgctggccagccagctgaataatttgatgccgattatcggcgcgttcctcgacggcgccgcactgccggtggccattgagccgctgcaggtcattgtgattgccctggtggcaatggtgctggcattactctctacgttgtatccttcatggcgcgctgccgccactcaacccgctgaggctttacgttatgaataa

SEQ ID NO: 182784 - DNA, 702 bp, Klebsiella oxytoca
atgaataagatcctgctgcaatgcgacaacctgtgcaaacgctatcaggaaggcaccgtgcaaaccgacgtgttgcatgatgtcagcttcagcattgaggagggcgagatgatggcgattgtcggtacctccggttccggcaaaagtacgctgctgcatctgcttggcgggctggatacgccgacctccggcgacgttatcttttccggccagccgatgagccagctctccgccgccgcccgcgccgatctgcgcaaccgcgaactgggctttatctatcagtttcaccacctcttaccggattttaccgcgctggaaaacgtggcgatgccgctgctgattggtaagcagaaggcggcggatatcgagcggcaggcgaaagcgatgctgcgcgccgtcgggcttgagcaccgcagcgaccaccgtccgtcggagctctccggcggcgagcgtcagcgcgttgcgattgcccgcgcgctggtgaataaaccgcgcctggtgctggcggacgagcctaccggtaaccttgacgcccgcaacgccgacagcatttttcagctgcttggcgagctgaacgtggcgcagcgtaccgccttcctggtggtgacccacgacctgcagctggcaaaacgcatgagccgccagctggagatgcgcgacgggcgcctgacagccgaactctccctgatgggggctgagtaa

SEQ ID NO: 182785 - DNA, 1245 bp, Klebsiella oxytoca
atggcttctccgttatcgttattgattgccctgcgcttcagccgtggacggcggcgcggtgggatggtgtcgctgatttcggttatttcgacgatcggtatcgcgctgggcgtggcggtgttgatcgttggcctgagcgcgatgaacggcttcgaacgcgagctcaacaaccgcattctggcggtggtcccgcacggtgagattgaaccggtgaaccagccgtggaacaactggaacgaggcgctggcgaaggttgagaaggtcaaaggcatcgttgccgcggcgccatatattaacttcaccgggctggtggagagcggcagcaatatgcgcgccatccaggtgaaaggcgttgacccgcagcaggagagccgtctcagttcgctgcccaactttgtgcagaacaatgcgtgggccagctttaaagccggcgaacagcaggtgatccttggtaaaggcgtcgccgatgccctgcacgttaagcagggggactgggtgtcaattatgatccctaactccgatgccgagcatcagctgctgcagccaaagcgcgtcaggcttcacgttgccggtattttgcagctaagcggacagctcgatcatagttttgccatgattcccatgcaggatgcgcagcagtaccttgatatgggcagcagcgtgacggggatcgccatcaaagtgaccgacgtgtttcatgccaacaccctggtacgcgatgcgggccaggtgaccaatagctacgtttatatcaagagctggataggcacctacggctatatgtaccgggacattcagatgatccgcgccattatgtacctggcgatggtgctggtgattggcgtggcctgctttaacatcgtctcgaccctggtgatggcggtgaaagataaaagcggcgatattgcggtgctgcgcacgcttggcgcaaaagacgggctgatccgcgcgattttcgtatggtatggtttacttgccggttcggtagggagcctgattggggtggcgattggcgttatctgcgcctttaagctgaccgcaatcattaacggtattgagaacctgatcgggcataaattcctctccggcgacatctattttattgacttcctgccgtctgaactgcactggctggacgtcgtttacgtgctggtgacggcactgttgctgagtttgctggccagctggtatcccgcccgccgcgccagccgcattgacccggcgagggtgctgagtggccagtaa

SEQ ID NO: 182786 - DNA, 912 bp, Klebsiella oxytoca
atgtactatggatttgacattggcggcagcaagatagcgctgggcgtatttgataaagcgcggcggctgcagtgggaaaaacgcgtcgccacgccgaaagagagctacgaagcatttttgcaggcggtagaggagctggttgaggaagccgaccagcgcttcggctgccagggttcggtgggcatcggtattccgggcatgccggagacggaagacggcacgctctacgccgccaacgtgcccgccgccagcggcaggcggctgcgggccgatctgagcgaacgtctgggccgcgatgtgcggcttgataacgacgccaactgttttgccctctccgaagcgtgggatgacgagttcacccaatatccgctggtgatggggatgatcctcggcaccggggttggcggggggctggtgctcaacggaaaatcgattaccgggcatcgctatattaccggcgaattcggccatatccgcctgccggtggatgcgctggaggtggtggggcgcgattttccgcttacgcgctgcggctgcggccagctgggctgcattgaaaattacctttccggacgcggcttcgcctggctgtatgaacatttttaccaacacgctttaacctcgcccgagatcgtcgcgctatggcagcagggcgacgcgaaggcgcgcgagcacgtcgagcgctatctcgatttactggcggtatgcctgggcaatattttaacgattgtcgacccggatctgctggtgcttggcggtggattgtctaactttacagcaataaccgaagggctggcgcagcgcctgccgcgacatctgcttcccgttgccagcgtgccgcgcattgagcgcgcgcgccatggcgatgccggaggcatgcgcggtgcggccttccttcatctgactcaataa

SEQ ID NO: 182787 - DNA, 825 bp, Klebsiella oxytoca
atgcagtcgcgccgcttacatcgattaagccgatttcgccgcaataagcgtcggttacgagaccgtctgcgtcagcggattttcttcggcgaagataaggagacccctgaaacgatggaaaaaccaagagtcgtggtgctaaccggcgcgggtatttcggcagagtcgggaattaaaaccttccgcgccgccgatggcctgtgggaagagcatagggtggaagacgtggcgacgccggaaggcttcgcccgcgatccggcgctggtgcaggcgttttacaatgaccgccgccgccagctgcaaggaccggacatcgtgcccaacgcggcgcatcaggcgctggcgcggctggaagaggcgctgggcgatcgttttctgctggtcacccagaatatcgataatctgcacgagcgcgcgggcaatcgccgggtgattcatatgcacggcgagctgctgaaggtgcgctgctcgtggagcggccaggtgctggcgtggaccggcgatgtgacgacggaggacaaatgccactgctgccagttccccgcgccgctgcgcccgcacgtggtgtggttcggcgagatgccgctggatatggatgagatctaccttgcgctggccgagtgcgatatctttatcgccatcggcacttccgggcacgtttatccggcggcaggctttgttcacgaagcgcggctgcagggcgcccatacggtagagctcaacctcgagccaagccaggtgggcagcgaatttgccgaaaaacactatggcctggcaagcgaagtggtgccggagtttataggcaagctactgaaagcgttttaa

SEQ ID NO: 182788 - DNA, 1059 bp, Klebsiella oxytoca
gtgcagacgttacaaacggatgacggcgcaaaagaaaaacgcagaaagaacaccggcaaaatcacgctggcagaagtcgcaaagctggtgggcgtcagtactatgaccgtatcccgcgcattacgtatgcctgaaaaggtcaacccagaactacgcacgcgcatcgaagccgcggtcagcgaactcggctatgtgcccaatttgcaggcccgaagcctggcttcagcagactcaacgctggttatgggcgttgtcccctctttttcatcgcccggttttatcgccgcctcggaaacgctacaaaccgtcctcgcgccgcagggctataccatgatgtttatcgaatctggtcagggcgggcaaagtgaagagaaggcttttcggcagatgctggcctataatccggcggcaatcgttcagttcaacatcgataacgttgacagctgttcgcagatgctgatgaatgccggtataccgatggtagaaatcggcgcgattaaccacgaaacggccggtattagcattggagtagactactccgccgcgctaaaaaaactggtctcatcgctggcacaggcgggctataaaaaccttggtttactctgcacggcgtcaaacaacatcatgttcaggcaggtattaagcggctggaatagtgcaatgctctcaatcaaccactctccgcaccgggtagtgacgccgcatttaccttcagggatcaccaccggtttcaatctgctgaatgatattcgcatcacctggccagagctggatgcgctgatctgtacctcggacgagctggcctgcggctgtattatggcctgtcataacgcgggaattaaggttccggataccctggcgttggccagccttagcggcggtacgcttgccgcggtctgctcgccggcgttaactgcggtagagtttccatggagcgaggcgggaaccgttgctggtaaaacgctgctggatttactggctggaaatacgctggagagcgccattgagctcccctccagcctgaaggtccgcgccagcagcagaaagccgctgcgctaa

SEQ ID NO: 182789 - DNA, 441 bp, Klebsiella oxytoca
atgatttccacctggttaatagaaaagaagattcaaatcgttgatagcgtcagcgactggaaacaggcgattactatttctgcgcagccgttgctagtcgatgaatcaattaatgaaaactatgttgaagctatttttcgtagccatgaagaattaggtccgtattatgttttagcccccggtctggcaatgcctcacgcacgcccggagcagggagctaaaaaaaatgggttatccttattgcacataaaggaaggcgtttcttttgatgctgatgaaaatgatcccatctttgtcgtgattatgctatgcgcggtttctggcgatgaacatatccgaatgattaccgcgctggcggaaattttctgcgaagaagcgcgtcttgatggcctgcttaaggcatcgacgaaagaaaaaataaacaatattatcaatggttaa

SEQ ID NO: 182790 - DNA, 267 bp, Klebsiella oxytoca
atgaaaaagattttgattgtatgcggtaatggcttaggcagcagcttcattgttgaaatgaacgtcaaaaaaatcattactgagttaggtaaagaggcggaagtctcgcataccgatctcacttcggcaaaaagcgaatctgcagatattattttaagcgctaaagatatcgctgagcacctgaccgggcacagcgctcaggtttttggtttaaataacctgctggataataataaaattaaagaaattcttgtggctaacctttaa

SEQ ID NO: 182791 - DNA, 1263 bp, Klebsiella oxytoca
atgctgcagtttattattcatgatgtgcttggcacaccagcaatactggtcggtcttttttctttaattggtttgctattacagaaaaaggctatctctgatgttatttccgggaccctgaaaacgattatgggtttcgtcatattaacatcaggggcggcgattattgccacgacgttaacaacatttagccagctgtttgaacattcattccatattcagggcgtggtgcccaacaccgatgcgatggccgcgctggcgcaaaaaaactacggtacggcgacagcgatgatcatggtgctggggatgctgtttaacatcgttctggcgcgcattactccgctgaaatatatctttttgaccggtcaccatacgctgtatatgtcggcaatgctggcagtgatcctgtccgttggcggcctgacgcctttctgggttgttgctctcggcgcggcgatcctcggcgcgatgatggtggtttccccggcaatcctgcagccctttacccgtaaaattaccggcactgacgatctggctctgggacactttggttccaccggctatctgctgtcggcgctggtcggtaaagcgataggtaaaggcagcccgtcgattgaagaattgaaggtaccgaaatcgctgaactttctgcgtgattcatcggtggccatctcgctgactatgatgattctgttcctgattctggtagtggtggcggggaaaacctttgttgaaaccagcattagcggcggtcagaacttcattatcttcgccattattcagtcgctaacctttgccgcaggggtatggatcattcttgccggcgtacgcatggtgattgccgaaatcgtcccggcctttaaaggtattgccgataagctggtcaaagacgctaaaccggcgcttgattgcccaacggtattcccgttcgcgccgaatgcggtcatcgtcggcttcttgtcgagttttgccgctggtctggtaagcatgttcctgtgtccactgtttggcctcagcgtgattgttcccggcctggttccgcacttcttctgcggcgcaaccgcgggcgtatacggcaatatctgcggcggccgccgtggcgccattgttggcgcgtttgcacaaggcttactgatttctttcttgcccgccattctgctgccgctgatgggcgacctgggctttgcatccaccactttcggtgatgcggactttggcgtggttggcatcgtgctcggacacgttgtggcctggtttaattaa

SEQ ID NO: 182792 - DNA, 198 bp, Klebsiella oxytoca
atgttcgcaagatgtgaacttgctaacgctattcgtacgctgagcatgaacgcagtacagcaagccaaaaccgttcacccgggtgccccgatgggtatggctgacattgccgaagtcctgtggcgtgctttcctgaatcgtaattcgcagaacctgtcctggagcgaccgcgattgttggcatgaccagcttcggtga

SEQ ID NO: 182793 - DNA, 282 bp, Klebsiella oxytoca
atggccactgaatatgttgactacctgatcctcggcgacgagcatcacggcgaaatccacagggatattaaaagccactctctccgggtccgttcgaaatacgcagccggttccgtccggggagacgcctctgccgagcagccaaaaatggtgaactacaacgtccatgaatatccggctcaggatgggcgattttatctggtggcgaccaactatccgctggccgattttgacgttgaagacgcgctggttaaatcaagaattcatccgttgagaagctag

SEQ ID NO: 182794 - DNA, 1047 bp, Klebsiella oxytoca
atgaaaaaatggtcacgccacctgctcgctgcgggcgctctggcagtcggtatgagcgccgcgcacgcggacgatagcaaaacgctctatttctacaactggaccgagtatgtcccgccggggctgctggaacagttcaccaaagagaccggtatcaaggtgatctattcgacctacgagtcgaacgaaaccatgtacgccaagctcaaaacctataaagacggcgcctacgacctggtcgtgccttctacctacttcgtcgacaaaatgcgtaaagagggcatgctgcagaagatcgacaaaagcaaactgagcaacttcagcaatcttgaccctgaaatgctcaacaagccgttcgaccccaacaacgactactccattccgtacatctggggcgcgacggccattggggtgaatagcgaagagatcgatccgaagaccgtcaccagctgggcggatctgtggaaacccgagtataagagcagcctgctgctgaccgacgacgcgcgcgaagtgttccaggtcgcgctgcgtaaactgggctactccggtaataccaccgatccgaaagagattgaagcggcctataacgagctgaaaaaactgatgccgaacgtcgcggcgttcaactccgataacccggcgaacccgtatatggaaggcgaggtcaacctcggcatggtgtggaatggctccgcgtgggttgcgcgtcaggccggtacgccgctggaagtcgtatggccgaaagaaggcggcatcttctggatggatagcctgtcgattccggcaaacgccaaaaacgtcgatggcgcgctgaagctgatcaacttcctgctgcgcccggaagtggctaaacaggtcgcggaaaccatcggctacccgacgccaaaccttgccgcgcggaagatgctaagcccggaagtcgccaacgataaatcgctctacccggacgccgcaacgattcagaaaggcgaatggcagaacgatgtcggcagcgccagtacgctttatgaagagtattatcagaagctgaaagcgggtcgttaa

SEQ ID NO: 182795 - DNA, 786 bp, Klebsiella oxytoca
atgatcggtcgactgctgcgcggcggctttatgaccgctatttacgcgtatctctatattcccattattattctgatcgttaactcgtttaacagttcacgctttggcattaactggcagggttttaccaccaactggtatagcctgctgatgaacaacgacagcctgctgcaggcggcgcagcactcgctgaccatggcggtgctctcggcgaccttcgctacgcttatcggctcgctgaccgccgtggcgctgtaccgctatcgctttcgcggcaagccgttcgtcagcgggatgctgtttgtggtgatgatgtcgccggatatcgtgatggcgatttcgctgctggtgctgtttatgctgatcggtattcagctgggattctggtcgctgctgttttcccacatcaccttttgcctgcccttcgtggtggtcacggtattttcgcgcctgaaaggttttgacgtgcggatgctggaagcagcgaaagatctcggcgccagcgaactgaccattctgcgaaagatcattttgccgctggcgctgcccgcggtggccgcagggtggctgctgagctttaccctgtcgatggatgatgtggtggtctcttcattcgtcaccgggccgggttatgagatcctgccgctgaagatctattcgatggttaaagttggggtatcgccggaggttaatgcgctggcgaccattctgttggttctgtcgctggtgatggttattgccagccagataattgcacgtgataaaactcaggggacgttaaaatga

SEQ ID NO: 182796 - DNA, 858 bp, Klebsiella oxytoca
atgaagaacaccagtaaattccagaatgtggcgatcgccaccatcgtgggctggcttgtgctgtttgtctttctgcccaacctgatgatcatcgccaccagctttctgacccgcgacgataccaacttcgtcaagctggtctttacgctggacaactacgcgcgcctgctcgacccgctctactacgacgtgctgctgcattcgttaaatatggcgctgctggcgacgctggcctgcctggcgctcggctaccctttcgcctggttcctggccaggctaccggagaaggtgcgcccgctgatgctgtttctgctgatcgtgccgttctggaccaattcgctgattcgtatctacggcctgaagattttcctcagcaccaagggctaccttaatgaatttttgctgtggctgggtatcatcgatacgccgctgcgcatcatgtacaccccttcggcggtgattatcggcctggtctatattctgctgccgtttatggtgatgccgctctactcgagcatcgagaagctcgaccgcccgctgctggaagcggcaaaagaccttggcgccggtaagctacaaacctttatccgtatcatcattccgctgaccatgccggggattatcgccggctgcctgctggtgatgcttccggccatggggctgttctacgtttccgacctgatgggcggcgcgaagaacctgctgattggtaacgtgattaagagccagttcctcaacatccgcgactggccgtttggcgcggcgaccagcatcacgcttacgctggtgatgggtctgatgctgctgatttactggcgcgcggcgcgtttactgaataaaaaggtggagctggaatga

SEQ ID NO: 182797 - DNA, 1137 bp, Klebsiella oxytoca
atgggacagagtcgaaaattgaatacacaaccgcgttcgcgttctccgctggttcagctggcgggaattcgcaaaagctttgatggtaaaacggttatctccgacctcaatctgaccatcaacaacggtgagtttctcaccctgcttggcccctctggctgcggtaaaacaaccgttcttcgtcttatcgccggactggaaagcgtcgatagcggccaaatccatctcgaagatcacgatatcacccatatcccggcggaaaaccgccatgtgaacaccgtctttcaaagctatgcgctgtttccgcacatgacggtgtttgaaaacgtcgccttcggcctgcgtatgcagaaaaccccgacggcggacatcgctccccgcgtccacgatgccctgcgcatggtgcagcttgaagcgtttgctcaacgtaaaccgcatcagctgtccggcggtcagcagcagcgcgtggcgattgcccgcgcggtggtaaataaaccgcgcctgctgctgcttgatgaatccctctccgcccttgattataaactgcgcaagcagatgcagaacgaactgaaggcgctacagcgtaagctcggcatcaccttcgtcttcgtgacccacgatcaggaagaagcgctgaccatgtccgaccgtatcgtggtgatgcgcgagggtaaaatcgagcaggacggtacgccgcgcgaaatctacgaagaaccgaaaaacctgttcgtcgccagctttatcggcgaaatcaacattttcagcgctacggtcattgaacggattgatgatcggcgggtgcgcgccagcgtcgaaggccgcgagtgcaatatctacgtcaacttcgccgttgaaaaaggccagcggcttaacgttctgctgcgcccggaagacctgcgcgtggacgagatccacgacagtaatgacgccgatggcctgataggctatatccgcgaacgcaactataaaggcatgacgctggaatcggtggttgaactggaaaacggtaaaatggtgatggtcagcgaattctttaatgaagacgatcctgattttgaccactctctcgaccagaaaatggccattaactgggtagaaagctgggaggttgtgctggccgatgaagaacaccagtaa

SEQ ID NO: 182798 - DNA, 1230 bp, Klebsiella oxytoca
atggataaattgcttgagcgttttttgcagtacgtttctttagacacgcagtcgaaaccgggcgtacgtcaggtaccgagcacggaaggtcagtggaagctgctacgtctgcttcaggcgcagctgcaagaaatgggactggtgaatgtaacgctgagtgagaaagggacgatcatgggcaccctgccagctaacgttgagggtgatattccggccattggctttatttctcatgtcgatacgtcgcctgacttcagcggcaagaacgtgaatccgcagatcgtagaaaactatcgcggcggcgatatcgcgcttggtattggcgatgaggtcctctcgccggtgatgttcccgatactgcaccagctgctcgggcagacgctgatcaccaccgatggtaaaacgctcctcggcgccgatgataaagccggtatcgcagagatcatgaccgcgctggcgacgctaaaggcgaagaatattcctcacggcgatattcgcgtggcctttaccccagatgaagaggtgggcaaaggggcgaagcatttcgatgttgccgcgtttgacgcctgctgggcctataccgtcgacggtggcggcgtgggtgagctggagttcgagaactttaacgccgcgtcggtgacgattaagatcgttggcaacaatgttcatcccggtacggcgaaaggggtgatggtcaacgcgctgtcgctggcggcgcgcattcatgccgaagtcccagcggacgaagcgccggaaaccaccgaaggctatgagggcttctaccatctggccagcatcaaaggcacggtcgatcgggccgatatgcactacatcatccgcgattttgaccgcaagcagtttgaggcccgcaagcgcaaaatgatggagatcgccaaaaaggtcggcaaggggctgcatccggattgctatattgagctggtcatcgaagacagctattacaatatgcatgaaaaagtgatggcgcacccgcacgtggtggagattgcccgtcaggcgatggtggattgccagatcgatccacagatgaagccgattcgcggcggtaccgacggcgcgcagctctcctttatgggtctgccgtgtccgaatctgtttaccggcggctataactaccacggcaagcatgagtttgtgacgcttgaaggcatggagaaggcggtgcaggtgattgtacgtattgcggagctgacggcgaaacgaggcgcatga

SEQ ID NO: 182799 - DNA, 1122 bp, Klebsiella oxytoca
atggattatcaattaacgcttaactggcccgactttatcgaacgctactggcaaaaacgcccggtggtgctgaaacggggctttgctaatttcgtcgatccgttaagcccggacgaactggccggactggcaatggagagcgaagtcgacagtcgcctggtcagtcatcaggacggtaaatggcaggtcagccacggcccctttgagagctacgatcacctgagcgagaataactggtcgctgctggtacaggcagtcaataactggcatcagccaacggcggcgctcatgcatccgttccgcgccctgcccgactggcgcatcgacgatctgatgatctcgttttccgtccccggcggcggcgtcggtccgcatctcgaccagtacgatgtgtttatcattcagggtaccggccgccgccgctggcgcgtgggtgaaaaagtgccgatgaaacagcactgcccgcacccggacctgctgcaggtcgacccgtttgaagccatcattgatgaagagatggagccgggcgatattctgtatattccgccggggttcccgcacgaaggctactcgctggaaaactcgctcaactattcagttggctatcgcgcgcctaacgcgcgtgagctgttcagcggctttgctgattatattttgcagcgtgaactgggcagccagcgttacgccgacccggacgtaccgtctcgcgagcaccctgcggatattctgcccgcggagctggatcgcctgcgcgatatgatgctggggctgattaatcagccggagcactttaagcagtggttcggcgaatttatcacccagtcccggcacgagctggacgtggcgccgccggagccaccgtatcagccggatgaaatttacgatgccctgctgcagggagataagctgacgcgtcttgggggcctgcgcgtgctgcggattgatggcgaggtattcgtcaacggcgagaagatcaactctccgcaccgtccggcgctggatgctctggcaacccacctgacgctaaacgctgagcatctcggcgatgcgctggaagatccctccttcctcgccctgctggccgcgctggtcaacagcggctactggttctttgaggactga

SEQ ID NO: 182800 - DNA, 1467 bp, Klebsiella oxytoca
atgaaaggggtgctgcggcatattctgccgctgtcgttacgcgttcgctttctgctggcgacggccgccgtagtgctggtgctgtcactctcctatggcatggtcgcgctggtggggtatagcgtcagtttcgataaaaccaccttccgcctgctgcgcggcgagagcaatctgttctatatgctggcgaaatgggaaaacaacaccatcgatgttgatatccccgaaaacctgaatatgcaaagccccacggtgacgctcatttacgacgcccgcggccagctgctgtgggcacagcgcgacgtaccctggctggtaaaacgtattcaaccggactggctcaaaaacaacggctttcacgaaattgaggccgacgttgacagcagcagtatgctgcagcacaacaaccatgagattcaacaacagctggacgccattcggcaagaggacgatggctccgaaatgacccactcggtggcgatcaatatctatccggccaccagcaccatgccgcagctcagtatcgtggttgtcgacaccattccggtagagcttaagcgctcctacatggtgtggagctggtttatctatgtcctcgcggctaacctgctgctggtgatcccgctactgtgggtcgcggcatggtggagcttgcgccctatcgaatcgctggccaaagaggtgcgcgaactggaggagcatcaccgcgagatgctcaatccgaataccacccgcgagctgacgcggctggtcagcaatctcaaccgcctgctgaaaagcgaacgcgaacgctatgataaataccgcacgacgctgaccgacctcacccacagtctgaaaaccccgcttgcggtgatgcagagcacgctgcgttccatgcgcggtgagaaaatgagcgtcaatgaagcagagccggtgatgctggagcagattagccgcatctcgcagcagattggctactatctgcaccgcgccagcatgcgcagcggcggttcgctgctcagtcgcgagctgcatcccatcgctccgctcctcgacagcctgacctcggcgctgaataaggtctatcaacgtaaaggcgtgaacattaccctggatatctcgccggaaatcagttttgtcggtgaaaagaatgattttatggaggttatgggcaatgtgctcgataacgcctgtaaatactgccttgagtttgtggaagtctccgtccggcagaccaacgacaaccatctgcatattctggttgaagatgatggcccggggatccctgccgcgatgcgcagcgcggtgttcgaccgcggccagcgcgcagatacgctgcgccccggacagggcgtcggtctctcggttgcccgcgatatcgtagcccagtacgatggccgcatcctcgccgaagagagcctgctcggcggcgcctgcatggaagttatttttggtcgtcaggccctggaagataaagagagctaa

SEQ ID NO: 182801 - DNA, 675 bp, Klebsiella oxytoca
atgcgcgtactcgtggttgaggataacgctctgctgcgccaccacctgaaagttcagctgcaggagctgggacatcaggtcgatgcggcggaagacgcaaaggaagcggattactatctgggtgagcacgttccggacatcgccatcgtcgatcttggcctgccggatgaagacggcctttcgctgattcgtcgctggcgcagccacgacgtgtcggtgccggtgctggtgctgaccgcccgcgaaggctggcaggataaggttgaggtcctgagcgccggagcggatgattacgtcactaagccgttccatatcgaagaggttgccgcccgcatgcaggcgcttctgcggcgtaatagcggcctggcatcacaggttatctccattccgcctttccaggtggatctgtcgcgtcgcgagctgtcggtcaacgaccagcccatcaagctgacggcatttgaatacaccattatggaaaccctgatccgcaatcggggcaaagtggtcagcaaagattcgctgatgctgcagctctatcccgacgccgagctgcgcgaaagccataccatcgatgtgctgatgggacgattgcgcaaaaaaatacaggctgagtatccgcaggatgtgattaccaccgtgcgcggtcagggctatctgttcgaactgcgcggatga

SEQ ID NO: 182802 - DNA, 447 bp, Klebsiella oxytoca
atgccagcgcgtgaaaaaatgaaaaacgaaacctgccccgtcgcccgaagcgtggatattatcggcgatcgctggtccttgttgattgtacgcgacgcctttgatggcatacgccgcttcagcgattttcagcgaagcctcggtatggcacgtaatattctctctgaccgtctgcacaaattggtaaactcaggtattctcactatgcaatccgcctcggatggcacggcttatcaggaatacgtactgacggcaaaaggagagcgtttgttccccgttgtcgttgcgctacgccagtggggagagctgcatctgtttgcccatggggaaccccattccgtactgatcgataaacgtacgctgcgcccgataccgatgatgtcgcccgcggccgaagatggactcgtcctcaccgcccaagagaccgaggtacaaaaaatcgaataa

SEQ ID NO: 182803 - DNA, 1230 bp, Klebsiella oxytoca
atgaaagcgacactgatatctccaacgctaagcgatccgcaaacggttatgcctcgcagcctggtctggctgtttgctatcgccagcggcctgagcgtggcaaacgtgtattacgcgcaaccgctgctcgacgcgctagcgcgagattttgcgatcggcgacgccgcgattggcggggtgattgcggcgacccagattggctgtgcaatggcgttgctactgctggtgccgctgggcgacagggtgaatcgccgccgcctgatggcgacgcaggtgattttactgatcgctgccctggcagcggtgagtatggcttccaccgccgtgatgctattgggctgtatgcttgccgttggcctgctgggtaccgcgatgacccaggggctaatcgcgtatgccgccagcgccgccgcgccccatgaacaggggcgcgtggtgggcgctgcgcaaagcggagtatttatcgggctgctgctggcgcgggtcttctccgggtcgattagcgatctcttcggctggcgcggggtgtacatcttggccgctttactgatgctgggtattgcgcttccgctgtggcgtcggctgccggtattggcggctgcgccgaaccccctgagctatccgcggctgttgatatccatgctggctctgctgcgccaggaaaaagtgcttcaggtgcgcggcgtgctggcattactgatgtttgccgctttcaatatcttctggagtgcgctggttttgccattaagcgctccgccctttcgcttttcccatactgagattggcgccctgggcctggtcggggtcatcggcgctctggcagcggggcgtgccggtaaatgggccgatcgcggatatgggcagcgcaccagcgccgcggctctggtgatgttgctgatagcctggtggccgctgtcgctgatggcatggtcgcccgcggcgctgttggtcggcattgtactgctggatctcggcggtcaggcgctgcatgtcaccaatcaaagcatgattttccgtacccgtcccgaagcgcacagcaggctggtcggtttgtatatgctgttttatgcgcttggcagcggtttgggcgcggtgagtacgacagcggtatatgcgcgcgcgggatggcagggcgtttgcctgctgggggcttcggtcagtctgctggcgctgctgttctggttgatgacccgtggcgtgatgtcgagccatgacggtggagaaggttag

SEQ ID NO: 182804 - DNA, 807 bp, Klebsiella oxytoca; identical to SEQ ID NO: 182657

SEQ ID NO: 182805 - DNA, 363 bp, Klebsiella oxytoca; identical to SEQ ID NO: 182658

SEQ ID NO: 182806 - DNA, 1371 bp, Klebsiella oxytoca
atggaattatcctcactgaccgccgtttccccagtcgacggccgctacggcgacaaagtcagcgcgctgcgcggtatcttcagcgaattcggtttgctgaaattccgcgttcaggtagaagtgcgttggttgcaaaaactggccgcgcacgcagcgatcaaggaagttcctgcttttgctgccgacgcaaacggttaccttgataaaatcgtcgccgatttcagcgtagaagatgcagagcgcatcaaaacgatcgagcgcaccaccaaccacgacgtcaaagcggttgagtatttcctcaaggaaaaagtcgccgacgtggcagaactgcacgcggtctccgagtttatccacttcgcctgcacctccgaggacatcaacaatctgtcccacgcgctgatgctgaaaaccgcccgcgacgaagtgatcctgccatactggcgcaagctgatcgacgcggttaaggacctggcggtacagtatcgcgatatcccgctgctttcccgcacccacggccagccggccacgccgtccaccatgggtaaagagatggcgaacgtcgcttaccgtatggagcgccagtatcgtcagctgaatcagattgaaattcttggcaaaatcaacggcgcggtggggaactataacgcccacatcgccgcctacccggaagttgactggcaccagttcagcgaagagttcgtcacctcgctgggtatccagtggaacccgtacaccacccagattgaaccgcacgactatatcgccgagctgtttgactgcgtcgcccgcttcaacaccatcctgattgatttcgatcgtgacgtgtggggctatatcgcgctcaaccatttcaaacagaagaccattgccggcgaaatcggctcttccaccatgccgcataaagtgaacccgatcgacttcgagaattccgaaggcaacctcggtctggccaatgcggtgatgcagcatctggcaagcaaactgccggtttcccgctggcagcgcgacctgaccgactccaccgtcctgcgtaacctcggcgtgggcattggctacgcgctgatcgcgtatcaatccaccctgaaaggcgtgagcaagctggagctgaatcaggaccgcctgctggatgaactggaccacaactgggaagttctggccgagccgattcagaccgtcatgcgtcgctacggcatcgagaagccgtacgagaagctgaaagagctgacccgcggcaagcgcgttgatgccgaaggcatgcagcagttcatcgacagcctggcgctgccggaagcggaaaaagttcgcctgaaggccatgaccccggctaactatatcggccgtgcgaccaccatggttgacgaactgaagtaa

SEQ ID NO: 182807 - DNA, 642 bp, Klebsiella oxytoca
gtggcgaagaattattatgacattacgctggcgctggccggcgtttgccaggccgcgcgtctggttcaggaactggcgcaccaggggcactgcgatagcgacgccctgcatgtgtcgctgaacagcatcatcgacctcgacccggattcaacgctggcggtgttcggtggtagtgaagccaatcttcgtctcgggctggaaactctcattggcgtgctgaataccagcagtcgccagggactgaacgccgaactcacccgctatactctaagcctgatggtgctcgagcgtaagcttgccgccagcaaaggggccatggataccctcggcaaccgtatcggtggcctgcgtcgtcagcttgaacatttcgatctgcaatccgagaccctgctcagcgcaatggccggcatctatgttgatgtcattagcccgctgggcccgcggattcaggtgaccggctctccagccgtgctgcaaagccctcaggttcaggcgaaggttcgttctgccctgctggcaggtattcgctccgcggtgctctggcaccaggtcggcggcggacgtctgcagctgatgttttcccgtaatcgtctggttaaccaggcaaaacaaattcttgctcatttaaccccggagttgtga

SEQ ID NO: 182808 - DNA, 1107 bp, Klebsiella oxytoca
atgtcagaaagccagaaaaaagtgatcgtcggcatgtccggcggggttgattcctcagtttccgcttacctgctgctccagcaagggtataaggtggaaggcctgttcatgaagaactgggaagaggacgacggcgaggaatactgcaccgcagcggcggatcttgccgacgcgcaggccgtttgcgataagctgggaattgaacttcacaccgtcaactttgccgcagaatactgggacaacgtattcgaattgttccttgaagaatataaagccggccgcacgccgaacccggatattctgtgcaataaagaaattaaatttaaagccttcctcgaatttgccgcagaagacctcggcgctgactacatcgccaccgggcactacgtgcgccgcgccgacgttaacggcaagagccagctgctgcgcggcctcgacggtaacaaagaccagagctacttcctttatactctcagccacgaacagatcgcgcaaagcctgttcccggtaggagagctggaaaagccgcaggtgcgtaaaatcgccgaagagctggatctcatcaccgcgaagaaaaaagactcgaccggtatctgttttatcggcgaacgtaaattccgtgaattccttggccgctacctgcccgcccagccgggtaaaattatcagcgttgacggcgacgaagttggcgagcaccagggcctgatgtaccacacgctgggtcagcgtaaaggcctgggcatcggcggcatcaaagacggcggcgaagacccgtggtacgtggtcgacaaagacgtcgaaaacaatattctgattgtcgcccagggccacgaccatccgcgtctgatgtccgtggggttgattgctcaacagctgcactgggtagaccgcgagccgctgaccggcacgctgcgctgcacggtgaaaacccgctaccgccagaccgatatcccctgcagcgtaaaagcgctggatgacgaccgcattgaagtgatctttgatgagccggttgccgccgtcacgcctggccagtctgcggtcttttaccgcgacgaagtctgcctcggcggtgggattatcgaacagcgcttgccgctgcaggcttga

SEQ ID NO: 182809 - DNA, 477 bp, Klebsiella oxytoca
atgtttaagccgcacgtcaccgtcgcctgcgtggttcacgcgaaaggcaaattcctcgttgttgaagaaacgatcaacggaaaagcgctgtggaaccagcctgcaggtcacctcgaagccgacgaaaccctggttcaggccgcagagcgcgagctctgggaagagaccggcattcgcgcgacgccgcagcactttcttcgcctgcatcagtggatagccccggatcgcaccccgtttttgcgcttcctctttactatcgagcttaacgatacgtgcgtcaccgagccccatgatagcgatatcgatcgctgcctgtggctcagtgctgaggaaattcttaacgcaacaaacctgcgttctcaactggttgccgagagcattcgcagctatcagcaggatccgcgctacccgctgtcgctcatcggcgaatttaactggccgtttacagggggtgcctcgacggatgacgcgtgctag

SEQ ID NO: 182810 - DNA, 651 bp, Klebsiella oxytoca
atgcggcaattgattgagtctgaaaataccatgcaaaaaacttcatttagaaaacatcgcgttgagcgattcagcacgcaacaagtcaccagacaacgcaaagaacgccagccaaaaactgtgatcttgttcaataaaccatacgatgtattgccgcaatttaccgatgaagccggacgcagcacgctaaaagattttattccggttgccggcgtctacgctgccggtcggttggatcgcgatagcgaaggcctgctggtactgaccaacgacggcgcgctgcaggcggcgctcactcaaccgggtaagcgcaccggtaaaatttattatgttcaggtggaaggtgaacccacggcggacgcgctggccgcgctccgcgacggcgtcacgcttaatgacggccctactctgcccgccggcgtggagcgggttgcggaaccagagtggctgtggccgcggaatccgcccatccgcgagcgcaaatctatccccaccagctggctgaaaatcaccctctatgagggacgcaaccgccaggtacggcggatgaccgcccacgtcggctttccgacgctgcgcctgattcgctatgcgatgggcggctatacgctggatggcctggccaacggcgaatggcgcaaaattgattaa

SEQ ID NO: 182811 - DNA, 1251 bp, Klebsiella oxytoca
atggaaagcaaagtagtagttccggcggaaggtcaaaaaatcaccctgcaaaacggcaagctgaacgtccctaataacccgattatcccgttcatcgaaggtgatggtatcggcgttgacgtgactccggcgatgctgaaagtggttgatgctgccgttgagaaagcctataagggcgagcgtaaaatttcctggatggaagtttacaccggtgaaaaatcgacccaggtttatggccaggatgtctggctgcctgccgaaactcttgatctgattcgtgaatatcgtgttgctatcaaaggccctctgaccaccccagtcggtggcggcatccgttctctgaacgttgctctgcgtcaggaactggacctctacgtttgcctgcgcccggttcgttattatcagggtaccccgagcccggttaagcatcctgaactgaccgatatggttatcttccgcgaaaactctgaagacatctacgccggtatcgagtggaaagccgattctgctgaagcagataaagtgatcaaattcctgcgcgatgaaatgggcgtgaagaaaattcgcttcccggaacattgcggtatcggcatcaagccgtgctctgaagaaggcactaaacgcctggttcgcgccgccatcgaatacgctatcaccaacgatcgcgattctctgactctggtgcacaaaggcaacatcatgaaattcaccgaaggcgcgttcaaagactggggttaccagctggcacgcgaagagttcggcggtgagctgattgacggcggcccgtggctgaagattaaaaacccgaacaccgggaaagagatcgtcgttaaagacgttatcgccgacgccttcctgcagcagatcctgctgcgtccggcggaatacgatgttatcgcctgtatgaacctgaacggtgactatatctctgatgccctggcggcgcaggttggcggtatcggtattgcccctggtgcgaacatcggtgacgagtgcgcgctgtttgaagccacccacggtactgcgccgaaatatgccggccaggacaaagtgaacccaggttccatcatcctgtccgctgagatgatgctgcgccacatgcagtggttcgaagccgcagacctgatcgttaaaggcaccgaaggcgcaattgccgccaagaccgtgacctatgactttgaacgtctgatggaaggcgctaagttgctgaaatgttcagagtttggcgacgcgattatcgcgaatatgtaa

SEQ ID NO: 182812 - DNA, 1770 bp, Klebsiella oxytoca
atgactaactgggcctacgggatcaccgtcgccctgaccctcgcctcaggcatcgccatgctgatggcctcaagtgcggataatgccgaacgccgcgccgtcgaacaacgccaggcgtttgaccagctaagcgaagaagtagaaagcggcgcctgggagctttccgatctcgcgcgactttacatcattcaaaaaaatcaggatgtgctgcaggagtaccggcagcaagcccaggccaccgccgccattgaacatcgtctggaaaagctgaaagacaatggcgcaaccgctgaagagctggcgctgctgcgcgagggtttacagatagccgatgaacttcaggatgagcagcaaacggcgctggcgcaggttgccaggggagaagaaaaagcggcggtcagcctgctttacggcgctgcctatgagcaggagcttgagcgggtccagacgcagctcgatcactttcgcctgatgctcgaaggccgggtgaataaaaccattgccgaggctacggagaagtcacggatctggcgtacgctttctgagatcatggttgggctcaccgcgctgatgttcctgtttgtgctggggtttattcttaagcggcgggtgctctatcccgtcgttcgcctgagcgacgtggtgcagcggctggcatcgcaggattatgcggttgagacgccgcagtttacccagattgatgaaattggcgatatggcccaggccattcgtatctttcgcgagaacgggctggcgcggcagcggctggaacaagagcgcgatgcggactgggcggtccgcgagctgctggcgaggatgacccagcgcttgcagggctgcgaatcgttcgaggatgtgatcaaggttgccgaactgttcgcgccaaatatcgccccggagatcccgggccggctgtatattctcgataccgatccctggcagatgcgctgcgtggcgcagtggctttctccgccgcttgaagccgacgtcttccatccggataactgctgggccgtgcggcgcgggctgagccatccgccggtcaacggtgagccggatatcgcctgttatcacctgtcggaatcgcaggctcaacggtcgctatgcgtgccgctgattgcgcaaggagaagcgattggtctgctctccttcagcaacgtcacctccgcgaccgccccgtcccgcgcctatcttgaactgatggccgaagccctgggtctggcgctggcgaaccagcgtttacgcaacgcgctgctggaaaaggcgctgtttgattcattaaccggcctgcgtaaccgccaccacctggatgacgctctgcatactcaaatgaatctggcggtacgcaacggtacgccgctgagctgcctgatgatcgatatcgatcactttaaggcgattaatgatagttatggtcacgaagcgggcgatctggtcattaaaaacgtcgcggcgattattcaacgtgcggtgcgtgatattgggatggccttccgctatggcggcgaagagttcctggtattgctgggcggaaccgatgaagaggccgcgatggcctgcgcgaccgacatctatcacagcgttcaactgctgacgctacgctatggcctggctgaaattggtcaggtcgatgtgtccatcggcatcgccagctacccgcagcatacgcaaagcgatagcctgctgcgcgcggctgacgctgcgctctaccgggcaaaagagctggggcggtcgagaattgtgagctttgggatgttaaaggcggattga

SEQ ID NO: 182813 - DNA, 1191 bp, Klebsiella oxytoca
atgcataatatcgccttaaaatcagcattgatgcttaccacccgcgtcatacaaattattaaccctgaattacacctgcatatgcaacgaacggcgctgatcgcgctggagcttgcgcaggcgtcagggctctcgcgtcagcagcagcagacgatcttttgcgccgcgctgctacacgacattggcgttctgggcgataaacgagtgttctcctcgctgaacgccatcgataaccttaacgacccgcatcagcaccggggagcagaaatgctggccgggttagcgaccctggcccccatcctgccgattatccgcgatcaccattttagcccacaccacaaaggcagcctcgaacagcatatcgtctatttcgccgacgtgtttgaacgcctgcttgctggcgataagcacgcgacaacctttcaaaccgatatgattattggtaaatttcgcgcgctttaccaggcgatagatccgccgctatgccagactttgtgccagctcgcacaaaaagagcatttttggctgcacctcaatcccggacatattcagcgaatgctggagatcatcggccctatcaaccatgtttatatcgatatcgacggtctgaaagatatctgcctgttaattgccaaaattgtcgatacctacagcagcttcaccgccagccatagtctgaaggtcgggcgaatttcgcgcacccttgccgcttatatgaatctgtcggaaatggagtgtaagaaaattgagattgccggctatttacacgatattggcaaagtgcacattccgctgaaaatcctggagaaacagggcgaactgaatgacgaagagctgcttcaggtgcgggaacatagctatatgaccggcgaaattcttagcaccttcagcgaactcggcgaaataattaactgggccgcgaatcatcatgaaaagctggatggcagcggctatccgcttcatctcaatgagcaatacctgcagctcccggatcggattatcgccatcgcggatattttcaccgcgcttaccgaagaccgcccctatcgccccggaatgagccgtcagcaagcgttacagctgatagagagtgatgttataaatggcgcgctggataaagacgtgtaccgcattttgcatcaccatgccgaagcgctgcacgctattattactcacacgctgcacccgtaa

SEQ ID NO: 182814 - DNA, 1047 bp, Klebsiella oxytoca
atgatgaattttagagcattactggcaattacgttactggcgataagcgctttcgcctcgagtgagacgcgtctgccgcatatcgtaatcctggcgaccggagggacgattgccggttcagcggccagcaatacccagactaccgggtacaaagccggcgcgattggcgtacagacgctgattaatgccgtgcctgagatgagcaaagtcgcgcgcgttgacggcgagcaggtcgctaatatcggcagcgaaaatatgaccagcgacatcattctcaaactgtcaaagcgcgtcaatgaactgctggcacgcgatgatgtggacggcgttgtgattacccatggtaccgacaccctggacgagacgccttatttcctcaacctgacggtaaaaagcaataagccggtcgttttcacggcggcaatgcgtccggccacggccatcagcgcagacggtccgatgaatctgctggaagcggtgaccgtggcggccgacccggaagcgaagggccgcggcgtaatggtagtgcttaatgaccgcatcggcgcggcgcgttttgtcactaagactaacgccacgacgctggataccttcaaggcgccggaagagggctatctgggcgttatcgtgagcggcaaaccgcagttcgaaactcgcgtagataaaattcacaccgtgcgttcggtttttgacgtccgcaatcttaacgcgctaccgaaagtggtcattatttatggctaccaggatgaccctgaatatatgtatgacgcggcgatcgcgcaccatgccgacgggattatctatgcgggcaccggcgcggggtcggtctccgtacgcagcgcggcggggatcgaaaaggcggaaaaagccggtatcgtggtggttcgcgcctcgcgtaccggcagcggcgtggtgccggttgatgacggccagcctgggctggtagccgattcgctcaacccggcaaaagcgcgcatcctgctgatgacggcgctgacgcaaacgaaaaatccgcaggtgatccagcagtacttccacacctactga

SEQ ID NO: 182815 - DNA, 768 bp, Klebsiella oxytoca
atggaactgcgaatagaaaagctaaccgctggctatggcggcaagcgcgttatcaacaatctcgatctgacgctaccgagcgggaaaattaccgcgctgctggggccaaacggctgcggtaaatcaacgctgctgaagtgtttctctcgcctcctgacgcccatcgccggcgatgtctggctcaatgatgtccccttaaaccgcctctccgcccgtcagctggcgcggcgactggcgctgctgccgcagcagcatcacgttccggaaggcgtcaccgtacgcgagctggtcggctacggccggagtccgtggctaccgctgtgggggcggctttccgcgcaggatcgacagcaggtcgacagcgcgctacaacgaaccggcatcgctgcgctggcggaacaaccgctgaccgccctttccggcggccagcggcagcgggcttttctggcgctgctgctggcgcaggatacgccgctggtgctgctcgatgagccaacgacctggctggatattcatcatcaggtggcgctgatgacgctgatgcgcgagctgcagacgatgggcaagaccgtggtcaccgtactgcacgacctgaaccaggccagccgctactgcgaccatctggtggtgcttgaagggggccaggtgcaggctcagggtctggcggaaacggtactgacgccggagatgctacgggagatttttcacctggaggcggagattcacccggagccggtgtcgcagcgcccgatgtgcgtggtgaaataa

SEQ ID NO: 182816 - DNA, 954 bp, Klebsiella oxytoca
gtgaaacaacgcatcgtgtttttatggctcgcgctcacgctgttaaccctgttctcgctgcggatgggggcgatcccgctgccgtggcgagcgctgctcagcggatggtatgcggacagcgagtatcactacgtccttatgcaatatcgcctgccgcgcgtggtgctggcgctgattatcggcgccgcgctggcggtttccggggcgctggttcagggtattgtgcataatccgctggcctcgccggacattctgggtattaaccacggggcgagcctgacctcagtggcggcactgtggtttttaccgtccctgcccctgccgtggctgccgctgctggcctttatcggcggaatggtggcgatggtaataccgctcgcccttgccggtttttctcgaccaatgcgcctggcgctgaccggcatcgcgctgtcggcctgctgggccagcgtgaccgactacctcttactgtcgcggccacaggagatcaataacgcgctgctgtggctgaccggaagcctgtgggccagagacggcgcattcgtcatcatcgtcctgcccctgctggcgattttgctgcccttaagcttcgccctcagtcgcgatctcgacctgctggcgctaggccatgagcgcgcgggaacgctcggcgtcaacgtacgctggcttaacggctacggcttaacgctggcggtggccctcgcgtcgatcggcgtcgcggtctgcggtcctgtctcctttatcagccttgtggtgccgcatcttgtgcgtcgcctcttcggcggccgccatcgccgtttattgccgctctctgcgctcacgggcggactggttctgctgctcgccgatctgctggcgcgaacgctgcatccgccgcttgagctgccggcaggcgtgctgacggcgattatcggcgccccctggtttatctggcttcttgtgagaatgcgttaa

SEQ ID NO: 182817 - DNA, 999 bp, Klebsiella oxytoca
atgaaaccgttccgtcgcgcgttttttatctggggatggccgctgctggccctcagcggcctgttctggctgagcctgttctgctattcgcccatcccgatttcgccgctcaacgcccttcacgccctgctggcgcctgagtctccttcgcttgcggaggcgctggtgcttaatctgcgcctgccccgcagcctggtggcggtaatgctcggcgcctcgctggcgatgtcgggggcgttattacaaacgcttacccataacccgctggcatcgccttcactgctcggcattaatagcggcgcggcgctggcgatggcgctgaccagcgcattcagtccggcaccgctggcgggcttttcgctggcgctgattgccgcctgcggcggcggaataagctggctgctggtgatgagcgccggcggcggctggcgtcagcagcaggatcgccaacggttgatcctcgccggtattgccctctcggcgctatgcatggcgctgaccagaatgaccctgctgctggcggaagatcgcgcctggggcattcttacctggcttgcgggcggcgtttcccacgtacgctgggccgagttctggcagcttttcccttttgtcgcgctgatcacccccggcgtattcctgctggccaacgcgcttaatctgctcaacgtcagcgataccgccgcccattcgctgggggtgaatttgccgcgcctgcgcctgcttatcaacgcggccgtgttgctgcttaccggcgccagcgtcagcgtcgccggaccgattgcctttgttggcctgctggtcccgcatctggcgcgtttttgggcgggtcacgatcatcgtacttttttgccggtcagcgccctgctgggcgccctgtttatgctgctggcggatatgctcgccagagcgttggcctggccgggtgaactgcccgcgggcgcggtgctggcgctggcgggcgggccctgttttgtctggctggtcaggagacgcgggtga

SEQ ID NO: 182818 - DNA, 903 bp, Klebsiella oxytoca
atgtttagccttgttcgtctgtgtattttcagcctgctgtttctggcgggcccgctctttgccgccaccgtacaggatgagcgcggtcgctttacgcttgataaaacgccgcagtgcatcgtcgtacttgaactctcctttgtcgacgcgctggcggcggttgacgttagcccgacaggcgtggccgatgacaacgatccgtcgcgtattctggcggacgtacgcgcacgtctgaagccctggcagtcggtgggcacccgcgcccagccctcactggaggccatcagcgcgctgcatcccgatctgatcgtcgccgatagcagtcgccatgccggaatttacgccgccctgaggcaaattgccccggtgctgctgttgaaatcgcgcaatgaaacctgggaggagaacctgcagtcagcggcgattatcggcaaagtagtgggtaaggataaggagatgcagcagcgtctggcgctgcatcggcaaaaaatggcggcgttttcccgacagctgccggctggcgccagcgtgctgtttggcacctctcgcgaacagcagtttaatcttcactcaacgcaaacttataccggtagcgtgctgacggcgcttggcctgaaggttccgccgccaatcggcggcgcgccgatggcggcgataaatttcgaacagctgctggccctgaatccgcaatggctgctggtcgctcattaccgtactgaaagtatcgtgaaaaaatggcagcaggactccctgtggccaatgctgcaggccgagcagaaagggcaggtcgccgccgtcgacagcaacagctgggcgcggatgcgcgggatcttcgccgccgagcgtattgccagcgatatggttaaaattgtccaccaccgggcggttgatatcacgccatga

SEQ ID NO: 182819 - DNA, 2337 bp, Klebsiella oxytoca
atgacgcctttacgcgttttacgcaaaccgatgcctctggtgatggcaatccgtttaagcctgctgccgctagcggggctggctgccgcgccggtattcgccgccgcgcagtatgatattgccgccggggagttagaccacgccctgaaccaatatgccgcccgcagcggtatcacgctttccgccgacgccagcctgacgcgcggcaagcatagcccgggcctgcacggcagctttgaaaccgaagagggtttacgcaggctgctgaacggcagcggattacggctcaagccgctgggcaagaacgtctggaccctggagctggagcccgcgtccgtcagtgcagaatccaccctcaccgtcgtcggggactggcttggcgacgcgcgcgaaaacgatgtctttgagcacgccggcgcccgcgacgtgatccgacgggaggatttcgccaaaaccggcgccaccacgatgcgcgaagtgctgaaccggatccccggcgtcaacgcgccggaaaataccggcaccggcagtcacgacctggcgatgaacttcggtattcgtggcctcaacccgcggcttgccagccgttccacggtgctgatggacggtatcccggttccctttgccccctacggccagccgcagctttcgctggcgccggtctcgctcggcaatatggacgccatcgatgtcgtgcgcggcggcggcgcggtgcgctacgggccgcagagcgtcggcggcgtggtgaacttcgtcacccgcgccatccccgaggattttggcattcagggcggcattgaagggcagctcagccccacctcttcgcaaaacaacccgaaagagacgcataacctcgcgatcggcggcacggcggacaacggtttcggttccgccctgctttactccggcacccggggcagcgactggcgcgaacacagcgccacgcggattgatgatgtgatgctgaaaagcaaatacgcgcccaacgaagtccatacctttaacagcctgctgcaatactatgacggcgaagccgatatgcccggcggcctctcccgcgccgactacaacgccgaccgctggcagtccacgcgtccttatgaccgcttttgggggcgccgccagctcgccagcctcggctaccagtaccagccggatgcgcagcataaatttaatattcaggggttctatacccataccctgcgcagcggctacctggaacagggtaagcgcattaccctctccccgcgcgaatattgggtccgcggcatcgagccgcgctacagccaaagctttatgatcggcccatccgcccacgaagtcggcatcggctatcgctacgtcaacgaatcgacccacgagatgcgttactacaccgcgaccaccagcggcgagctgcccagcaccgccagtccgtacgatcgcgatacccgttccggcaccgaagcccacgcctggtatatcgacgatcgcgtggatatcggcaactggacgattacgccaggtatgcgctttgagcacattgagtcttatcaggacaataatctgctgggcacccgcgaacgggtcagctataacgccccgctcccggcgctgaatgttctttatcacctcaccgacagctggaatctttatgccaacacagaaggctcattcggcaccgtacagtacagccagattggcaaggctgtgcaaagcggcaatgtggaaccggaaaaagcgcgaacctgggaagtcggcacccgctacgatgacggcgcgctgaccgcagagatggggctgttcctgattaacttcaacaatcagtacgattccaaccagaccaatgacacggtcaccgcccgcggtaaaacccgtcatagcggcctggaagcgcaaacccgttacgccctcggcgagctttcacccgcgcttgataatctctctgtctacgccagctatgcgtacgtcaatgctgaaattcgcgagaaaggcgatacctacggtaaccaggttcccttctcgccgaagcacaaaggcacctttggcgtcgattacaagcccggcagctggacgtttaacttcaacggcgacttccagtcgagccagtttgccgataacgccaataccgttgccgaaagcgccgatggcagcaccggccgcattcccggctatatgctgtggggcgctcgcgtggcctatgactttggcccgcagatggccaatctcaacctcgcgctgggggtgaaaaacatcttcgaccatgcgtattacacccgctcgtacgacgataacaacaaagggctttacgccggtcagccgcgcacgctgtacctgcaaggatcaatgaagttctga

SEQ ID NO: 182820 - DNA, 948 bp, Klebsiella oxytoca
gtgaaaccgacgctaagcgaatcccgtcgtcaggcgctgcgttccgcctcgcactggtacgcggtcctcagcgatgggcgcgtcagtccgcagcaggaggcccgctggcagcagtggtatgagcaaaacaacgaaaatcagtgggcgtggcagcaggtagaaaacctgcgtcagcagatggggcaactgccgggcgggctggccagccgtgctcttcacgatagccgtctggcgcgtcgccacgtgctgaaagggctgatgcttttgctggcggccggaggcagctggcggctctgggagtccgagctggcggagggcctgggcgccgactaccggacggcgaaagggataccgcgcccgcagcggcttgccgacggttcgctgctgacgctgaatagcgaaagtgccgccgacgtccgttttgacgcgcggcagcgcatggttcatttacgctacggcgaaatcgccatcaggaccgctcacgacagccggcagcggccttttcgggtgcaaacgcgggaaggcactctcaccgcgcttgggaccgcattcaccgtccgtcagtttgccggcggcacccggctggcggtacagcagcatgccgtagaagtggttttaccgtccggcagcgcccaacgcgttaacgccggggaaagcctgtggtttacccgcgatcgcttcgccgccctggttaagctcaacggcggcgaggatagctggatccggggcgtgctgaccttccacgacgccccgctgagcgaagtggtcgaaaccctcgcccgctatcgctccggggtgctgcgctgcgatcccgccgtggccgatttacgcctgagcggcacctttccgctgggcgaccctgatgccattctgcaggttatcgcgcaaacgctgccgattacattgcggtctgtcacccgctactgggtcacgctcgttccggcctga

SEQ ID NO: 182821 - DNA, 522 bp, Klebsiella oxytoca
atgtcaccttcttccgccatcgcctctccgctgacgcttgcctcgctctatagcgaccatcatggctggctgaaaaaatggcttacccataagctgcaatccgcttatgacgccgacgacgtagcgcaggacacctttgtccgaattatggccggcgagtcgctgttgacgattcgcgatccaaaatcttttctctgcacgattgctaaacgggtgatgatcgacctgttccgccgcaacgccctggagcgcgcctggctcgacatgctctctcagctaccgccagagctctctccctcaccggagctacggcagagccagctcgaactgttacagcagatcgatgccatgctggacgggcttaacgcaaaagcccgggaagcgtttttgctctcgcagcttgaagggctgacctacgccgatgtcgccagccgcctggcggtttccgtcagttcggttaagaaatatatcgcgaaagctaccgagcactgcctgctgttccgtctggagaacggcctgtga

SEQ ID NO: 182822 - DNA, 789 bp, Klebsiella oxytoca
atgaacgcaagcgaaaaagccggacatacgtttttggcaagcctggggaaaacccgcttacgccccggcggcattgaagccacagagtggctatttcagcaggcgggttttaccgccgacagtaaagttctggaggtagcctgtaatatggggacaacctctattgagctggcgcagcgttttcgctgcagcgtttacgccatcgatatggataaagacgcgctggcgaaagcccggcaaaatatcgttcgcgaaggtgtggatcatcgggtgatagtgatggaggcgaatgccgctcggctgccatttgccgatgcaacgtttgatatggtgataaatgaagcgatgctcaccatgtatgcggataaagccaaagagaaactggtggcggaatattttcgcgttcttaagcccggcggtcgtttgctgacgcacgatatcatgtatacgcaggatgcgctgggagaggacgcccggcggcaactgcagggggtggtgaaatcccacgtcagcccgctgagcgccgccgcctggcagacgcttttccaacggaccggctttgatgccgtaagcattcatcatggaccgatgtcgctgatgtcgccgcgagggttgatgaaagatgaaggttttaaacaggcgctaaaaattgtcggcaatggtttgttgaagcgcgagaatcgtccgagatttttatctatgttgcgtttttttcaacgtcataaaaggcatttgaactttattgcctgctgttctgttaaagcaacggaggtaaaaagtctgaaataa

SEQ ID NO: 182823 - DNA, 915 bp, Klebsiella oxytoca
atgtcttacgcttttaataaaaaacttcttcatccccgtaattgggggacctggtttggcctgggcgtgctctggctcatcgtccagcttccttatcccgtcttgcatcttatcggtaccagcgccggtcgcgcatcccggcgcttcctgaaacgccgtgagcatatcgccagacgcaatctcgaactttgctttcccaccatgtcgcccgcggcgcgcgaaaagcttatcgaacagaacttcatgtcgctagggatgggtctgattgaaacagggatggcatggttctggagcgatgagcgtgttaagaaatggtttgacgtggaaggtatggtcaatctcaataatgctctgagcgaacaaaaaggcgtgatggtcgttggcgtccactttatgtcgcttgaactgggtggccgtacgatggggctgtgtcgtccgatgatggcgacctaccgtccgcataatagcccgttaatggagtgggtgcagacgcgcggtcgtttgcgctcgaacaaggcgatgattgaccgtcgtaatttatccggtctggtacatgccttaaagtcgggtgaagcggtgtggtttgcgccggatcaggactacggcccgaaggggagcgtatttgctccgttcttctcggtacagcaggcagcaacgaccaacggtacctacgtactctctcgtttgtcgggcgcgaaaatgctcaccatcagcatggtgcgtaaagcggaccgcagaggttatagcctgcacatcagcgacgtcatgagcgactatcctggcgaagataaacaggatgcggcaagctatatcaacaaggttattgagaaagagatcctgcgcgcgccggagcaatacctgtgggttcaccgccgctttaaaacccgtccgctgggcgaaacttcgctctattaa

SEQ ID NO: 182824 - DNA, 639 bp, Klebsiella oxytoca
gtgttcgctgagtttggtgtattgaattacctgacctatctggtcggcgctatctttatcatcctggttcccggcccgaataccttttttgtcctcaagaccggcatcgcccacggcgttaaaaaagggtatctggcggcggcaggcgtgtttattggcgatgcggtgctgatgtttctggcttttgccggcgtcgcgacgctcatcaagactacgccggtgctgttcaatatcgtgcgttacctgggggcgatttatctgctgtggatgggcggcaagatgctctacgcggtgttaacccagcgtgatggtcattcgtctgctgattccgagccgggcagcgcgattctcaaacgttcgctgacccttagcctgacgaatccaaaagcgattcttttttatgtctcattcttcgtgcagtttattgacgtcagcgccaaaacgcccgggctggcgttctttattctggcgctgaccctggagataatcagcttcatctatatgagctttttgatcctctccggctctttcgttacgcgttacgtgaagacgaaaaagaagctggcgaaaatcggcaacagcctgataggccttgtgtttgtcggttttgccgcccgtctggcgacgctccagtcgtaa

SEQ ID NO: 182825 - DNA, 264 bp, Klebsiella oxytoca
atgattctgcagaaactcaccagcaataaaaacagcaagaagttctttttgtcgatcgcggcgatctttgccatcgcgcttatcgtggttgggcgcgccacctttggcggcgtggtgagtgaatacaatatgccgtattcagaatggacgacgtcaatgttcttcctgcagggggcgatggtcacggtttacagcattgtgtttacgctgctgttttccatcccgctgggtttcctctttttaggttccgaccgccgggactaa

SEQ ID NO: 182826 - DNA, 1014 bp, Klebsiella oxytoca
atgtccgattttattctcgctcgcgtgtcgcaaacgctcgctaatgaacactccctcgaaaccctggtgcgacagctgcttgagatgctggagctggttacccgaatggaatctacctacctgactcgtatcgacttcgacgcgcagcgccagcatattatgtacgcgcacaacagcagcgaaatgcagatccccgaagggttctccgtcccgtggaacgactcgctgtgcaaacgcgcgctggacgaccgctgcatttttagcaacgatgttgccgagcgctggcgttcgtgtctcgccgcccaggatttggggatcgccacctttttcagcattcccgtgcgcctgaccgacggctcattattcggcacgctgtgcgccaccagccgggcaagacagccctataacattgagggtgagcaggtgatgaatctgtttgccaacctcatctcccattacgttgagaaagagacgctggtacagcagcttcgggcggctaacgtcgcgctggagatgcattcgtataccgacgagcttacgggtttgccgaatcgccgctcgctgtttaagcatcttgccgcacagttttcgcaggcccgggaacagcagcgcagcgtgctgctgatttttatcgatctcgatgatttcaaagcaatcaacgatcgattcggccacccgtgcggcgacagctttttgattcagatcggagaacgcctggccgcacgcgtgcgcagcggcgatattgtaggtcgtctcggcggcgatgagtttttaattgtcggtccgggtcccgattcagccgaccagcaggagtatatcgccgcgttacgtcaagcgctggcggggatctatttccttggcgaacaccggattaactaccccggcgccagttttggggtgattgaagccgacccctggcagatcgacgtagaactggcgctgcgcgccgccgatgaggcgatgtatcaggataagcagtctcgccgtcaggggcgtttttttcatattgactaa

SEQ ID NO: 182827 - DNA, 1014 bp, Klebsiella oxytoca
atgactattaagaaactcgatgatggtcgatatgaagtggacatcaggcctgctggtcgcaatggaaagcgtatccgcaggaagtttgataagaaaagtgaagcggtagctttcgagaagcatacccagttcaaccaccacaccaaagaatggttatcaaaaccgacggataagcggcatctgtctgaactgatacagctttggtggaatttgaaaggcaagcatgaggagcacggtcggataaaccgcaacaagttagatattttttgcaggattaccgacgatccttgtgcttttcagattacaaaagcgctgattagtcagtattacgcggcaagaagaagccagggcattaaagcttccaccattaaccgtgatctcaacagcatcagtggcatgttcacagcgcttatcgaggccgagttgttttcgggtgaacatccgatcagagggcggaagaagttgaaagaagatgtcccagaaactggctatctgacagaggacgaaatcaagcacttgctctttaaactggatggcgacaacaagaagatagctgttctgtgtttaagtactggtgctcgctggggcgaagcggctcgactcaaggcggaacacatcatacagaaccgtgtgacgttcgttaaaaccaagagtaacaagcagcggactgttccagtttcagcggaagtggcaaaactcatagcggatggtaaacgagggttgttatttggtaaggcgtcttattctgacttcaggcagatactcagggaagtaaaacctgatcttccgaccggccaggcgacgcatgcactacgccacagtttcgcgacgcactttatgattaatggaggaagcatcattacattacagaggatcctaggacatgcgcgaattgagcaaactatggcctacgctcactttgcgcccgaatacctccaggacgcaatctcacttaacccgctgagaggtggtgctgatgtgcgaaatgtccacataatgtccacagatgggtaa

SEQ ID NO: 182828 - DNA, 300 bp, Klebsiella oxytoca; identical to SEQ ID NO: 110084

SEQ ID NO: 182829 - DNA, 279 bp, Klebsiella oxytoca
atgagcaaacagcttgtaagtagcacggatgctgtgccttatcaggagttcgccagactcatcgggaaaacccctgctgcggtgaagggcatgattgaaaaagggaagcttcctgtaatcgagatgaccgatccccagtctacttctggccgtgcgggcgagtactgggtttaccttccagcctggaacaacggcatgaaactggcctacgaaagtcgtccaaaggagatcagggaagggtggttgatgtggcttggtctcggtgagccaggtcgatag

SEQ ID NO: 182830 - DNA, 219 bp, Klebsiella oxytoca
atgaagaacggtagccgcggatcagtatcacagctcaatagcaaaaccagcctctactgtggttttactattctgaaactcccacgcaaaaaaccgtacagccgccagcgctatcaaattacgcacacaggccattattacggcatcgactttgctttatcagaagcatgtcgaacgattgacagaatcatgagtaaaaagcacttcattgctttttaa

SEQ ID NO: 182831 - DNA, 378 bp, Klebsiella oxytoca
atgaaactcgaatatgcagaaaaaattaactcgcttttacaatgcttccatttcaataaagagtttctggaatggaatcatgattactctctccagcttttacgccacggcgtatcccacctctatcatttcgcgatgcttcaaggcgagaatgatgaatgcactcttgaagaactccgcaacatcattatttccgtcaccgatggtgatatccctaaaccatacgacctgctatctctggacgctgagcaactgaagaaggctatgaagtttgttcaaccgcaggaggtaaccgtagaggttacaccggagatcctggaacacctgaaactgggagctagagcctcctggcggctggagccccctcgctttaactga

SEQ ID NO: 182832 - DNA, 264 bp, Klebsiella oxytoca
atgttcaccgaagaaaaaacatcttgggaacaggaaatgctgattcgagaagcagtggaaagtgccgagcaggggttcactgtacatctaaaaaatggtgctcgtatcaccattagttcaaaaagcccgtctaaagatttaataatttacgggctcgaaaaagcaattcgcggtaatcacgatcgcgcgcgaatgacctttattgatttcatgtattactggcatgaaaggatattcaagcagattaaaagaaaatcgcgctaa

SEQ ID NO: 182833 - DNA, 225 bp, Klebsiella oxytoca
atgtcggttacgtcaataaagccggaaggcggaataagtgatccagagtttatgggaatcagcaccaatgcgcgcaaaggcgagcgcgcccacttactcggattgctgcgcatccgtatgggcctgctgaaagagcaaggccttacccccgaagagatttattcagcacttgagcagtggatagccaaccacgaaacaatcaccagcgagggcagtagaccatga

SEQ ID NO: 182834 - DNA, 567 bp, Klebsiella oxytoca
atgaatcacgtaatgatcgatttgattaacgttagtaagaaaccgtcatcacctctgtgtgccattgaagctgtgttttttgaaccctcaacagggcagatcggaaaggttttttattcttcgatagacattcgtaaatctgaaagcttgaagggccgtatcagcattagtacggcattcgattggatgaaaaaagactctcactggcgcgccgaagtaatgagcgcaaccgaagctgaagaagatgcactttgcagccttgctgctttcatcgccgacaatacctgtccccggaacgcggcgttattcgtatggttcaaagatgccccggaaaaactggtttcacttcgttatgccgtggatcgcttagaggtgtcaggcattttccctgaaggcacaaaataccgctgcattcgttcacttctcgaccttgctgctgccacagactatgcgcctcatgcgagaagcgccctggctcgttacacgctcactgacgcgcgatatcaagcggagcaagtctgcgaaatctggcagcgcttgacctctccacacattggatcgctatga

SEQ ID NO: 182835 - DNA, 228 bp, Klebsiella oxytoca
atgcattcgcatctgtctgttgtttgtaacgcgccgttgccggtttgtaagagggcgcttgccgccctgaattgctttgctcgtggacagcgtaattacacccgcgtcaagccacacgcctatctcgtgatccgcattggcctccgttggcgtttgctcagcaaaaacggtggtaagcagtggcgactgatgacccatgaaacctataaccaggaatgccgcaaatga

SEQ ID NO: 182836 - DNA, 936 bp, Klebsiella oxytoca
atgattaagtcacctcttaagtgggctggcggtaaaacccgcgtgttgccggagctgctgaagcacttacctaaagccgattgcttgattgagccctttgtaggcagtggcacagtctttatgaatacggaataccgccgctatgtgctttgtgacagcaatcgcgcattgatcaatttcttccgcgcgctcagggaagaccctgaaagattgatactgatcgccaggaacgtattcagaaatggcaataacgaagatagctattacgaagagcgcaagttgttcaaccacctgtcgtgggatgacgagtgtgcagatgattacgttgtacggtgggcggcctcatttttatacctgaaccgccactgctttaacgggctttatcgcaccaacagggatggcggtttcaatgttccatttggcagctataaggcgccttattttccagaagcagaaatgcgcttgtttgctgaaaaggcgcgggatactcacgcgctctttctttgtaatgattttcgtacttctattccgtacgttgcaaggaaccgcctggactctgtgatttactgcgatccgccgtacatcccgactagcaaaacagccaattttaccgcttacggcaagccatttaccctggatgatcactgcgctttggttacggcgttgctggacgttaatcgccagcatggaactcgctcggtcatctcgaatagcgacacaccagaaacacgccagatctactccgctttcaatctccacgccttcagagttcgacgttccgttagcgccaaaacccgcgatatggccagtgaagtgattggcgtaattcgcgtgtgtggcggttgcggtcgttctggtggtggaggttgcccggactgtggggcggtgatgggcgatgcggcatatgccgaaatgtttggcgcgccggcttgttga

SEQ ID NO: 182837 - DNA, 2550 bp, Klebsiella oxytoca
atgcctgactccacatccctggcatggagctggaatgccagaaagcagccagtaaacccttatgctgttgatgcgcctgcacggaaaccatctgcgctggccgtctggattgctctttatgagcaggataaaagcgatcaacgcgagcaggctgaagcaatgagtcgtgcagcggaagagtacctcttttctgttgcacattgcgatccctggcactatgacgaattgaatgatgtgctgattgagaaggctaagcgacatgcagaactccatcgtgttgatcctcttaccctgattcgtgatgacgtcgccagcttgcctggtttcctgcgcaagccgctggaaacaaggattaagtatttggaaaaatcagaagatccgcgccatttgcctacctatctgaatgaggtcattactccctcattagtgagaattgacaaggtccgtgctaaccaggcgtcgctgtcattccaggccatggctggcagggatagccttgatcaactccttcgacttgctgaactgaatcagcgggaggttaagcggctttcaacgctggtcgcagcgcacattgatatgatttttatccagctttgcggtgagatgctgaccgatgaattagcttctcccatcgtaatactggagctctatcgtcgtgtggcggccgaagtgtcacgccttgatgttatcccgccgggttatgaagcgctccgcagcaaacataatcgccgcaacccgattaattacgagctgataccgggcgcgcttgcccgtatgcgttgtgctgactggtggcaacgtaagctgtggcaactccgcaacgaatggcgggaagagttgcttcgggctgcgtgccttgttcatcggcacgcatcaccttatgtcagccatgacattctgttgcagaagcgggaacaacgccgtaaggcgatggattttttccgcaatcatgatctgattaacgaagatggcgatacgctcagcatggaggatgtggtgcttgcaagtgccagcaatccagcgcaccgccgtaatgagatgatggcctgtgttaaaggcctggaattgatagctgaaatgcgtggcgactgcgccatgttctataccatcacctgtccttctaagtaccacgccacactgatgaacgggaagcctaaccctacatgggatcactcgacagttaggaaaagcagcgactatctggttgatacgtttgcggcattccgtaaggcaatgcacaaaaaagagctgcgctggtacggcgtccgcgtagccgaaccacatcacgatggcactgtgcactggcatttattgtgttttatgcgcaaaaaacatcgacgtgcaatcacagagctgctgcgtcgtttcgctatccgagaagatcgcgccgaacttggcaataacactggcgctcgtttcaagtcaaagctgatagacccgcgaaaggggactccggccagttatattgcaaagtacgtcagtaaaaacatcgatgggcgtgggctgggtgacaccgtcagcaaggagacgggtaaatcactacgtgatagtgccgagcacgtcactgcgtgggcatcgttgcaccgtgttcaacaatttcgtttttttgggattccaggccgccaggcgtaccgcgagttacgattgttcgcatcgcaggcaactcgtgcaatgaaaaccagcaaaccgggcgctccggtacttatggatccaaaactggacgctgtgctcgctgctgctgatgttggctgttttgccacttacatcatgaagcagggcggtgtacttgttccccgcaaaaattacctcattcataccgcctacgagccgacagtcgaaccaggaacctatggcgatcacgggattcgtatttatggcatttggtcgccaatcaccggtaaggaaaacaaaatatgcacgcatgtccatacctggaagatggtgaagaaggctcccgctaacccaggcgctgaaagcgccgcccagggcgaccccgtcgccccttggactcgtggcaataactgtccccagtcttcaaagggctcggaaaaagtgactgtgaatggtgctgagatgttggaacagctcgttcatgatgaagatctgggatcgttggacgtgagtagtttacctgctaaagaaagaaacgtggttcttcggcgtttacgtgaaacatgtaaggtaaaggcttcgccagtaaataagcctgagttgttaaacacatcaactagggcgtgttcaatacgtgattttgcactttcgataggggttgaactcaacgagtcacaggttgcgcatttacttcaaggtaaacacttgcgattcaatgacagttcgatttctgccactttcgagggtgaattgcgaaggagtgaggttgggaatttagacgctaagattagaaatttatggcaaattttgaacaaacataacaatctcatatcaactgaaattgtcagagatccaattagctactatttttatatgattgaaaaatttagccttgaaaaagataaatgttctgtgtttgataaatgtactaatgtttga

SEQ ID NO: 182838 - DNA, 1983 bp, Klebsiella oxytoca; identical to SEQ ID NO: 182659

SEQ ID NO: 182839 - DNA, 642 bp, Klebsiella oxytoca; identical to SEQ ID NO: 182660

SEQ ID NO: 182840 - DNA, 1062 bp, Klebsiella oxytoca
atggtaactttgaaaaagaaatatggtaaaaagccgatagccagcaccgccggccctgacattgtggagtcactgaaggccgatcccgcgttgacagcgttcagctttgacggcccttatcccgtgcgggatatggccgatttgctggacaatctctattgcatggacaacgggcgatactatgagacgccagtagacttttacggactggctaaagctccgcgtcagagcgcctggcatgagtcggcgttgtatttcaaacgtaatgtgctcaccggctgttttatcccgcacaaactgctcaatcgccagaccttttccgcgtttgcgctggactggttcacgtttggcaatgcctatctcgaattgccgcgtaatcgcctgggcggcccgcttcccttcaaacactctcttgcgaagtacacccggcgtgggagcacagatctcgatcaatactggtttatccggcgctggaaagaagagcacacgttcaaatcaggaacggtatgtcacgttctgaatcctgatatcaatcaggaggtctacggtatgccggaatatatggcagcactgctggccgccagcctggcccactccgctgacatgttccgtaagctttactacgacaacggatcgcatgctggatgcattgtgtatattggcgctggacaagttgacgataaaagcatgaaggcagtcaaagagacgttgaccggtgcgcgcggtaaaggggcatttaaaaacctgctgctgcatgcgccaggcggcggcaaagacggcgtgcaaatcctccccttccagcagatcacggcgaaagatgagtttatcaacattaagaacgccacccgggacgacatactcgcagcgcaccgtatcccgccgcagctgatgggcgccatgccagaggggaacggatcatttggggatatcgagaaagccgcccgggtctacgctatcaacgagctgacgcccgtaatggaggcgctgaaggtggtgaacgagtggatcggagaagaagtgatccgctttaacccttacgcgttgcttacccctgagaaataa

SEQ ID NO: 182841 - DNA, 1728 bp, Klebsiella oxytoca
atgattcaggatgcgtttattcgattaagggcaaagcagctctactggcagggttacccgcccgccgaaatttcgcgactcatgggtatcaactcaaacacggtttattcctggaaaaaacgtgacgagtgggacgacacaacgcctatcaaacgggtaacgcaatccattgatacccgtctatgccagctgagtgcgaaggacaataaaaccagtggcgatttcaaagagattgatctgttaacccggcagttgaaaaggctggataccgggcagaccaacactaccaccggcgttaaaaaaaccagtcgtcgcaagaagaaaaatcacttctccgaggagcagatcgatgcattgcgctcaaaaattctcgactctctcgcatggcaccagcgcggctggtacgagcagcgcgatcagcgtaaccggatgatcctcaaatcacggcagattggggcaacctggtactttgcccgcgaggcattgctgggcgcactgagaacagacgttaagcacgactaccagcgcaaccaaatctttctgtcagcatcacgaaagcaggcgctacagttccgcaacttcatccgcaaagcggctgaagaggtggacgtcgaacttaagggcggcgagcaaatcacgctgtcaaacggcgcagagctgcattttctcgggacgtcggcggcgacggcgcagtcgtacaccggccacctgcgatttgatgagtttttctggacaggaaactttatcaacctgcgcaaggttgccggcgccatggcaacgctaaaaggcttaactcgcacgtacttctccacgccatcgagtgaaagccatgaagcctatcagttctggaccggcgatcgatggaatgcgaaacggcctaaagcgcagcgcgttgatttcgacgtgtcctggaagaaaacgcatagcggcgtactttacccggacaaaacgtggcggcagatcgtcactattcaggacgctatcaacaacggctgggactacacggacattgatgaaatcagggacgaaaacagccccgatgaatttgaaaacctgtacatgtgcgagttcgtcaaagacggcgaaagcgcgttcaatcttagccagttactggggtgcggcgctgacgggtatgacgactggcccgactggaaaccgttcgctagtcgccctatgggccaacgtgaggtgtggctgggctacgacgccaacggcggcagtggcaatggtgatgccggtgctctgtccgtaacggtccctccccttgtggctggcggccggtttcgcacggttgaattgaagcaactgcgagggcttgagtttgaacaacaggcggcagtcatcaaagaggctgccgagcgctacaacgttactcacatcgccatcgatggacaaggcgtcggggaggcggtctggcagattgttaaaaattggttcccggcggctatttgctaccagatgagcctctcttccaagcgcgcccttgtcctcaaaatgttgcagatcatccgcgccggccgctgggaatatgaccgcagcgagcagggcctggtcagagcctttaacgcttttcgcaaagttgttacgcccggcggtttcatcacttacgaaacggaccgatcgcgcggcgtaagccatggtgatatggcgtgggcaaccatgctttcgattattaatgaaccgttgggccaggaaagtggcggcggtggtttcgcaatgggatggtaa

SEQ ID NO: 182842 - DNA, 840 bp, Klebsiella oxytoca
atggccagcacgactaaacccgcccgcaaaaagtttcgcgttgcggtttccggcgccaccgttgacgggcgcgagatccagccgcagcacctccgcgatgcggcggcgagctacaacccggccgtttacggcgcccgcgtgaacgtggagcactatctctccatgcttcctgacagcaattttggcgccatgggggatgttgttgctttaagcgcggaggatatcaccgaagggccgctggccggtcgtacggcgctctatgccgagatcgacgcttcggcacgaatgaagcagctcaccgatgaaggaaaaaaaatctattccagtattgagctgcatccgcagtttgcccttaacggtaaggcgtatgtggtcggcctggcgatgacggacaccccggcaagtctggggactgagcgccttaaatttgccgcgcagcagcgcgcgcaggtgatggccttcaataaccagcagctcgaggcgccgctgttctctgatgcgcttgaagttgaagtgatcgaactggcagctcatcgcagcgaggagggcgtcaactggttcaaccgcgtgatgggcatccttggcaaaggccagaaaaccgacgatcagcgtttcagtcagttgcatcaggttgttgaagccgttgctcaatctcaggcagaccagattgaccggttcagagccctggaacaggaacgccagcaggacaaaaccaccatccagcaactgaccagcgaacttaacgagctgcgcggtcagcttcagctccagcccgcagaaaattacagcgcacgaccggcggcaaccggcaacagcagcgcacagcttgcagaattctaa

SEQ ID NO: 182843 - DNA, 1035 bp, Klebsiella oxytoca
atggaaaacctgacccgcgaattatttgataagtacattgtgcgccaggcacatctgaacggtgtctcaccctcagccgttgccaatcgtttcagcgtcgatccaactatccagcaaaaactggaacaggccgccatggagtcggatgacttcatgaggcaggttaaccacttcggggttaaagagcaggaagggcagaaagtaaaaattggcagtaaggggccgatggcgagcacgaataacagctcggacggcaccaaccgccgtaaccctgcaccgaaccataacaaagagccgcagaactaccactgccgcaaaaccaactatgactatgcgctttcgtatgcggagctggatgcgtgggccggtcaccctgaatttcagtcattaatcagtaatgcgatggctcgtcagctgggattggatcgccagatgattggctttaatggcacgcattactctgaaaactccgaccgcacgacctacccgttattgcaggattgcggcgttggctggctgcaaaaaatccgcaatgaagcgccgcagcgcattatgccgggtatcacgctgacctcccgtgatgagaataacgcggtaattgcgtcaggcacctacggcaatattgatgccgccgtgcttgatgcgcgtcacagccttatggatccctggttccgccgcgctcccggcctggtgactgtgctctcgtccgatctgctgctgaaagtgaacctgccgaaagtgaacgcgctcagccagaccaatccgaataccgaactgctggccgcgcagctcattgtcagccaggaaaagatcggcggtctgccgactgtctttgtcccgggtattcctgaagatgtagtgctcatcaccaacctgaaaaacctctctgtgtactaccagaaaggctccctgcgtcgctctatccgggaagagccgcactacaaccgcgtggcgacttaccagtccagcaatgatgactatgtcattgaagagtacggcatgattgccatgatcgacggcgtgacattcgcctga

SEQ ID NO: 182844 - DNA, 867 bp, Klebsiella oxytoca
atgctgacaccggcacaaagacactttcagaaggtcatggcagagaggcggggcatcagtgatgagcgtgacgcggagacgcgcaccgcgcatgagcagatcctctttcgcctgcatatgcataaatcttcgctaagccaaatccagtcccggcaggcgaaggccgctgtaaaggccagcatccttcctgagtttcagggatggattgacggcacgatcgagggcgacagcgggcgcgcggatccggtcatcaccactctgatggtgtgggcggtggactgctccgactatgcgctggcgctgcgtatcgggcgctatgtcgttaagcatggcctgagcatgccggatgacaactatcgccgcccggcacccacggtactggccgaggaaatctgcaatcccattctgaacctcgccaccacggacgccggagccgatttgtcaggctatatcgccatgctggacgagctggccgaaattgtggctgacagtgatatgccggatgaggtccgcgcgaagctgtgcaaggtgagggcgttttgccgtcgcgacacggaagacgcggaaaccaaaggcgaagcgctgaaactcttccgggaagccatgagcctgaacccgggtgcaggtgtgaaacgggagatcgcctctctggtcagcgcgctgaagaaggcgccgcagaccagcacggcgagtggtgatgcggaagatgagccttcatccagcaatacagcggcaaccgaaacacccgcagcagaaaaaacaacacgaacgcgcaagcagacgaaaacggcggccggcacccaaaaagctacccgcaaaacggcggcaaaaaagacaacgaaaaccgccgtcaaagtaaacgcctga

SEQ ID NO: 182845 - DNA, 516 bp, Klebsiella oxytoca; identical to SEQ ID NO: 182661

SEQ ID NO: 182846 - DNA, 201 bp, Klebsiella oxytoca; identical to SEQ ID NO: 182662

SEQ ID NO: 182847 - DNA, 279 bp, Klebsiella oxytoca; identical to SEQ ID NO: 182663

SEQ ID NO: 182848 - DNA, 546 bp, Klebsiella oxytoca; identical to SEQ ID NO: 182664

SEQ ID NO: 182849 - DNA, 321 bp, Klebsiella oxytoca; identical to SEQ ID NO: 182665

SEQ ID NO: 182850 - DNA, 468 bp, Klebsiella oxytoca
atgctgaagataaacacactccgcgccgccatagagaaagcaaacacctggtgccgggcgaacccggaagcctggacggtgtttgttgaagagggtggcattgaaaccaccggtgaaacaccgtctttcatgtatcgctattctctggtgctgttcgtcatgaactacgccgggagcattgacgacttcacgctgccgctgatggcctggctctggtttaatcagcccgatctgctgctgaacccggataaaaaccagcagataaaattcaccacactgattaacaacgacgacaccgccgatctgatgtttgagctgccggtgcgtcagcgggtactggttcaactggatgaaaacggcgtgccgtgcgccgagcatttgccggagccgcgcccgcgcgtgctggccccccacgccacaggctgggggctggtatttgaaggcatgcttcaggaggccggagcgtga

SEQ ID NO: 182851 - DNA, 636 bp, Klebsiella oxytoca; identical to SEQ ID NO: 182666

SEQ ID NO: 182852 - DNA, 588 bp, Klebsiella oxytoca; identical to SEQ ID NO: 182667

SEQ ID NO: 182853 - DNA, 351 bp, Klebsiella oxytoca
atgacagccagttataccgggatgaacccggaaggcaccggcgcgctgaccgatcacgatcagctctggcagtccgtgacaaaaatcctcaccacgccaacaggctcccgtgtgatgcgccgggagtttggcagcgcgatccctgatttgctcgatgcgccgcagaacgccgtcacccgcatgcagctgatgggcgccgccgctatcgcgctggcgcagtgggagccgcggatcagcctgaccaccgtcaacgtggtgttttcagaaacaggcgcagtgaccgccgagctgagcgggaccatcacggaaaccatgacagaaaccagcaacaccatcaggttaaggagctag

SEQ ID NO: 182854 - DNA, 924 bp, Klebsiella oxytoca
gtgcaaacgtccgtcgatttatctcagatcccgcagcctgatatcgtcgaggtgcccgattttgaaacggtgctggctgatatccgggcgcttatcgtggcggccatgcctgcggaacttcaggcttctgtgtctgctgcgctgttgctggaatctgaaccgatggcggcactggctcaggccttcacctatcacgagatccatctgctgcaacgcatcaatgaagccgttcgagcggtgctgctttccagcgccctgggggcggatctcgatcaggtctcgggtaattttgacactgaacgtctgctgattactgaagccaccgacgaggcggacgccttatacgaaagtgacgaagagctgcgcgcccgcacgttgctctcatgggcgcgcctgagcacggcgggtgcccgtaatgcctatcactattttgcgcgcggggctgatgcggatgtgctcgacgtgcgcgcctatggccctgaaacacataaccaggagggccgcgttttcctctacgtgctgtcacgcaccggggatggaaccgccccgcaggctttgctcaataaagtcctggcagcggtgaatccggaggacgtgcgcccgattacggattatgtggctgattatgtccgttccgccgtgattgtgaattatcaggtggttgctgacatttacgtcccttacggcgtggacaccgccacggtgctggaaaaagccaccgcagcactgaacgaatacaccgcctctgtgcatcttatcaacgccaccgctgcacggtcgggcatagacggggcgctgcatcaggacggcgttgttaccgtcgatttgcattcaccggccaccgacgtcgttgcgacgatgggcgaagcgcctcattgcacctctgtgaaaatcaatcttgtggtgatggactatgaccgctaa

SEQ ID NO: 182855 - DNA, 3027 bp, Klebsiella oxytoca
atgaccgctaattatcccgccagcattctgccacccaacgccaccgccgtggaacgggccatagacagggccagcgccgccgcactggagaggttgccggtatatctgatccgttgggttaaagatccggacagttgcccgctggcgctgctgccgtggctggcgtgggaatatcaggttgatacctggaatattaactggtcagaacaaaagaaacgcgatgcgatcaagcgcgcccactacatccaccgccatcgtggtacggtcgccgccgtccgtcatgccttggtggacagtcctttcgggacggatattgttgaatggttcaatcagaacccgaaaggggatccgtatacctttcgcctgaacgtgtatcagaacgatttgccggtgacggaatacgaccagcaggatctaaaactggcggtgctgcgcgccaggaatctgcgcagctggttttccgttcatgtatttggccgacttcagggaacctcgtatgcggccggttacatgtacgccacggagaaaatcacgccgcgctttgtcccgttgcaggtggttttatcccgctacgagctgaatctggcccccggggacgcggaaagggtcacggtgacaattctccccgaatacgcggaagataaaacctttacggtaactacatcggatcaaacaatcgcgaccgccagaatagtcaacggcgatattctggttacgggcatgaagcgaggtacctgttcggtcaccgttacgacgactaatggcgtcagtgcggtaatcagcataaaagtggtcgcggtaatgaagttcattacccgcatcgacagtgcaaccaggccaatattctttgctcatatggacgagggtttcacggttgactatggcgacggcattgacagccgggactaccgtttcgatcccgccagtgaagcttcaggttgggttattcctacacgtgaattagtacagggaaaggaatacaccatcacggttaagaacacggaaaccgcctgtctgcgcagccgtttatctaactattcttcgaaactgaaccctgttgtggaattgattagtgttacaggggaaagaggtcatctttcagggttcgctttggataccaccggattaatggctattcgtcccggagcatttgacgatttgccaaacgtgaataactgcaaaaatatttttaccaactgctcgtcgcttgcaggtattccggcatcgttgttttctcgcatgaagatagaggatttttcagacgcattcagagggtgtacatcgcttactgaggttccatcggggctatttgcaaaccagcctgatgcgatcgacttctcatcggtatttgcaggctgcaccggcctgatcagtatcggcaataatctgttccacagctgtgtatctgcggtgaatttcagttacgcgtttgatggttgctcaatgtttgcaaatatcggcacgggaatatttacaggatgcggttcagcagggacattctcttatagcttcagggcgtgtaaaaatcttcttgtcttgcctgctgatatgtttgcggatgttccgggcggcgcattcaccggcgtattccagaattgcacggcactgacggcaattcccgccaacctgtttaaaacatgttctgaagcgaatcattttggcggtgcattcactggctgttcgcagcttctttctgttcctgccggtctgtttgcaggtctgtcgaaagtcacctatttcgggacagtcttttctggttgcagttcgctgaaaacggtcggcgcgggtttatttgccgggtgcagccaggcgcagacattcgcctctgcattttacagctgccgctctcttgaaactgtagcgaaagatattttcagcggctgcgtagaggtgacgacctttgccagtacgttttatgggtgcagcagcctgacagcgctcccgtcctttgctgactgcgcgaaagtcaccactttctcatacgcttttgctaactgtggatcgctcacgaaaattgatgctgatgcttttgctgagaaagcgctggtaacgacattcacatacgcttttgtaaactgtacttcgctggtttctgtggggaacggcgcatttcggggatgtagcgcgttaaccagcctgggctatacgttttcaggttgccgctctctggtttctctcgcgggagatatgtttgccggttgcgccaaagtgacagccgtcgatttcttgttcgaaaagtgctccgcgctggctggactgccaaaacaactattcagcgacatggtgtccttgaaaggcatgggatcgactttccgggattgtactgcactcatctcgctaccatccggcctgcttgatggttgcatcaatctcacttcgttaacgctgacattctcgggctgcacctcactggcgttattgcctggcgatttgctgaaaaacaacattcttctgtccggcgccggatcgacgttttacggttgcacctcactggtaaatattccgccgacgctgttcgcgtcctgctctcttattacctcgtttggcgccacgttccagaataccggcgtggaggaaataccggaaaacctgttcagcggcaacccgctggtgacctcttacggccagactttcaggggctgtaaaaacctgcgctcagtgccagccggtctttttgccgccagcataagtgccacggtattcacgaatgtcttttcggaatgcagtgcgctggaagtcgtcggggcgggattactcaacaccacggcggtaacgacggtgggttatctgtttgacggctgtgcgtcattacacagcgatgttaacacgatatttaatcttgcgagttacccggagattgtcaccacaacggcaatattcaggagctgcgcattactcgccggcaaaggcctgctatttatgggcaaagtgccgaacgtcaccgcgcactattacgcgttttatgcgtgtgcgggcctggacgattacgacgatttacccggcaactggataacgaacaaactatga

SEQ ID NO: 182856 - DNA, 1098 bp, Klebsiella oxytoca
atggccacgggactgacactaaccacggcgggcgccgccgaaatcgaggccgcgtatcaggcgggggaggtggtggatattacctccgtgctgatcggcgatggtggcggcgtgacattgccggctcatcccgatgagctggcggcggtgacggcgctttttggacagtttggccgtgaaacctttgactctgattcaagctatgaggggtttatcagcgggcagatcgttatcaactgccaggattatccgggtaaaacgctcagagaagcggggctggtcagcgctaaggggacgctcatcgcttacggcacatacccggcgacatacctcccggcgcaatcggattccattatcaaagagatcattctgacgctggtgttgacgctgacgcacagctcaaatgtgcagctcgttatcgatccgacacttgccactatcacgctggaaacgggcgataaacgttatctgcggcgagcacaaaatcttgctgatttaaacgatacagaagaggcccgggaaaatctggagctgggaaactcagccacgcgggacgtgggcaccgagacgggaacggtagctgcgggggatgactcgcggatcaccggtgcacttcagaaagagaataatctttccgatctgagcgatacatccgaagccctaaagtcgctgggactcaacagcgacggagcggcctatagggcaattgttgacgctattttttacgttgggatcgttatctcaggtgagcaaagcccggcgactcgctttccttggcagacatgggtcgacttaagcgaaacctttgctgatagagttgtacggattggttctcagtatggcgctaccgggggaagcaacaaggtgaaacttgaagccaataatttgcctccccactggcaccggtcgggtgacagatcgccaggtgctacgtgggacccgaacactacccacggaacagataaccagaaaagcggtccattggcgcttactgacggaacttatgttgatgcggcagggcttaaggagtcaactcatgaatcagtagatgtgactaacgaatatgtgtctttatgcctgtggaaacgtgtggtatag

SEQ ID NO: 182857 - DNA, 2328 bp, Klebsiella oxytoca; identical to SEQ ID NO: 182668

SEQ ID NO: 182858 - DNA, 438 bp, Klebsiella oxytoca
atgatgatggtattcgggctctttgtatttgaactcaggacactgccctatcagcaattgcagctgtcccgtaactggcggcacgttaaaaatgatcgtgtgggcaggagcgcaaaatggcagtacgttggcgccggcgagaaccagctgacgttgggtgggctgctgtaccctgaaattaccggcggcaacctgtcgctgggagctgtctcaacaatggcttacaccgggcttgcctggccactgattgatggcgtcggttccatctacgggatgtatgtcatcacgggcttgcaggaaacgcatcaggagtttgaccgctacggcaaagcgaaaagaattgagtttacgctttcgctgcagagggctgatgaagatatcagggagcggttgcaaagttcaataacaagtgatttgatggcacttcttaaaggatag

SEQ ID NO: 182859 - DNA, 2976 bp, Klebsiella oxytoca
atgaagagtcttgatatacgcgttgctttcagcgcgatcgacagatttacccgccccgttaatgctgcccgccagagtgcgggcggcctttccgactccctcagaaaaacacaatccaccctgaaaggactcgataagagcagtgccacttttcagcgaatgaccgcggccgtcggcaaaaccgaccgttccatctcacgtgcccgtgcccgctttgatggcttgtcagaagcgcaacgtaaaaacgggacgctgacggaaaaacagcaaatactgatgtcccgactgggtgagcggcttgatcggttgaccgcaaaacgcgtgacggaagtggcccgcctccgtgagagtgcatcagccctgcgccagcatggcgtcatgctttccggtagtagcgccaccatcggtaacgcgatacgccgcacagaacaatacaaccaatcccttgaacgggaaaaacggcaacttgctgcggtcactcaagctcgtaaacgttacgagggtgcgcagcagatggccggaaagttgcgctctggcggtgccatagcattaggtgcagcaaccgctgccgggtacggcgccggacgcttcctgtcgcctgcggttggttttgatgaggaaatgtcaaacgtccaggcgttgacgcggctcgataaaagcgattcgcagctggccgccttacgtactcaggcaaaaaaactcggtgctgaaaccgccttcaccacacgtgacgccgccagcggccaggcctttctggcaatggcgggcttcacgccagaagctatccgtgccgcactacctggcgtgctcaatatggcactagcgggcagtatggaattgggtgaaacggcagacatcggctcaaacattctttctcagttttccctcgatgccggagaaatggaccgtgtcagcgatgtgctgacaggtacatttacccgtaccaataccacgcttagcagcctcggcgagacaatgaaagttgtcgggccagtagcagcgggacttgggattagcttggaagaagccgcagccatgaccggcacgctggcgcgcgtgggtattcgcggtagcgaggccggtacggcaatgcgtcgctcgctctcccgactggcctcccctactacggcagcaaagagagcgcttaaagagctgggtgtagaaaccgccgacgcaagcgggaagatgcgtcgcccgttcgatattcttctcgatctacaaaaacgcgtttcccgcttcggcgaggtggatcaggtttcattttttaaagatatcgccggagaagagggttttacgagcctccagtctttggtcaacggcgcaggtgatggctaccttcagtcactctatgaacaaatcgctgaagcccataaaaaccaggaggcgctcgccgtcgctaacaaaaagaaagacaatcttggcggcgatttaaaggagctggacagcgcgtgggaggcgtttcgcatttctgtggctgagacagtagacggtccattgcgcagactgacacaggggcttagccgggttattggcactgttcaaagctgggtagaagaaaaccccagactttcacaaacgttgttactcgccggtggtactgcactggcattaaccgcagtaattggcggtatgtcattagttgctggtctgctgatagggccgcttgcaaagctcaggctgtggtttgcgctgctgtccggcgggagcggcatcggaggtacggtttcagcgttccgcatattgagtactgtgggcggcagttcactggcaaaaatcagcggatggcgtgccttactcggcggtctggctggacgcgccagcgtattaaccaggttgatgataccactgcgcggtgcgttacttggcgcctttacctctccggtgactgctattggcgccctgtcaaaaagcattggcgggctggcactgcggctaaccgggatccctgctctcttcggcattgtgaaaggcggaattgcggcgctgagtggcggcttatcaatgctattgagcccaatcggcttagtgggtgctgcgtttgtagcggctggggtactgatctggaaatactggggaccaattaaggccttctttagcggtttttttacaggcatcatccaggggttagcgccagtttataacgcattttcccggctggcgcccgttttcggggtcattggggatggcgtcaaaaacgtctggaactggtttaaaaaagtattaacgcccgttgaggagagtcgcgaggcgctaaacaaatgcgccagcgccgggcagacctttggcgaggtcctggggaccgcacttagcgttctgctttggccgcttcagaagttaatggaaggcgtcggctggttactggagaagctcgatctcatccccgatggcattgaaagagccaggctggaagcggccagactcagggctattccggttatgtgggaatgggatgaaaaatccgggcgcatggttaaaagggagtggcaatggtcatctgaaaagcctgcaagcaaaggcagcgccccgccgcccaatgtgctcgggggcaactctggaacagagcggcggctgggccaaatcgcggataacaccaaaggccttttagatgaggaaaagcgcaaacgtatcgggccgggtgacattgtatttaaaaatctccctccagcccttgcagtacgtggtgaatggcaggagtcgaagcttgtccgccagtctgtcagcgctcgcccggttattgccgctggcgaaccattgataaaacagacgcaggcatggcaaccggtacgccgaaatcaaagcacccacacggcggctgcggctcaaggtaatagtttttccggtgatattcacatccatctgcacggcattcagaacagcaatccgcgcgaactggcgcgacttgttggcgaagcgatacgcgcagaaattgacaaacagcaacgcgctgcccggggttcgttccgggaccatgattaa

SEQ ID NO: 182860 - DNA, 318 bp, Klebsiella oxytoca
atggctaaaaaaactaaaaacctgttcacgctgatgcagccggtagttcgtaaagacagtgagatcggtcaggtggaaatcactggcgccatcagtcaggccggatcattgcgcggcctgaatcttatccgcgttgccaatatggacgcagactcaattgccacgctgttgacgcgagtcaccgcgcctgcgctgacacaaaaagaaatcaacgaaatgcacaccctggactttatcgggctggcagagcttctggtccctttcttgaatccgccggagcctggagcgtcgaacgtggcggagacggagagcgagtaa

SEQ ID NO: 182861 - DNA, 516 bp, Klebsiella oxytoca
atggctattcctcacaaactgcggctttttagctgctttgttaacggcgacaactatctgggaaaagtgacctctttcactcgccccaaactgtcacgaaaggtagaggactatcagggcggtggcatgctgggtgcggtcggtgttgatctcggccttgaggctggcgcgctggattccaccattgtttttggcggcgtcattaaggctctgtttctcgaatacggagcagaaattgacggcacgcggctgcgctttgcgggtgaatatttcactgatggcgaaagccagcttgtcgaggtggagctgcgcgggcgatttactgaactcgacggtggagattcaaaacagggagaagacaccgaggaaagctacacctttaaatccacctactacaaattctccatagatgatcagcccattatcgaaatcgatctgctgaatttcatctacaaaaagaacggtcagaacatgttcccggaccgcatcacctctgcccttggcatgggcaattga

SEQ ID NO: 182862 - DNA, 1173 bp, Klebsiella oxytoca
atgtctgaaactcgttttcacggcgtccgctctcgcgaaaataccgacctacagcaggcaatcaatgacattgattccagcgtgatcggtattgttgcggttgctgatgacgccgatccggaaactttcccgctcaatacgccggttctgctgacacgggtgcgtaacgtcctcggcaaagcaggtaaaaccgggtcgctttacaaagccctcaaagccatttccgatcagtgcagtccgcgtgttgtgattgtccgggtgaaagaggcttccggtaacggcgacagccagtcccaggccattactggcggaacagatggcgacagctatacgggaatgtatgccctgctgacggcggaggccaaaaccggctatcgcccgcgcatcctggcggtgccggactacgacactgcggaagtgacgtcacagctttgcgtgattgcccagaatctgcgggcttttgtttatgccggttgcaacggctgcgcgaccatggcggaggctatcgcttatcgcaaaaccttcgcataccgcgagctgatgctgatctggccggactttatcgcttacaaccccctgacggatgataacgaaacgtttcccgccccggcttacgcctgcggcctgcgcgccgctattgataacagccagggctggcacaaatcgctgtcgaatgttgtggtgaataacgttctgggtatttcgaaagatgtgttctgggcattgcaggcagaagacagcgacgctaacgagctgaacaacaacgaaatcacgacgcttatcaagcgtgacggtttccgcttctggggtaaccgcaccacggacaccgaaacctacacttttgaggtgtttacccgtaccgcgcagatcctggcggacagtattgcggaggcgcaatttacctctgttgacagcccgctcactccggccaacgtgaaagatgtggtaagcggcatccgctctgctctcagcaaaaaagtcactgccggccagcttatcggcgctgactgctggtatgacacgctggataacggcaccacggatttgcgccagggaaaactgattgtgcgctatagctacagcccggtcccaccgcttgaagatctgacgctataccagacctttactgatgatttttacgaaccggcgttcgcgtcgctcgggggtgaataa

SEQ ID NO: 182863 - DNA, 1140 bp, Klebsiella oxytoca
atgtcgatagcagacacgctgacaacagcagccgaagcgtatgtagaaaaattaagtgaggtcgtaaagacaccgggttttagtatcacgctgggtggggttgccctgaccgaactggccgaccgcatcacctcgctatctgttacagataacaacggttttgatgctgaccagctaaccctgtcagtagatgactctgacggggtaacagatttacccccacgtggtgcggagctggcggtgtccatcggctggatgggtgaggcgttgatttacaaaggtctctacaccgttgacgaggtggggcatagcgggccgccggatgttatcgacatcaccgcgcacagcgctgattttcgcgaagagatgaacgtcaggcgggaggtgtcctggcatgatttgacggtagagcgggtggtatcggccattgcccagcgctatgacctgaagccgatgattagcgaggccctgatcgacattgagatcgaccatgcggatcagaccgaagagagcgacatgtcgtttttaacgcgcatggcggagatgttgggggccattgccaccgtgaaaaatggctgtctgctgtttatcctgcctgggggcggcgtcagtgcatctggtagggcgctgccatcggctgagataacccgtgccagcggagatcgtcacaggttccgcattgccgatcgcgatgcttacactggtgtgcgggcgtactggctggatcttaatttcggcaagaaaaaaccggtcaaggtcactaagcgcaaaacaaatactgccagaaaaaaggctgaggagaaaagcagccggccggagggggattacatggagggcgctgaaggtaacgtgtatgttttgcgtaaaacctatcagaacgaaacggcggccaggcgcgcagctgcggcaaaatggatacagctccagaaaggcgcggcacagttttcgataaccctggcgcgcggccgcgccgatttatatccgggtatgcatctgaccgtgtcgggctttaagcctgaaatcgatactcaggattggatcattgccagagcggaacatgtgatcggtgataacggatttaccacgaaaatggagcttgaggcgaaaataagcgactggattgcagaaactgaacagtag

SEQ ID NO: 182864 - DNA, 240 bp, Klebsiella oxytoca
atgaaggggatgatagtcatgctacctctggcgcttgccggatgcgcgcagagtcagccggcgcagcaagcacacccgatagggatggctaacccggcttcggtatactgccagcagctgggagggaaacaggttcctgtccaaagcccgcagggcgtgcgcaccgagtgcaagctacccagtggtgaaacgttagatgaatgggcgctctggcgccgcgatcatccggctaagtcatag

SEQ ID NO: 182865 - DNA, 345 bp, Klebsiella oxytoca
atgattcaatgtaaacgggtttatgacccgcaggaagcgagcgacggctaccggatactggtagaccgcctgtggccacgcggaataaaaaaagaggcgctgaattacgatgagtggtgcaaaatcctggcgccatcgactgatttgcgtaaggcttttcacggcgagacgcttgattttgcccactttagccagcgctatcgccaggagctggaagcccaccgcgatgaaggcgagcgcctggccgcgcttgccaggcagcagccgctgacgctgctctacgcggcgaaaaacacccggcaaaaccatgcccaggtgctggctgactggctgaaagcgctatga

SEQ ID NO: 182866 - DNA, 510 bp, Klebsiella oxytoca
atgaaggacaaaattttggttagcgcctgcctgatgggctttcaggttcgctataacggcagccacaaagcccggctggctaacgcgctgtctcgctggcagagcgaggggcggctggtcacccactgcccggagctggctgccggattgcccatccccaggctaccggcggaaatccttggcgcgcagggagcggatgtcatgcaaaaccgtgcgaaaattgttgaaagtgacggccaggacgtcactgcgcgctatcagctggccgcctggctggcgctaaaagcagcgcaggaggaaggctgtaccgcagcattgctcaccgacggcagcccaacctgcggcagtcagtttatctatgatggtacctttaacggacagcgcaagcccggtgccggcgttgccgccgccctgcttcgcgaatacgggataacggtattttccgagctgcagttgccgcagctgcttgcctggatggaacagagggagagtgacgatgattcaatgtaa

SEQ ID NO: 182867 - DNA, 693 bp, Klebsiella oxytoca
atgaactcccccctgcgtattgccctggttggtgattacaaccctgatgtagttgcccataaagcgattcccctggcaattgatgatgccgccgccgtactggagctgccgctgcgttatgactggctggccaccagcgaaataaagtccgctgacgatctcgctgattacgatgctatctgggtggttcccgccagcccctataaaaacgccgaaggcgcgtttatcgctatacgccacgcgcgggaaaacagcattccgttccttggcacctgcggaggattccagcacgcgattatcgaatacgcgcgcaacgttatgggctggcgagatgccgcacatgcggaaaccgataccgaaggccggatggttatcgcgccgcttagctgctcgctggtagaaaagtcggacaacattgaactgcgggccaatacgctgatctctcgtgcctatggccgtgacagtattgaagagggttaccactgcagctacgggattgccgccgattttgcccgcgagctggagcagggcgacctgcgggttacgggctgggatgatgacggtgagattcgggcggtagaactggtgacgcatccgttctttgtcgccacgctatttcagcacgagcgcaatgcgctggaaggcagacctgcgccgctggttcacgcgtttttacgcgccgcaagtcagtga

SEQ ID NO: 182868 - DNA, 1185 bp, Klebsiella oxytoca
atgaattctgtttcaccttctgccggccgccgtaatctgctattgattaccggtattctgcttatcgccaccaccttgcgggtcacctttaccggcgccgcgccgctgcttgatgccattcgcagcgaatatggcctcaccaccgcgcaaaccggtctgttaaccaccctgccgctgctggcctttggcctggtctcgccgctggcggcgggtgtcgcccgccgattcggcattgaacgtagcctgctgctggcgatgatcctgatttgcctcggcgtgggtctgcgctccctgcccttcgtctcgctgctgtttatcggaaccgcgattatcggctgcggcatcgccctgggaaacgttctgctgcccggactgatcaaacgtgacttctcgcagcacgtcgccaaaatgaccggcgcttactctctcaccatggggggcgcggcggcgctgggttcggcaatggtcgttccgctggcgctcgccggactgggctggcgcggcgcgctgttgatgctgatggcatttccgctgctggcgctgtttatctggctaccgcaggcgcgcaggcaagtcaccgcgccgctgacggggtcgggcgccatccacaaccgcgggatctggcgctcggcgctggcctggcaggtgacgctgtttctcgggattaactcgctggtctactacgtcatcatcggctggctgcccgccattttgcaaagcataggctacagcgaagcgcaggcgggctccctgcacgggctgctccagttggccacagcggcgccggggctggcgatcccgttaatactgcatcggctgaaagatcagcgcggcattgcggtgctggtcgccctgatgtgcgcagtcagcgcgctcggtttatggtttttacccgctcaggcggtgctgtggacgcttatctttggcttcggttccggcgcgaccatgattctgggattgacctttatcgggctgcgcgccagctcggcgcaccaggccgcctcgctgtcgggaatggcgcaggcggtgggctatctgctggccgcatgcgggccgccggtgatgggaaaaattcatgatgccaacggcgactggcatatcccgctgatcgccgtggcgctgatttccgttgcgatggcggtatttggcgcgctggccggtcgcgatcgggagatcaacggctag

SEQ ID NO: 182869 - DNA, 792 bp, Klebsiella oxytoca
atgatcggactcggcctggacggctacgacccggacagcggccacgaagcggcggcggcttttcgtattcaggtggtcgcggacgagcagtacattccgcgccatcatcaccgtaaaggtcagctcatcctggcgctacacggggcgctgacctgcgaagtggagaacgcgatgtggatggtgcccccgcagtacgcggtgtgggtaccgggacaggtgccgcacagcaatcgcgcgacgccggaggcgcaggtctgctttttatttattgaaccccacgcggcgccgatgccggatttctgctgcacgctaaagatttcgccgctggtgcgcgagcttatcctcgttatggccgagcgcggcagggccgaactcgctaaaccggcaatgaaccgcctggtgcaggtgctgttcgatgaactcccgcagcagccgcaggagcacctgcagctcccggtctccgggcatccaaaaattcgtcagatggtggacatgatggccgtcgacccggcccgctggcaaacgctggcgcagtgggcggcggagtttgccatgagcgaacgcaatctggcgcggctggtggtgcgtgagacgggcttaagctttcgccgctggcgacatcagctgcagctgatcctctccctgcagatgctgatccgcgggcagacggtacagcagacggcgcagagcctgggctatgactcgaccaccgcctttattactatgtttaaaaagggcctcgggcaaaccccggggcgctatcttgccagcctggctacgacttcccaataa

SEQ ID NO: 182870 - DNA, 447 bp, Klebsiella oxytoca
atgctcgacaccaccctgttaatactgctgggcctggcggcgctcggctttattagccataacaccaccgtagctatttcaatcctggtattaattatcgtccgcgtcaccccgctcaacgccttctttccgtggattgaaaagcaagggctgaccatcggtattattattctcaccatcggcgtgatggcgcccattgccagcggcacgctaccgccctctacgctgctgcactccttcgtgaactggaaatcgttgctggcgattgccgtgggggtttttgtttcctggctcggcgggcgcggcgtggcgctgatgggctcgcagccgcagctggtagccggactgctggtcggcaccgtgctcggcgtcgccctcttccgcggcgtcccggtcggcccgctgatcgccgccgggatcatttcgctgtttattgggaagtcgtag

SEQ ID NO: 182871 - DNA, 501 bp, Klebsiella oxytoca
atgaacgcgccggtaaaagtgagtattcatcagcagctgttggcgctgcttaaccgcgaccacgcccgttaccgggtcgtggaacatgaagccgtcggaaagtgtgaagccgtgtcgaagatccgcggcaccgcgctgggtcagggagcaaaagcgctggtatgtaaaattaaaggacatggggttaatcagcacgttctggctatccttgccgccgatctgcaggcggatttagcccggctggccgaatacgtcggcggcagcaaagcctctctggccagtccggcggaagttgacgccctgaccgcctgcgtctttggcgccattccccctttcagcttccacccctctttacgcctggtcgccgacccgctgctgtttgagcgcttcccggaaatcgccttcaacgccgggcagcttgataagtccatcatccttgataccgccgactatctgcgtattgcccgtccggaactgatcgcgtttcatcgcgaagcctga

SEQ ID NO: 182872 - DNA, 1497 bp, Klebsiella oxytoca
atgaaattacagaataaattactccgacatttcatttctgcgggggtggttgtcctgacatcttcatttctggtgtatgaattagtcgccagccatcgggatatgtcggaatacatgcgctacatcgtcgagaagggcgaatccgcctttctgtacgataaatatcaaaatcagttggttatctcccaggtctcgcgaaagctggatacgcaccccactgccgaaaaggcccaacaggcctgcgctggcgtgcagaccaatggcaacgtatacgggctcaatatcgccgggcataccttccccgggcttcacggtacgctcagcaccacccagccttcgtgcgagccgtggattaacgatctcccggcgctgcaggcttttgatgccgcgatagcccaaagcgatattatcgccgcgctgaattcggcaaccttcaaatccgataaacgcttccgctattacctcgatttagacaataaatacgcgtatttctattcgccgattgagatagatagcagccccgttgataactggaactttcttcacgacagtaaactgggcatcactcagttcagtcttaacggtttacttcgcgggcgtacgctaatttccagtatctatgctgacgcgctaaccggacagaatattttgtcgttcttaaccccggtctatcatcgggatcggctgaagggcattgtgatggtggacgtcactcgtcacgatattgagaagctgctctataccaccgaccgccccctggtctggcgctatctcgacatcaccttaacggactcggactcaacgtctgaaatccgcgttcaccgcagcaacacgcattttttcagctacgcccaccatagccagcaggtggcggaaaacctgcacatttcgctgtcgctggatatgtcctattttctgcttagctcctggaagctatttttgttttacctgatatctaccggcgttctgctgcacctggtacgcatgcactttcgcctgtataccgacgtttttaaagaaaacattagtgattctttaaccggtctgtacaaccgaaaaattctctcctcgctgctggaatcgcgtatgcaaaagctcaccgagcaaggcgtgaatatcgtgtttatggcgctggactgcgaccggctaaaataccttaatgacacctggggacacgatgaaggcgaccgcgccatcgtgctgctcgcccagtccatttccgccgccatacgtaaaagcgattacggcatccggctgggcggcgatgagttcttcctgatactgatcgattatgaggaacaggaggcgaaaaatatacccgagcgtattcgccagcacctgaaggaaattgacattaaccagcgcgttaatttctcatggggggcctgcagcatggcgccgggggatagcctggccgacgtcatgaaaatcgcggatgcccggctgtacgaaaataaaaagcaaaaaaaacacgcttacccggggcgagaggattaa

SEQ ID NO: 182873 - DNA, 1158 bp, Klebsiella oxytoca
atgatggaaaacgcagcggtgcagggaacccctcgaaagtttaaaaaaataagggcgctaaacaggcggcgaaattatttttttaagaaaatacgcaatgacctgcgagtctatatcgctaaagcgttctgggatagtcccgcgcgccgcgaagctgatttaacctccgcgaaaacggtgctgttaatgcgtaatgaaggtgcgatcggcgatgtagttgttgattcagcgctggttaaatgccttcacgaggcgggaatgaccgttgactttctgttgaccaaatccaatagtcaggtcatgcggtataatcctcgcattcgccatatctatgaggccgagaatgtcgactcggcggattatttgcacaaatttacccataacgttcctcagtcagttattactgagcttgcgaataataagtacgatattgtaatcgacccgtcgttgtttgatattccggtacacaggatgctgctgttacgacagataaagcccagagcggtactgggtttcaataagtggccttctattaaacactacagcaagtcttttgattttgactgtgaaaactggcacgtcagtaagacattttcttttatcgctgattatctgcagctggataaaaaatctctgcaatcttatgatctgcatataccacaggatatctgccagcaggttcgtgattatctggcggcgctcaacgggcgtaacgtggtgattaatatttttgccgggcatcaggaccgcagtatgtcgcaggcgcagctggcaacgcttctggtcagactgtgtgaggattatccggacgtcaatatcatattgctcgatcatcgcaatgaaatccggatccccctgccggagaaggtctgcgtgaatccgtttaaaacgctgcaccactgcatggcgcttatcgccgaggccgacttagttatctcgccggatacctcggtggtccatatggcggcggcgtggaaaaaaccgcttatcgcggtctacaaagatgtgcggatgaataatcgactctgggctccggggtacgacaacgcgcggcagattatcgttaaatgcggcaaggtataccagctggagagcttgcccgacctgataatgtcggagattgatcccgtcaccctgcaacaggcgcgagccgggtaa

SEQ ID NO: 182874 - DNA, 1284 bp, Klebsiella oxytoca
atgacctggttcatagaccgacgcctgaacgggaaaaataaaagcgccgtcaaccggcagcgctttctgcgccgctataaagcgcagataaaacagtcgatctccgaggccataaacaagcgctcggtgaccgatattcagagcggagagtccgtctccatcccaacggacgatattaacgaaccgatgtttcatcaggggcgcggcggcctgcgcaatcgcgtacacccgggtaacgatcacttcgtacagaatgaccgcattgagcgccctcagggcggcggaggcggtggaggcagcggtcagggccaggccagcgccgacggcgaaggccaggatgagtttgtttttcagatttcgaaagacgaatatctcgatctgctctttgaagatctcgccctgccgaacctgaagaaaaaccagcagcgtcagctgacggagtataaaacccatcgcgcgggctataccgctaacggtgtgcccgctaacatcagcgtcgttcgctcgctgcaaaactcgctggcgcgccgcacggcgatgaccgccggtaaacgccgggaactgcacgcgctggaagaagacctggacaccattagcaaaagcgaaccggcgcagctgctggaagaggagcggctgcgcaaagagatagccgaactgcgggcgaaaattgaccgcgtgccgttcattgacactttcgatctgcgttacaagaactacgaaaaacggccagaaccgtcaagtcaggcggtgatgttctgcctgatggacgtttccggctccatggaccaggcgacaaaggacatggcaaaacgcttttacatcctgctgtatctgttcctcagccggacctataaaaacgttgatgtggtttatatccgccaccatacgcaggcgaaagaggtcgacgaacacgaattcttttattcgcaggaaaccggcggcaccattgtctccagcgccctgaagctgatggatgaagtggtcaaagagcgctatgacccggcgcagtggaatatctacgccgcgcaggcttcggatggcgataactgggcggacgattcaccgctgtgtcacgaactgctggcgaagaaaatcctgcccgtggtgcgctactatagctatattgagataacccggcgcgcgcatcagacgctgtggcgggaatatgaacacctgcagtcaaccttcgaaaactttgctatgcagcatattcgcgacccggaagatatttatccggtgttccgtgaactgtttcataagcaaacctcaaaagcggacggttaa

SEQ ID NO: 182875 - DNA, 1935 bp, Klebsiella oxytoca
atgaatatattcgatcactatcgccagcgctatgaagctgccaaggacgaagagttcacactgcaggagtttcttaccatctgtcggcaagatcgcagtgcttatgctaacgcagcagaaagattgctgatggccatcggtgagccggtcatggtcgatacggccctcgaacccaggctatcccgtctcttttcaaaccgggtcgtcgcgcgctacccggcctttgaagagttttacggtatggaagatgccattgagcaaattgtttcttacttaaaacacgccgctcaggggctggaagagaagaaacagattctgtatctgctgggccccgtgggcggcggtaaatcatcgcttgccgaacgcctgaagtccttgatgcagcgcgtccctatctatgtgctcagcgcaaacggtgagcgcagcccggtcaacgaccatccgctgtgtctgtttaacccgcaggaggatgcgcaaatcctcgaaaaagagtacggcattccaaaccgctatctggggacgattatgtcgccgtgggcggccaagcgtctgcatgaattcggcggcgacatcacgaaattccgcgtggtgaaagtgtggccgtcaatcctggcgcagattgccatcgccaaaaccgagcccggtgacgaaaacaaccaggacatctcggcgctggtcggtaaagtcgatatccgtaaactggaacactacgcgcagaatgacccggatgcctacggctactccggcgctctgtgccgcgccaaccaggggctgatggagttcgtcgagatgtttaaagcgcctatcaaggtgctgcatccgctgctgaccgcgacgcaggaaggcaactataacggtaccgaagggatctccgccctgccgttcaacgggattatcctcgcccactccaacgaatcggaatgggtgaccttccgtaataacaaaaacaatgaggccttcctcgaccgcgtgtatatcgtcaaggtgccttattgcctgcgtatctcggaagagatccgtatctatgaaaaactgcttaacaacagcgagctgacccatgcgccgtgcgcgccgggcacgctggaaacgctgtcgcgcttctccattctgtcgcgcctgaaagagcctgaaaactcaagcatttattcaaaaatgcgcgtctatgacggcgaaagcctgaaagacaccgacccgaaagcgaaatcctatcaggagtatcgcgattatgccggcgttgatgaagggatgaacggcctgtctacccgcttcgcgttcaaaatcctgtcgcgggtatttaactttgaccatgccgaagtcgccgccaacccggtgcatctgttctacgtcctcgagcagcagatcgagcgcgagcagttcccgcaggagcagtcagagcgttaccttgagttcctcaaaggctatctgatcccgaaatacgccgagtttatcgggaaagagatccagaccgcctaccttgaatcctactcggagtacgggcagaacatttttgaccgttatgtcacctacgctgacttctggattcaggatcaggagtatcgcgacccggataccggccagctgtttgaccgcgagtcgctgaatgcggaactggagaaaatcgagaagcccgccgggatcagcaacccgaaagacttccgtaacgaaatagtcaacttcgtgctgcgcgccagagcgcacaacagcgggcgtaatccaaactggaccagctacgagaaactgcgcacggttatcgagaagaaaatgttctccaataccgaagagctgttgccggtgatttccttcaacaccaaaacgtcaaccgatgagcagaaaaaacacgatgactttgtcgaccgcatgatggagaaaggctatacccgcaagcaggttcgcctgctgtgcgaatggtatctgcgggtacgtaaatcatcctga

SEQ ID NO: 182876 - DNA, 747 bp, Klebsiella oxytoca
gtgactaaaatcaaacttctggcacttggtgtgttgattgcgacttcagcatccgccgtacacgctgaagggaagttcactttaggggcgggtgtaggcgtcgttgaacatccgtacaagcaatatgatgctgatgtttacccggtgccggtgattaattacgagagcgataacttctggttccgcggcctgggcggtggcctctacctgtggaatgataccaacgataagctctccgtgaccgcctactggtcgccgatgtactttaagccaggcgacagcgatagcgagcagatgcgccgtctggataaacgtaagtccacggtgatggcagggctttcctacgaacactatacgcagtacggtttcctgcgcaccgcgctgtcgggggacaccctcgataacagcaacggtatcgtgtgggatctggcctggctgtatcgctataccaacggcaacctgacgcttacgccgggtattggcgtggagtggaacagcgacaaccagaacgagtactactacggtgtttcgaagcatgaatcgaatcgcagcggcatgcgcagctacgatccggacagcagctggaacccgtacctcgagctgtcggctaactatcgtttcctcggcgactggagcgtatacggcgtggcgcgctatacccgcctgtctgacgaaattaccgatagcccgatggtggacaaatcctggagcgggctgatttcaaccgggatcacttactccttctga

SEQ ID NO: 182877 - DNA, 855 bp, Klebsiella oxytoca
atggcagaaaggaccatccgttttggcgagcattcagcggttccgctcatagggcaggggacctggttcatgggcgaaaacccggctctgcgcgcgcaggagtctgctgcactacgcgcgggcatcgatcttggcctgacggtgatcgatacggcggaaatgtacgccgacggcggcgccgaagaggttgtcggcgaggccattcgcgggcagcgcgagcgcgtagtgctggtgtctaaagtctatccgtggaatgctggcggtcgcaaaatagccagcgcctgcgaggagagcctgcgccgcctcaataccgactatctggatctctacctgctgcactggcgcggggactattcattgcaggagacggttgcgggcatggacgcgctcgttgcgcagggaaaaattcgccgctggggcgtatcaaacctcgattacgatgatatgcaggaactctggcaggcggacggcggcgaacagtgcgcgaccaatcaggtgctctaccatctggcctcccgcggtattgaacatgacctgctgccgtggtgccagcagcagcggctgccggtgatggcatattgtccgctggctcaggccggtcgactgcgcaatggacttttaaatcattccgttgtgaaaaatattgcgcaggagcggggcgtaaccgcggcgcagattctgctggcgtgggtgattagccaccggggcgtaatggcgatcccgaaagcgtcaagcattgagcatgtcaggcaaaatgccgcggtgctggatattgtgctgaacgatgaggagcttgcgcttctggataacgcctacccggcgccggccagaaaaacgccgctggatatggtctga

SEQ ID NO: 182878 - DNA, 885 bp, Klebsiella oxytoca
atgattaataaaatttttgccctcccggttatcgaacagcttacccctgtactttcccgccgccagcttgatgacctggagctgatcgtcgttgaccatccgcaggtgaaagcgtccgtggctttccagggcgctcacctgctctcctggaagcccgctggcgaagaagaagtcctgtggctcagcggcaacaccccatttaaaaacggcgttgccctgcgcggcggcgtgccgatttgctggccgtggtttggtccttctgctcagcagggtctgccctcccacggcttcgcccgcaacctgccgtgggccctgaaagggcacgatgaagacgacaacggcgtggtgctgacctttgcactgaaaagcagcgacgccacccgccagtactggccgcacgagttcaccctgctggcgcgctttaagctgggcaaaacctgcgaaattgagctggaagcgcacggcgaatttgaaaccacgtcagccctgcatacctatttcaacgtcggcgacattgcggcagtgaaggtcagcggtctgggcgaccgttatgttgataaagtgaaaaacgcggaagaaggcgtattaagcaacggcacagagacttttcccgatcgtaccgaccgcgtctatctgaatgccgaaacctgcagcgtgattcatgacgatgcgctgaaccgcaacatcgacgttacgcatcatcacaacagcaacgttgtggcctggaacccgggcccggcgctttccgtcagcatgggcgacatgccggatgatggttacaagaccttcgtttgtgtagaaacctgctgcgtgaccgaaacgcagaaggccagcgaagagaaaccttcgcgcctgacgcaaacccttcgcgtggtgaaacgctaa

SEQ ID NO: 182879 - DNA, 996 bp, Klebsiella oxytoca
atgactatcaaagtaggtatcaacggttttggccgtatcggtcgcattgttttccgtgctgctcaggaacgttctgacatcgagatcgttgcaatcaacgacctgttagacgctgactacatggcttacatgctgaagtatgactccactcacggccgtttcaacggtaccgttgaagtgaaagacggtcatctgatcgttaacggtaaaaaaatccgtgttaccgctgagcgtgacccggctaacctgaagtgggacgaagtgggtgttgacgttgttgctgaagcaaccggtatcttcctgaccgacgaaaccgctcgtaaacacatcaccgctggcgcgaaaaaagtcgtactgactggcccgtccaaagacaacactccgatgtttgttaaaggcgctaactttgacaaatacgaaggccaggacatcgtttccaacgcatcctgcaccaccaactgcctggctccgctggcaaaagttatcaacgacaacttcggcatcatcgaaggtctgatgactaccgttcacgcaaccaccgcgactcagaaaaccgttgatggcccgtctcacaaagactggcgcggcggccgcggcgcagctcagaacatcatcccgtcctctaccggcgctgctaaagctgtaggtaaagttctgccagaactgaatggcaaactgaccggtatggcgttccgcgttccgactccgaacgtatccgttgttgacctgaccgttcgtctggaaaaagctgcttcttatgaagaaattaagaaagcaatcaaagctgcttccgaaggcgcaatgaaaggcgttctgggctacaccgaagacgacgtggtatccaccgatttcaacggtgaaatctgcacttccgtattcgacgccaaagcgggtatcgctctgaacgacaactttgtgaaactggtttcctggtacgataacgaaactggttactccaacaaggttctggacctgattgctcacatctccaaataa

SEQ ID NO: 182880 - DNA, 414 bp, Klebsiella oxytoca
atgtcgaataaaccctcttcggacgagctcaaaaaaaatttgagcgagatgcagttttacgtgacgcagaatcacggtactgaaccgccgttcaccgggcggttgctccacaacaaacgcgatggcgtctaccactgcctggtgtgcgatgccgcgctgtttcactcgcaaaccaagtatgattccggctgcggctggccaagcttttatgagcccgtcagcgatgacgctatccgctaccttaatgattactcccacggtatgcagcgcacggaaattctctgcggaaactgcgatgctcaccttgggcacgtattcccggatggtccacagcctaccggagagcgtttttgtgttaattcggcctcattaagcttcaccaatgatgaaaacggtgagcaaattaagggttga

SEQ ID NO: 182881 - DNA, 276 bp, Klebsiella oxytoca
atggaaattgagcggattattgacggtatgacgccggaagtttatcagcgcctggcgacggcggttgagctgggtaaatggccggacggcgtggcgttgactgacgaacagaaagagaactgtctgcagctggtgatgctctggcaggcgcgatacaacgttgacgcgcagcatatgaccatcgataccaacgggcagatggtgatgaagagtaaacagcagctgaaagttgacttcggcattacgccgcagcctatcgcgacctttaaatcctga

SEQ ID NO: 182882 - DNA, 345 bp, Klebsiella oxytoca
atggcttatatcccgaaaaactacgcccgtctggaagtcggttaccgcgaaaaagcgctgaagctcttcccctgggtctgcggacgctgctcgcgagagtttgtctattcaaacctgcgtgaactgacggtacaccatattgaccacgaccactccaataacccggaagatggtagcaactgggagatgctgtgcctgtactgtcacgatcatgagcactcaaaatacaccgaagccgatctgtatggctcgacggtggttgctggcgaagatgcgcagaaaagcgtcggcgaagcgaaatataaccccttcgccgatcttaaagcgatgatgaacaagaagtaa

SEQ ID NO: 182883 - DNA, 1254 bp, Klebsiella oxytoca
atgaaacttttgcctttactggcagctttacccctgctctgcgcgagcgttgtttccgctaactcactgatgtctgtcggctactttaacggcggcggcgacgtcactgccggtccaggcggcgatattgataaactggacgtacgccagattacccatctcaactactcgtttggtctggtttacaacgatgaaaaagacgaaaccaacgccgccctgaaagatccgagcaagctgcatcaaatttggctgtcgccgaaagtgcaggctgatttacagaaaatccccagcttgcgccagcagaacccgaacctgaaagtcttgctttccgtaggcggctggggagcgcgcggattctccggcgcggcggcgacgaaggaaacccgggcggtgtttattcagtcggcgcaggcgattattgaaaaatacggtctcgatgggatcgatctggactgggagtatccggtcaacggcgcgtgggggctggtcgccagccaaccggccgatcgcgataattttaccgccctgctgaaagagctgcgcgcggcggtcggtaataaaaaactggtgaccatcgccgtaggcgccaacgcggagagcccaaaaagctgggtggacgtcaaagccattgcgccatcgctcgactacatcaacctgatgacctacgacctggcctacggtacccagtacttcaattccaacctgtatgattcaacccgctggccgacggtcgccgaagcggataagtacagcgcggactttatagtgaacaactaccttgccgccggtctaaaggcgagccagatgaacctggggattggtttctatggccggatacccaaacgcgccgtcgagccgggtattgactggagcaagccggacgcgcagaaaaacccggccacccgcccctactttgcggctcaacagattgaactgttcgaatcgctgggcgtcgatctgaccaaagatacctatgtgaaatataacgatatcgtggcgaagttaatcaacgatccgcagaagcgctttactcagcattgggatgatgaagcgaaggtaccgtggctgtcggtgcagtccgccgacggtcaagccctctttgcgctttcgtatgagaacccgcgctcggtggccatcaaagctgactacatcaagagcaaggggctgggtggcgcgatgttctgggagtacggcgccgatgaccagaatcagttagcgaaacagctggccgagtcattggggatcaaacgctga

SEQ ID NO: 182884 - DNA, 1077 bp, Klebsiella oxytoca
atgaaagcactggcaagatttggtaaggcctttggcggctataagatgattgatgttccggagccggcgtgcggaccggatgacgtggtgattgaaatcaaagccgccgccatctgcggcgcggatatgaaacactacaacgtggacagcggctccgatgaatttaactccattcgcggtcacgaatttgccggtgcaattgtccgggttggcgaaaaggtcaaggactggaaagtcggccagcgggtggtttctgacaacagcgggcacgtctgcggcgtgtgtccggcctgcgagcagggtgattttctgtgttgtacagaaaaagtgaatttaggcctggacaacaatacctggggcggcggattttcgaaatactgcctggtgccgggggagatcctcaaaattcatcgccacgcgctgtgggaaatcccgccgggcgttgattacgaagaagctgcggtgctggatcctatctgtaatgcctataaatcgctcgcccaacaatccaggtttcttcccggtcaggacgtggtggttttcggtaccggtcctttagggctatttgccgtacagatggcgcgcattatgggggccgttaatatcgtgatggtcggtctggaagaggacgtcgcggtgcgtttccctgttgccaaagcgctcggggcaacggcggtcgtcaacggttcatccgaagatgtggtcgcccgctgccaggcaatctgcggcaaagataatctggggctggttatcgaatgttccggcgccaatatcgctctcaaacaatccatcgaaatgctgcgccccaacggtgaagtggtgcgcgtgggtatgggcttcaaaccgctggacttctccatcaacgatatcaccgcgtggaacaaaagcatcatcgggcatatggcctatgactctacgtcctggcgcaacgccattcgcctgctcgccagcggcgctatcaaagtcaaaccaatgatcacgcaccgcattggcctgtcgcaatggcgcgaagggtttgacgccatggtcgataaaaccgccatcaaagtcatcatgacttacgactttgatgaataa

SEQ ID NO: 182885 - DNA, 1380 bp, Klebsiella oxytoca
atggaacagatagcaaaaccgcactgcggcgccaggctggatcgcctgcctgactgccgctggcactcttcaatgtttgccatggtcgctttcggattactggtctgctggagtaatgccgttggtggattaattctcgcgcagttaaaagagctcggctggaccgacaattcgactaccgccacgttctccgccattaccacggcaggtatgtttctcggcgcgctcggcggcggcatcatcggcgataaaattgggcgtaaaaacgcgtttattttgtatgaagcgattcatattatcgccatggtcattggggcgttttccccgaatatgagcttccttattgcctgtcgttttgtcatgggcgtgggattaggcgcgctgctggtaaccttatttgccggtttcaccgaatatatgcccggcagaaatcgcggaacctggtccagtcgggtctcgtttatcggtaactggtcttatccgctctgttcgctaatcgcgatggcattaacgccgctaattagcgcggaatggaactggcgcgtgcagctgttgatcccggccgcgttgtcgctgatagctaccgtgattgcctggcgcagtttccctgaatccccccgctggctggagtcgcgcgggcgctatgcggaagctgaggagataatgcgggccattgaagggcgggtggctcggcagacgggcaagccgctgccgccggtagttatcgatgatgacggcaaaccgccgcgcgccgttccttattcggccttattaacgggcggattgctgaaacgggttattttaggctccttcgtgctgatagccatgaacgtcgtccagtacaccttaattaactggctaccgacgatatttatgacccagggtattaatctgaaagactcaattgtcttaaataccatgagtatgttcggcgcgccgttcggaatttttatcgccatgctggtgatggataaaattcccagaaagacgatgggtgtaggcctattagtgttaattgccgcgctgggatatatctattcgctgcaaaccagcatgctgctgattacgttaattggcttcttcctgattacgtttgtctatatgtacgtctgttacgcctcggtggtttatgttccggaaatatggccgactgaagcgaagcttcgcgggtcgggtctcgcgaacgcggtggggcgaatcagcggtatcgccgcgccttatgcggtggcggtactgcttaacggctatggcgtaactggtgtgtttgtgctgctgggggccgtctctattattgtcgctatcgctattgcaaccatcggaattgaaaccaaaggcgtctctgtcgaaagtctcggtattgatgcagttaccagcaaataa

SEQ ID NO: 182886 - DNA, 1044 bp, Klebsiella oxytoca
atgaaaaattcaaaagcgatattaaaaacaccgggcacgatgaaaattatcgctgccgatatcccggtacccaaagaacatgaagtgctgatcaaaattgaatacgtcggaatttgcggttcagatgtccacggttttgagtcggggccctttattccgccgaaagaccctaatcaggaaattggtctgggacacgaatgcgccggtacggtggtggccgtaggcaagcgcgtaagcaaatttaagccgggcgaccgggtgaatattgaacccggcgtgccgtgcggccactgccgctactgcctggaaggaaaatacaatatctgtcccgacgtcgactttatggccacgcagccaaattatcgcggcgcgctaacccactatttatgccatccggagagcttcacttacaaactgcccgataacatggacacccttgaaggcgctttggtggagcctgcggcggttggcatgcatgccgcaatgctggcgaacgtcaagccgggcaagaaaatcgtcatacttggcgcaggctgtattggcttaatgaccctgcaggcatgcctttgcctgggggcaaccgacatcgcggtggttgatgtgctggaaaaacgccttgccatggccgaacagctcggagccaaagtcgttatcaacggcgcgaaagaggacaccgttgggcgctgccagcagttctccggcgatatgggggccgaagttgtttttgaaacggccgggtcggccatcaccgttaagcaggctccttacctggtgatgcgcggaggaaaaatcatgatcgtcggtacggttcccggtgattcagccatcaatttcctcaaaattaaccgtgaggtctcgattcagaccgtcttccgctatgccaaccgctatccggtcaccatagaagcgatctcctccgggcgtttcgatgtgaaatcgatggtgacgcatatttatgattttgaggatgttcagcgcgcgtttgatgaatccgttaataacaaacgcgagattattaaaggcgttattaaagttaaccattaa

SEQ ID NO: 182887 - DNA, 846 bp, Klebsiella oxytoca
atgctggcagatattaaatattgggaaagcgatgcccagaataaacattatgcgattgcccactttaacgtgtggaatgcggaaatgttgatgggagttattgatgcagcggaagaggctaagtcgccggtgattatctctttcggtaccggatttgtgggcaatacctcgtttgaagatttttcgcatatgatggtttcgatggccaaaaaggcgtcggttccggtgattgctcactgggaccacgggcgcagcatggagataatccacaacgcctgggtccacggcatgaattcgctgatgcgcgacgcttcagcctttgattttgaagagaacattcgcctgaccaaagaggcggtggatttcttccatccgctgggtattccggttgaggcggagctggggcatgtggggaatgaaacggtctacgaagaagcgctggcggactatcactataccgacccggatcaggcggcggagttcgtcgagcgtaccggctgcgattcgctggcggtggcgattggcaaccagcacggcgtctatacctcagaaccgaaattgaattttgatgtagtgaaacgcgtgcgcgaggcggtatccgttccgctggtgctgcacggcgcatccggcattagcgacgcggatattaagcaggccatttcgttaggtatttcgaagattaacatccataccgaactgtgccaggcggcgatggcggcgatggcggcggtacaggagaaccacaatcagccgttcctgcacgtagaacgtgaagttcgcaaagcggtgaaagcgcgcgcgctggagaaaatcagactgtttggttctgacgggaaagcggaatga

SEQ ID NO: 182888 - DNA, 948 bp, Klebsiella oxytoca
atggataatatcgaggttatttgtctgggcgcggctatcgtagatattcctctgcagccggtgagtaaaaatatctttgatgtcgactcttatccgttagaacgcatcgccatgaccaccgggggagatgccattaatgaggccactattatttcccgactcggtcaccgaacagcattaattagccggatagggaacgacgcagcaggacattttattcttgaacactgccgccgggagaatattgatatccatagcctgaagcaggatagcgaaatcgatacctcaatcaacgtgggcttagtcaccgccgatggcgagcgtacttttgtgactaaccgcaacgggagcctgtggaagctgaatattaacgatgttgattttgaccgcttctctcaggcaacgctgctgtcgctggcgagcttttttaatagcccgctgctcgacggcaaagcgttaacggagatcttcattcaggccaaagcgcatgggttaattatttgcgccgatatgattaagccgcggcttaacgaaacccttgaggatattcgtgaggcgctgagctacgtcgattatctgtttcccaattttgccgaggcaaaactgctcaccggcaaagagacgctggatgagattgccgactgtttcctgagctgcggcgtaaaaacggtcgtcatcaagaccggtaagagaggctgctttattaagcgtgccgatatgaaaatggcggttccggcggtttctggcattaccgccatcgacaccattggcgcgggggacaattttgcctcgggatttatctccgcgctgctggaaggcaagccgctgcgcgactgcgcgctgtttgctaacgcaacggccgcgatctcggtgcttagcgtaggcgccaccacgggcgtgaagaacagaaagctggttgaacaacttctcgacgaatacgaagggtaa

SEQ ID NO: 182889 - DNA, 954 bp, Klebsiella oxytoca
atgacgctttcccgcatgggattaggcacatgggccattggcggcggcccggcatggaacggcgatctcgacctgcagatatgtatcgataccattgttgaggcgcatcgctgtgggatcaatctgattgataccgcgccgggctacaacttcggcaacagcgaagtgattgtcggccaggcgcttaaacagctgccgcgccgtgaagtcgtcgtcgaaaccaaatgcggtatcgtctgggagcggacgggtagcctgtttaacaaggtcggcgatcgccagctgtacaaaaacctgacgcccgagtcgattcgcgaagaggtggaggccagcctgcaaaggcttggtatcgacaccattgatatctatatgacccactggcagtcggtggagccctgctttacgccaattgcggagaccgtcgccacgctgaacgcgctaaagaaagagggcaagattcgcgccatcggcgcggcgaacgtcgatgtcgggcatatcagggagtacctcaaacacggcgagctggatatcgtgcaggccaagtacagcattcttgaccgggcgctggaagccgagctgctgccgctctgtcagcagaacggtattgtggtgcaggtctactcgccgcttgaacaggggctactgaccggcactatcggccgcgattatgttcccggcggcgcgcgcgctaataaggtctggttccagcgggaaaatatgctgcgcgtgattgatatgcttgagcagtggcagccgctgtgcgaaaaataccgctgcaccatccccgcgctggcgctggcgtggattttaaagcaaagcgatttaatcaccttactcagcggcgccactgcgcccgaacaggtgcgtgagaatattgccgcgctgaccatcgctctgacggatgatgattcattattgatgagacgaatggcggaagcggtggagacaaaataa

SEQ ID NO: 182890 - DNA, 759 bp, Klebsiella oxytoca
gtggcggcaaaagacaggattcaggccattaagcaaatggtgactaacgataagaaagtggcggtttctaatttaagcgcaatttttcaggtcactgaggaaaccatacgccgcgatctggaaaagctcgaagatgaaggttttttgacccgaacgtacggcggtgcggtattaaataccagtgctttatccgacaatattcatttttataaacgggcaaagtctcattttgaagagaagcaaattattgcccgtaatgccttgccgtttattaaaaataaaaccaccatggctgccgattccagcagtacggcgatggagttattaaagctgctaaaggagagaaacgatctcacgctgttaaccaactcggcggaagcatttcatgagctggcgcagtcggaaataaatgttgtttcgaccggcggagaactgaataagaacacgctgtcgctgcaggggcggatcaccaaggaaattatcagtcgttatcatgtagatattatgataatgagctgcaaaggcctcgatatgcagagcggggcgcttgactctaacgaagcggaagcggaaatcaagaaaaccatgattcgccaggcagccgaagtagctctgctggtcgatcactccaaattcgatcgtaaagcgttcgtcaagctggtggattttagccatattaattacctgatcactaataaggcgccgggtgcacagtggattgcattctgtaaagaaaataatattcaactggtttattaa

SEQ ID NO: 182891 - DNA, 1359 bp, Klebsiella oxytoca
atggaacaatgtgaccctatcggcgcaagattagaccgcttacccttgtcgcgatttcattttcgtatttttggcattattagttttagtttattaatcaccggttttctcagctattccggtaacgtggtgctggcaaaattagtcagcaacggctggtcaaataattatctcaatgcggcatttacctcggcgctgatgtttggctactttatcggctcgctgaccggtggttttatgggggactatctcggacggcgcaaagcttttcgcgtcaatttactgatcgtcgggatctctgcctgtgcggcaacctttgtgcccaatatgtactggcttatcttattccgctgtctgatgggctgcgggatgggcgcgctgattatggtgggctatgcctcatttaccgaatttataccgcccgcggtgcgtggcaaatggtccgcccgactgtcgtttgtcggcaactggtcgcccatgctgtcggcggccatcggcgttgtagtgatcgcttttttaagctggcggatgatgtttctgctcggcggtgcggctatgctgttggcctggtatctgtcggggatgtattttattgaatccccacgctggctggccggcaagggacaacgacatgcggctgaagaacacctccggcaggtggagtcgcaaatcgagaaagagaaaaacatcacattaccgtcctggcagagtactgccccggttgcggagccgtgcgcggaaagcggctctttctggctgctgtttaaaggtcagatgctgcggcgaacgctggtggcgatcgcggtactgatcgccatgaacatttcgctctataccatcacggtgtggatcccaacgattttcgtcaattcggggatcgacgtgacgaaatctatcttgatgaccgcgataatgatggttggggcgccggtggggatatttatcgccgcgctgattatcgaccgttttccgcggcgattatttggctcatttctactgataattattgcggtactcggctacgtctattcgattcaaaccgcagagtgggccatcttaagctatggtctggtgatgatatttttcctgtacatgtacgtctgctttgcttcagcggtatatgtgccggagctgtggccaacgcatctccgtctgcgcggttcaggttttgttaacgcggtaggcagaattgtcgccgtatttaccccttacggcgtcgctatcctgctgacccgctacggcgcgattaccgtatttatggttcttggtttattgctggcgctttgcgcgctgattctgttttgttttggcatcgaaacgcgcaacgcgtcgctggaagagatttccgctctggcctga

SEQ ID NO: 182892 - DNA, 642 bp, Klebsiella oxytoca
atgacccagcgcgcgctgctactggtcgatttacaaaatgatttctgcgccggcggcgcgctagccgtcccgcagggcgacagcacggtggacgtcgccaaccagcttatcgcctggagcacggtgcggggcgaaacggtggttgccagccaggactggcacccggcgaaccacggcagctttgccagtcagcatcaggtcgaaccctatacccagggcgagcttgatggcctggcgcagacgttctggccggatcactgcgtgcagaatagcgaaggcgcgtcgctgcatccgctgctcaaacagcaggctattgccgccgtgttccacaaaggggaaaatccggccattgacagctacagcgcctttttcgacaacggccaccggcagaaaacgcagctcgatgcatggctgcgcgagcgcggcatcagcgagctaacggtgctgggtctcgccaccgactactgcgtcaagtttaccgtgcttgacgccctcaatctgggctacaccgtcaacgtgattaccgacggctgccgcggggtgaatattcagccacaggatagcaatctggcgtttatggagatggccgccgcgggcgcaactctctatacccttgacgactggctggaaacccacgcataa

SEQ ID NO: 182893 - DNA, 1017 bp, Klebsiella oxytoca
atgcagaagaaatctatttacgttgcctataccggcggcaccattggtatgcagcgttctgaacacggctatatccccgtttccggccatttacagcgccagctggcgttgatgcccgagtttcaccgcccggagatgccggacttcaccattcatgaatacgccccgttaatggactcttccgatatgacgccggaagactggcagcatatcgccgacgatattcgcgaccattatgaccagtacgatggtttcgtgatcctccacggcacggacaccatggcgtttaccgcctctgcgctctccttcatgctggagaatctgggaaaaccggtcattgtgacagggtcacaaatcccgcttgccgaactgcgctctgatggccagattaacctgctcaacgcgctgtacgtcgccgccaactatccgattaacgaagtgtcgctgttcttcaataatcgcctctaccgcggcaaccgcacgacgaaggcccatgccgacggctttaacgccttcgcctcgcccaacctggcgccgctgctggaagccggtatccatattcgccggctcggcacgcctcccgcgccgcacggcagcggcgagctggtggtgcaccctatcacgccgcagccgattggcgtggtgacgatttatcccggcatttccgccgacgtggtgcgcaacttcctgcgccagccggtcaaagcgctgatcctgcgctcctatggcgtcggtaacgcgccgcagaacggcgagtttattcaggtcctggccgaagccagccagcgcggtatcgtggtgattaatttgacccagtgtatgtccggcaaggtcaacatgggcggctacgccaccggcaacgcgctggcgcaggctggcgtgattagcggatttgatatgaccgtcgaggccacgctgaccaagctacactatttgctgagccaggatctggacgtggcggctatccgtcacgccatgcaggagaatctgcgcggcgaactgacacccgatgagtaa

SEQ ID NO: 182894 - DNA, 1854 bp, Klebsiella oxytoca
atgcgaactctttggcgactgctcgccggattttttaaatggacatggcgcgtgctcaatttcattcgccagctcgcactgaacgtggttttcctggtgctggtgctggcctgcgtcggcatctgggcccagttcagcagtacaacgacagagcacgctacccgcggcgcgctgctgctggatatcaccggcgtggtggtcgataaaccctcggccagcagcaagcttggcgtgattggccgccagctgtttggcgccagttccgatcgcctgcaggaaaactcgctgttcgacattgtgcagacaattcgccaggcgaaagacgaccgcaatatcaccggtatcgtgctggatctgaaggactttgccggcggcgatcagccgtcgatgcagtatatcggtaaagcgctgcgcgaattccgcgatagcggcaagccggtatatgccatcggcagcagctacagccagggtcagtactatctggccagcttcgccaataagatctggctctcgccgcagggcgaagtggacctgcacggcttcgcgaccaacggcctgtactacaaatcgctgctcgacaagctcaaagtgtcgacccacgttttccgcgtcggcacctataagtcagcggtagagccgtttatccgcgatgatatgtccccggcggcgcgcgaggcggacagccgctggattggcgagctgtggcaaaactatctcaataccattgccgccaaccgccagatcaccgctcagcagctgttccccggcgctcagggcgtgattgacggcctgcgtaaagtcgatggcgacacggcaaaatacgcgctggataacaagctggttgatgcgctgggcacctctaccgaggtggaaaaagcgctgactaaacagtttggctggagtaaggaggacaacaactacagcgcaatcagctactacgattacacgctgaaaacgcctgccgaccagggttccgcaatagcggttatctttgctaacggcgcgattatggatggcgaagaaacgccgggtaacgtcggcggcgacaccaccgccgcgcagatccgcgacgcgcgcctcgatccgaaagtgaaagcgatcgtgctgcgggttaacagcccgggcggcagcgtcagcgcctccgagatgattcgcgaagagctggcggcggcaaaagcggccggtaaaccggtggtggtctcaatgggcggcatggcagcctccggcggctactggatctccaccccggcggattatatcgtcgccaaccccagcacccttaccggctctatcggtatctttggggtgatcaataccgtcgaagataccctcggctcaattggcgtccataccgacggcgtggccacctcgccgctggctgatgtctcaaccaccaaagcgctgcctccggaagtgcaacagctgatgcagctcagcatcgaaaacggctacaagcgttttatcaccctggtggcgaacgcgcgtaagagcacgccggagaaaattgaccaaatcgctcagggccacgtctggaccggtgaagatgcaaaagcgaacggcctggtcgatagccttggcgactttgacgacgcggtggcaaaagccgccgagctggcgaagctgaaacagtggcatatcaactactatcaggaagaaccgaccttcttttcgatggtggtggatagcctgacgggttccgttcgcgcggcgctgccggcagcggtccaggcgtatctgcccgcaccggtcgccgcggcggccaatgcggtgaaaaccgagagcgataagctggcggcattcaacgatccgcaaaaccgctacgcgttctgcttaacctgcgccaatattcgttaa

SEQ ID NO: 182895 - DNA, 552 bp, Klebsiella oxytoca
atggatgctctcgaactactggttaatcgccgcagcgcttcacgtctgaccgacccggctccggcgggcgaacagctggaaaacatccttcgcgctggcctgcgcgcgccggaccacgggacgctgcagccgtggcgcttcttcattattgccgatgaagggcgcgagcgcttcagccagctgctggaaaaaggcgcggtggcggcagggggagatgaaaaagcgattgaaaaagcgcgcagcgcgccgtttcgcgcgccgctgatcattgcggtggtggcgcactgtgaagatcatccgaaggtgccaaagtgggagcaagagatgtcggcgggctgtgcggtgatggccatgcagatggcggccgtggcgcaggggtttaacggcatctggcgcagcggcgcgttaaccgaaagcccggttgtacgcgaagggtttgcctgccgcgagcaggataagatcgtgggctttctctatctggggaccccgcagctcaaagcgtcaaccaccatcgctttgccggataccgcgccgttcgtgacgcgcttctga

SEQ ID NO: 182896 - DNA, 747 bp, Klebsiella oxytoca
atgaaaaagcgtgttctcgccgtttgcctggccagtctcttctcccttaacgctttcgccctggttcccgccggtaacgacgtcaccacaaaacccgatctctactacctgaccaacgcccaggccatcgacagcctgacgctgctgccgccgccgccggaagtgggcagtatcgcgtttttaaacgatcaggcgatgtatgagaaaggccgtctgctgcgcggcaccgagcgcggtaagctggcggttgaagacgccaacctgagcggcggcggcgtcgccaacgccttctccggcgccttcggctcgcccattaccgccaaagatgcgccggagctgcacaagctgctcaccaacatgattgaagatgccggcgacctggcgacgcgaggagcgaaggagaagtacatgcgcattcgcccatttgcgttttatggcgtcgccacctgtaacaccaaggaacaggatacgctgtcgaaaaacggctcctacccctccggccacacctctatcggctgggccaccgcgctggtgctggctgagattaatccccagcggcaaaatgaaatccttaagcgcggctttgagctcggagagagccgggtgatctgcggctatcactggcagagcgacgtagacgcggcgcgtatcgtcggttcggcggtcgtcgccacgctgcataccaatccggccttccagcagcagcttcagaaagcgaaagacgaattcgcgaaacgacagaagtaa

SEQ ID NO: 182897 - DNA, 1044 bp, Klebsiella oxytoca
atgagcgagcaagccattcgtttaacgcaatacagccacggagccggttgcgggtgtaaaatttcccctaaggtgctggaaactatcctgcaaagcgaccaggccaaatttatcgacccgaatctactggtgggcaacgaaaccagcgatgatgccgcggtctacgatctcggtaacggcacgtcgatcgtcagtactaccgatttttttatgccgatcgtcgacaacccgttcgactttgggcgcattgcggcgaccaacgccatcagcgatattttcgccatgggcggtaagccgattatggccatcgctattctcggctggcccatcaataccctggcgccggaaattgcccgtcaggtggttgagggcgggcgctttgcctgccagcaggcggggatcgcgcttgctggcggccattccattgacgctccggaacccattttcgggcttgccgtgaccggcgtcgtcccgaccgagcgggtgaagaaaaacagcaccgcgcaggccggctgcaagctgtatctcactaaaccgctgggtattggcgtgctgaccaccgcggagaaaaagtcgctgctgaagcctgagcaccaggggctggcgacggaaaccatgtgtcagatgaatctcgttggctcggcgtttgctaacattgacggcgtgaaggcgatgaccgacgtcaccggcttcgggcttctgggccacctgagcgaagtgtgccgcggcgcgggcgtacaggcgcagcttacctatgcggatatcccgaaattgcccggcgtcgaagcctacatcgcggcgggcgcggtgccgggcggtaccgggcgtaactttgccagctacggccatttgatgggcgacatgccgccagcgtggcgcgatctgctgtgcgatccgcaaacctccggcggtctgctgctggcggtaacgccggaagccgaggctgaggtgcaggctgccgccgctgagtttggtatcacgcttaccgctatcggcgagctggttaccgcccgcggcggacgcccaatgatcgagatccgttga

SEQ ID NO: 182898 - DNA, 1956 bp, Klebsiella oxytoca
atgcggctgtttattgcagaaaaaccgagtctcggtcgcgccatcgccgatgtgctgccaaaaccgcatcgcaaaggcgacggctacattgagtgcggtaacgggcaggtggtcacgtggtgcatcggccacctgctggagcaggcccagcccgacgtctacgatgcgcgctatgcgcgctggaacctgctcgacttgcctatcgtgccggaaaagtggcagctccagcctaaaccgtcggtgaccaaacagcttaacgtgattaagcgtctgctcggcgatgcgcaggaagtcattcatgcgggtgacccggacagagaggggcaactgctggtggatgaggtacttgactacctgcagctggcgccggaaaagcgtcagcaggtgcagcgctgtctgattaacgatcttaacccgcaggcggtggagcgggcgattaaccgcctgcgcgccaacagcgaatttgttccgctgtgcgtctccgcgctggcccgcgcccgcgccgactggctatacgggatcaatatgacccgcgcatacaccatccttggccgtaacgcgggttaccagggggtactctcggtcgggcgcgtgcaaacgccggtgcttggcctggtggtacgccgcgatgaagagattgaaaacttcgtcgctaaagacttcttcgacgtcaaggcgcatatcgttacccccaaggatgagcgttttgtcgccacctgggtgcccagcgaggcctgcgaaccgtaccaggatgaagaggggcgactgctgcatcgctcgcttgccgagcacgtcgtcaagcgcattgaggggcagccggcgacggtcaccgcttataacgataagcgggactctgagccagcgccgctgccgttctccctctcggcgctgcagattgaagccgcgaagcgcttcggctttagcgcgcagaacgtgctggatatctgccagaagctgtacgaaacccataagctgattacctatccgcgttcggatagccgctacctgccggaggagcattttgccgggcgccatgcggtgctgaacgcgatcggcgtgcacgcggcagatctgctgccgcagccggtggtggatccggagatccgtaaccgctgctgggacgataaaaaggtcgatgcccaccacgcgattattccgaccgcccgcagttcgcaggttaaactcagcgacaacgaagaaaaggtttacggcctgattgcccgccagtatctgatgcagttctgcccggatgcggtgttccgcaaatgccagatcgatcttgatatcgccaacggcaagttcgttgccaaagcgcgttttctggcggaagcgggctggcgaaccctgctgggcaataaagagcgcgatgaagagaacgacggcatgccgctgccggtggtggcaaaggatgacgagctgctgtgcgaaaaaggcgaagtggtggagcgtcagacccagccgccgcgtcattttaccgatgcgacgctgctatcggcgatgaccggtattgcccgctttgtgcaggataaagacctgaagaagatcctgcgcgcaacggacggcctcggtacggaggcaacccgcgccgggattatcgaactgttgttcaaacgcggcttcttaaccaagaaagggcgctatatccactccaccgacgccggaaaggcgctgttccactctctgcctgaaatggcgacgcgtccggatatgaccgcccactgggaatcgattctgacgcaaatcagcgagaaacagtgccgctatcaggactttatgcagccgctggtcggtaccctgttccagcttatcgaccaggccaggagcacgccggtacgccgcttccgcggaattgtggccccgggcgacggcaagaagagctttagcaaggggaaaggcagagccaaagcgaaagataaaaaaagcgccgccggccctgcggcggaaagtccgcaataa

SEQ ID NO: 182899 - DNA, 1344 bp, Klebsiella oxytoca
atggatcagacgtgcactctggaaggttttctcgcccgcgttcaacagcgcgatccaaatcaaactgaatttgctcaggcggtccgcgaggtgatgaccaccctgtggccattccttgaggaaaatccgcgctatcgtcagatgaatttgctggaacgtctggttgaaccggagcgtgctatccagttccgcgtcgtttgggttgatgaccgcaatcaggttcaggttaaccgcgcctggcgcgtgcagttcaactccgccatcggcccgtataagggcggtatgcgtttccatccctctgtaaacctgtcgattctgaaattcctcggctttgaacaaaccttcaaaaacgccctcaccaccctgcctatgggcggcggtaaaggcggcagcgacttcgatcctaaaggaaaaagcgatggcgaagtgatgcgtttctgccagtcgctgatgactgagctgtatcgccacctcggtccggataccgacgtgccggccggtgatatcggcgtgggcggtcgtgaagtgggctttatggccggaatgatgcgtaagctctccaacaacagcgcctgcgtcttcaccggtaaaggcctctccttcggcggcagcctgattcgtccggaagccaccggttacggattgatttacttcaccgaagcgatgcttaagcgccacggtttgggctttgaaggggctcgcgtcgcggtgtccgggtcgggcaacgtggcgcagtacgcgattgagaaagccatggagctcggcgcccgggtgattacggcttccgactccaacggtaccgtggttgacgaatctggcttcaccaaagaaaaactggcgcgcctgatcgacattaaagagcgctgccacggccgcgtggcggattacgcgcgcgagttcggcctgacctaccttgaaggtaagcagccgtggtccgtgccggtggatatcgctctgccgtgcgccacgcagaacgagctggacgtcgacgctgcccgccagctgattgccaacggcgtgaaggccgtcgcggaaggcgccaacatgccaaccactatcgcggcgaccgatctgttcctcgaagcgggcgtgctgttcgcgccgggtaaagcggccaacgccggcggcgtcgccacttcaggactggaaatggcgcagaacgccgcgcgtatgggctggaaagcggagaaagtggatgcccgtctgcaccatatcatgctggatatccaccacgcctgcgttgagtacggcggtgaagcgaagcagaccaactacgtacgcggcgcgaatatcgccggtttcgtgaaggttgccgacgctatgctggcgcagggtgttatttaa

SEQ ID NO: 182900 - DNA, 420 bp, Klebsiella oxytoca
atgattcacatgctaaaaacccttgatgttgttgccgccattatcgaacgcaacgggcaaattctgctggcgcagcggccgccccacgcggatcagccgggaatgtgggaactggccggcggtaaagtcgaacccggcgaaacccaggcccaggcgctggcgcgcgagctccaggaggagctggcgatcgacgcccggccggaatgctacatcgccagccaccagcgcgaagtgtccgctcgcctgatacatcttcacgcctggtgggttccgcattttaacggcgaacccatcgcccgctaccacagccagctgcgctggtgttcaccgcaggaggcgttaaccttccctcttgcgccagccgatattcccctgctcgaagcctttatcgcccagcgcgccgctctccattcccgctaa

SEQ ID NO: 182901 - DNA, 618 bp, Klebsiella oxytoca
gtgcttgaccgtcatttgcatccccgcctgaaacctgtcctcaacgccgccgccgccctgctggatcgtccggctatctctcccgatggcctgacgctctttggctttgcgattggcgtgctggcgctgccgtttttagccctgggctggtatccggcggcgctggcggcgatcgtgctcaatcgcctgctggatggcctggacggcgcgctggcccggcgacgcggattaaccgatgcgggcggttttctcgatatttcgctcgatttcctgttttacgccctggtgccgtttggctttattcttgccgatccggcgcacaacgcgctggcgggcggctggctgctgttcgcgtttatcggtaccggcagcagctttctcgcctttgccgcgctggcggctaagcatcaaatcgataatccgggctacgcccacaaatcgttttattatctcggcgggctgacggaagggacggaaactatcgcgctatttgtgctgagctgcctgtttccggcgtggtttgcgtggctggcgtggatgtttggcgcactgtgctggctgacgacctttacgcgggtgtggagcggataccttaccctgaagcaggtaagagattga

SEQ ID NO: 182902 - DNA, 1308 bp, Klebsiella oxytoca
atgaaacgtgtttctcaattgaccgcactcgccctgctgatggggcttgctgctgcttccacctccgccgctgacaccatgccaacgctaacgctttccacgctgcaacagcacaacggcgtcgctattgacacgcgccttagcgctttctataacggttggccgcaaggcgccgacggccctcagggccatgaaccgcaggcgctcaacctcgccgccagctggcttggctcgctgaacgatgaacagctgagcgcctgggctaagctgcacaatctgcaggcctctacgccgattgcgctgtacggcaacgccgacgacaacgcgaaagtcgcggcgcgccttaaggcggctggtttcactcacctcagctcgctcggcgacgccctgagccaggcggaccgcctgcagaagctgccgcattttgaacagctggtgtatccgcagtggctgcacgacctccagcagggtaaaccggtcaccgccgcgcctgccgggcactggaaggtgttcgaggccgcctggggcgcgccgaagttttatctgctgagccatattccgggcgccgggtatatcgataccaacgaggtggagagcgagccgctatggaacaaagtctccgacgcgcagcttaaagcgatgctggcaaaacacggtattcgccatgacaccacggtgattttgtacggtcgcgacgtgtacgccgccgcccgcgtggcgcagatcatgctctacgccggggtgaaggatgtgcgcctgctcgacggcggctggaaaacctggtccgacgccgggctgccggtcgagcgcggaacgccgccgaagcagaagcccgagccggagttcggcgcgccgatcccgggtcagccgcagctgatgctcaataccgagcaggctcgcgccctgctgcaccgtcaggacgcctcgctggtgagcattcgttcctggccggagtttatcggcaccaccagcggctacagctatatcaagccgatgggggagattgccggggcccgctggggccatgccggaagcgactccacccatatggaggatttccataatccggacggcaccatgcgtagcgcagatgatatcgccgcgatgtggaaatcatggaatattctgccgaaccagcaggtctctttttactgcggtaccggctggcgcgcctcagaaacctttatgtacgcccgggcgatgggctggaacaacgtctcggtctacgacggcggctggtacgagtggagcagcaacccgaaaaacccggtctcgcgcggggaacgcggcccggaaagcagtatgtaa

SEQ ID NO: 182903 - DNA, 633 bp, Klebsiella oxytoca
atgttgatcgtcaaaaacctgactctcagcctcaacggagagccgctgctgcgcaacgtcgacttttccgttgctcccggcgagatactgaccctgatgggcccctcgggcagcggtaaatcaactctgttcgcctggatggtcggcgcgctggcggagaattttcgcgccgccggcgagctgtggctggataaccagcgctgcgacagtttacccaccgagcgacggcgcatcggcatcctgttccaggacgcgctgctgttcgaccacttcagcgtcgggcaaaatttactgctggcgcttgccgctgacgtccgcggcccccagcgcaaagcccaggtcgaacaggcgctggagcgcgccggtctggcggggttttatacgcgcgatccggccaccctttccggcggccagcgggcgcgggtcagcctgctgcgcgccctgctggcccgaccgcgggcgctgctgctggatgagccgtttaaccgcctcgacgttgcgctgcgcgccgattttcgccgctgggtgttcaacgaactggcgcggcaggcgatccccgcggtgctggtcacgcatgatgaccaggatacgcccgccggcggacgctgtttgcatatggggctctggcaatga

SEQ ID NO: 182904 - DNA, 1536 bp, Klebsiella oxytoca
atggctgcgccgctacggcacgcactaaggctgctggcctgggccgccgtcgcgctgatctatctgccgctgctgccggccgctgcgctgatggcgcttccggcgctccgccgcgcgcgctggctgtcgctgtttgccgacccgcaattcagccaggcgctggcggcgactctcgtctcaaccctgctatcggttggcggcgcgctgatcatcacgctcaccgtcgtggccgcactctggccgtcgggcggctggcggcggctggccgcaaggctccctctgctgctggcggtacctcacgtggccttcgccaccgcagccctgctgctcttcgccgatggcggctggctcccgcgcctgttgcccttttttaccccgccggttgaccgctacggcattggactgggcctgacgatggcgctcaaagagagcgcgtttctgctgtgggtggtttatggcctgttaggcgagaaacgcctggccggacaggcgacggtattaaaaagcctcggctacggacgctggcagtgcctgaaatggttagtcttgcccacgctgcttccggcgctgtcgatagcgctgctggccaccgccgcctggagcctttcggcggtcgacgtcgcgctggtgattggcccgggtaacccgccgacgctggcggtgctggcctggcaatggttaagccagggcgatgagatccagcaggcgaaaggcgccctcgccagcctggtactgctgctgacgctcgccatcatggcgctggcggcgtggggagtctggcgtctctggcgacggcggatcccgcaggttcaggggatccgccgcccgcagccgcgggcgctcgccgggaaaagcttcgcccttcttctgccgctgtgcggcgtggcctgcgccctgctgcttgccgcggcggcgcagaatagccagccggtcagcgatagcgtcagcaacagcctgtggcttggactctgctcagcgtcgctcggcgcggttatctgcctgctgtggctggcgtctggcccttcccgtttcgacggatggatctggctgccgctgattttaccggcgctgccgctggtagacggccaatatcagctggcgctgtatacgtggctggacggcgagtgggtcgccgttttatgggggcacctgctgtgggtcgtgccgtggatgctgtttattctgcgtcccgcctggcgcgctcgcgacccgcgcatggagctgctcgcccgcactctcggctggcaacgaggccgcatcttctggctggttaccttacccgccctgacgcgtcctctgctgaccgcgctggcggtgggcttttcggtaagcatcgcgcaatatctgccgacgttatggctggggggcggacggttcccgacgctcaccagcgaagccgtcgcgctgagcagcggcggcgagacgtccactctggccgcgcaggcgctatggcagctactgctgccggcgctgttttttgccgccaccgcgctgctggcctggctgaccggccgctatcgacaaggattacgctaa

SEQ ID NO: 182905 - DNA, 1161 bp, Klebsiella oxytoca
atgcgcagtgtgctggtcttcgctttgctgttgctctccccgctggccgccagcgccggctggcaatccctacaacaagaagcccgcggccagacggtgtggtttaacgcctggggcggcgatccggcggtgaaccgctatctcgactgggtcagcggtgaggtaaagcgcgactacgctatcgacctgcgcatcgtgcatattgcggatgccgccgacgcggtaaagcgcatccagaccgaagcccgcgccggacgcagtaaaggcggttccatcgatctgctgtgggtcaacggcgaaaacttccgcaccctgaaaaacgccaggctgctgcaaacccggtgggcggaaaccctgcccaactggcgctttgtcgatacgcaaaagccggtgcgcgaggatttctccatccccaccgacggcgccgagtcgccgtggggcggcgcgcagctcacttttatcgcccgccgctcacaaacgcccgacgggcccaccactccgcaggcgctgctggctttcgccgccgcgcatcccggcagcgtcacctacccgcgtccgccggattttaccggtaccgcgtttcttgaacagctgctgctgacgctgactccgcggcccgacgcgctacgccagccgcctgaggaggccaccttcgccgccgtgaccgcgccgctgtggcactatcttgatcggcttcaccctctgctgtggcgccagggccgcgacttcccggcttcgcccgcccgcatggatgccatgcttaaaaatgggaccctcaggctgtccatcacctttaacccgctgcacgcgcagcaaaaagcggtcagcggcgagctgccgaaagacagctacggtttcggcttccgcgaggggatgcttggcaacgtccactttgtggcgatcccggccaatgcccgggcgacggcgggggcgaaagtggtcgcgaatttcctgctctcgccgcaggcccagctgcgcaaggccgacccgactgtgtggggcgaccccagcgtgctggatccggcgaaattaaccgagactgagcggcaggcctttaacgccgttgtgccgcagaatatgccgccgatgctgggtgaaccgcacgcggcctgggttgacgcgctggagcaggaatggctgcgccgctacggcacgcactaa

SEQ ID NO: 182906 - DNA, 552 bp, Klebsiella oxytoca
atgagcttaccccctctgaagtctattccgctgattcttcgcccgcaggcctggctgcatcgtcgccactacggcgaggtgctcagccctatccgctggtggggccgtattccgctggtgttttacctggtgtcgatgttcgtcggctatctggaacgcaagcgttcgcccctcgatccggtgctgagatcgctggtcagcgcccgcgtcgcgcagctgtgcctgtgcgagttttgcattgatatcaccaatatgaagctggcggaacgcagcggcggcagcgctaagctgctggcggtcgccgaatggcgggacagctcgctattcagcgaccgcgagcggctggcgctggagtatgccgaggcggccagcatgacgccgccggtggtcgacgatgcgctgcgcgacaggctggcaggccagtttgacgcccgcgcgctcaccgaactcacggcgctgatcggtttacaaaacctgtcggcgcgctttaattcggccatggcgatccccgcccagggattgtgccggatcccaaccgattcaaaaccataa

SEQ ID NO: 182907 - DNA, 699 bp, Klebsiella oxytoca
atgaaaaatagcaacgcgcgctaccggatagccatcggcatgacgctgtttgcgcttctgctggcatggtggctgatacccggcgtcaatgagtttatgcagcgcagcctcgccgcttttgccacgctcgatcagcaggctattgaacgctttatcgactcctggggcccgcaggcggcgctggtctccttcgccctgatgattttgcaggcgattatcgccccgcttcccgccttcctgatcaccttcgctaacgcttccttgttcggcgccttctggggcggcgcgctgtcgtgggtgagcgcgatggccggcgcggcgctgtgcttttttatcgccagagcgctcggccgcgacgcggtggaaaagctcaccggcaagagcgtactgcagagtacggatggcttttttacccgctacggcaaacacaccatattaatctgccgtctgctccctttcgttcccttcgacccggtgagctacgccgccgggctgacgtcaatgcgctttcgccactttatgctggccaccggtctcggccagctgcccgcgacgatagtctattcgtggaccggcagcctgctgaccggcggcacattctggctggtgaccagtttatcgatcctgtttgcgctggcgattgtggtggtcgtcgcgaaagcactctatcttgaacaacaaaagaggcgttcacgatga

SEQ ID NO: 182908 - DNA, 663 bp, Klebsiella oxytoca
gtggtgatattgagcattgtcgcctgtattattcagcaatcgggttttgccgggctggttacccattttgatcgtctgcgcgaaatgatccgccagagcggcgccttcggctatacgctctatattctgctgtttatcgtcgccaccctttttttgctaccgggcactcttttagtgattgccggcggggtgattttcggtccgctggcgggaaccttgctatcgctgctggcggcgacgctcgcctcctccgcgtcgtttctgttcgcccgctggctgggccgcgagctgctgcttaaatacgtcgggcagacggcgatttttcaggccattgaaaaaggcatcgcccgtagcggcaccgattttttaattctgacccggctcatcccgctgtttccctataatgtacagaactacgcctatggcctgacggcgattccattctggacgtttacctttatttccgccctcaccaccttgcccggcatatttatctatacgctgatggccagcgagcttatccgcgagggtatcacccccctgtttatactgaagctgaccctcgcggggctggctttatttgtcctgattcaggcggcgaaaagatatgcccgctatcggcgaatcgagacatcacggatacaggctcacgatgaaaaatag

SEQ ID NO: 182909 - DNA, 807 bp, Klebsiella oxytoca
atgaaatttgtctcttttaatatcaacggcctgcgtgcccgcccgcatcagctggccgccatcatcgataaacaccagcccgacgtcatcggcctacaggaaaccaaagttcacgacgatatgtttcctctcgaagaggtggcaaagctgggctataacgtcttttatcacgggcagaaaggccattacggcgtcgcgctgctgaccaaagagacgccgatctccgtgcgtcgcggtttcccaaacgatggtgaagaggcccagcgccgcatcatcatggcggaaatcccttccccgtttggcaacgtgacggtgattaacggctatttcccgcagggcgaaagtcgcgatcatgaaaccaaattcccggcgaaggcggcgttttatcagaacctgcaaaactaccttgataccgaactgaataaagagaatccggtactgatcatgggcgacatgaatatcagcccgaccgatctcgatatcggcatcggtgaagagaaccgcaagcgctggctgcgtaccggcaagtgttccttcctgccggaagagcgcgaatggatggagcgcctgctgggctggggcctggtggatacttaccgccatgcgaatccgcaggataacgaacacttctcgtggttcgactatcgctctaagggctttgacgataaccgcgggctgcgtatcgatctgctgctggcaagcaccccgctggcgcagcgctgcatcgaaaccggcatcgactacgaaattcgcgcaatggaaaagccgtccgaccacgcgccggtatgggcgacctttaaagtctaa

SEQ ID NO: 182910 - DNA, 1221 bp, Klebsiella oxytoca
atgtctcagtcaattacgcgtagcaactttgatgaatggatgatgcctgtatacgcgccagcggcttttattccggtacgcggcgaggggtcacgcctgtgggatcagcagggaaaagagtatatcgattttgccggcggcattgcggtgaacgccctcggtcacgctcatcctcggctggttaaagcgctgaccgcgcaggcggaaaagttctggcataccggtaacggctataccaatgagccggtattgcgtctggctaagcagctgattgacgccacttttgccgaccgggtctttttctgtaactccggggccgaagccaacgaagcggcgctaaaactggcgcgcaaatatgcccacgatcgtttcggcagtgagaaaagcggcatcgtggcgttcaagaatgccttccacggccgcacgctgtttaccgtttccgctggcggccagccggcctattcgcaggattttgcgccgctgccgccgcagattcagcacgccatctataacgacctcgactcggcaaaggcgctgatcgacgacaatacctgcgcggtgatcgttgaaccgatgcagggtgaaggcggcgtcgtgcctgcggatgcggacttcctgcgcggcctgcgtgaactgtgcgatgcgcacaacgcgctgctgattttcgacgaagtccagaccggcgtcggccgtaccggggagctgtacgcctatatgcactacggcgtgacgccggacgtgctttccaccgcgaaagcgctgggcggcggtttcccgatcggcgcgctgctggcatcggagcgctgcgccagcgtgatgaccgtcggcacccacggcacgacctacggcggcaacccgctggcctgcgcggtggcgggagaagtgtttgccatcgtcaacacccgcgaagtgctcagcggcgttaagcagcgccatcaatggttctgcgaacggctcaacgcgattaacgcgcgttacggcctgtttaaagagattcgcggcctggggctgcttatcggctgcgtgctgaaggatgaatatgccggcaaggcgaagaccatcagtaatgaggcggcggaagaggggctgatgatgctgatcgccggcgccaacgtggtgcgtttcgctccggcgctgattatcagcgaagaagagatcaacgccgggctggatcgcttcgaactggcctgcaaacgctttctcgcgggggtctcatcatga

SEQ ID NO: 182911 - DNA, 1035 bp, Klebsiella oxytoca
atgatggtgatccgtcctgtagaaaaaggcgatctgccggggctaatgaccctggcgggcgagaccggcggcggcctgacgtcgctgccggccgatgaagccacgctggccgcgcgcattgaacgttcgcagatgacctggcgcggcgagctgccgaaaagcgagcagggttatgtgttcgttcttgaggactgcgccagcggcgcggtagcgggaatttgcgccattgaggtggccgtggggcttaacgacccctggtacaactatcgcgtcggtacccaggtgcacgcatcgaaagagcttaacgtctacaacgccctgccgacgctgtttctcagtaacgaccataccggcagcagcgaactgtgtacgctgttcctggatccaaaatggcgtaaagagggcaacggctatctgctgtcgaaatcgcgttttctgtttatggccgcctttcgcgaacgtttcaacgataaggtcgtggcggaaatgcgcggcgtcattgacgaacacggctactcgccgttctgggagagtctcgggaaacgcttcttcgcgatggagttctcccgcgccgactacctgtgcggcaccgggcagaaggcgttcatcgccgcgctgatgccgaagcacccgctgtatatcgactttttaagcgacgaagcgcgagcggtcatcggcgaggtccatccgcaaaccgcgccggcacgcgcggtgctggagaaagagggatttcgctatctcaactacgtcgatatcttcgacggcggcccgacgctggagtgcgaaattgaccgggtgcgggccattcgcaaaagccggctggtcaccgtcgtcgaaggccagcccgcgccgggcgagtggccggcctgtctggttgctaatgagcagtaccagcagtttcgcgccatgctcgttcacgccgacccggagagcgaccgcctggtgctaagcgcgcgcgagctggatgccctgaaatgccaccccggcgaccagattcgcctggttcgtctgtgccctgaggagaaaaaatcatga

SEQ ID NO: 182912 - DNA, 1479 bp, Klebsiella oxytoca
atgagtttatggattaacggcgactggcaaagcggtcgcggcccggcccgtagtaaacataacccggtaagccaggcgctgctgtggcagggcaacgatgccgatgccgggcaggtggcgctggcggtcaccgcggcgcgcgcggcgtttcccgcgtgggcgcgtcagccgtttgccgcccggaaagcgatagcggaaaagtttgcttcgttactggaagcgaacaaaggtgaattaaccaggattatcgcccaggagaccggcaaaccgcgctgggaagcggcaacggaaattaccgcgatgatcaacaaaatcgccatttcggtgaacgcgtatcatagccgtacgggggaagcgcagaccgcgatggcggacggagaggcgacgcttcgccatcggccgcacggcgtgctggcggtctttggcccctacaattttcccggacatttgcctaacgggcatatcgttccggcgctgctggcgggaaataccgtggtattcaaacccagcgagctgacgcctcaaagcggagaggcggtggtgaagctatgggccgaagccggcctgccgccgggcgtgcttaacctgctccagggcgggcgggaaaccggcgaagcgctgagcggccaggcggacatcgacggcctgctatttaccggcagctctgcgacgggttttcaacttcatcgccagcttgccgggcagccggaaaaaattctcgctcttgagatgggcggcaacaacccgctgatcgtcgatgacccacaggatatcgacgccgcggtccatctgaccattcagtcggcgtttattactgccggacagcgctgtacctgcgcgcgccggctgctggtaaaacgcggcgaggccggcgatgcgtttcttcagcggcttgtgacggtgtcacaaacgctgattcccgacgcgtgggacgctgaacctcagccgttcctcggcgggttaatttcagcgcaggccgcgcaaaaggtacatcaggcctggctggcccacgtggccagcggcggaaaaaccctgttggagccgcgcctgctgcaggccggaacctcgctgctgacgccgggtattatcgagatgagcgcggtggcgcaggtggccgacgaagaggtcttcgggccgctgctctgcgtctggcgctatgaccatttcgatgaggcgattgccctcgctaacgcgacccgtttcgggctttcctgcgggctgatctccgccgaacgcgacaaattcgaccagctgctgctggaggcgcgggccgggatcgttaactggaacaaacccttaaccggcgccgccagcaccgcgccgttcggcggtaccggcgcttccggtaaccaccggccgggggcgtggtacgccgcagactattgcgcctggccgatggccagtctcgaatcaccggagctggcgctgccggcaaccctcagccccgggctgaatttccgtaaggagacatcacaatga

SEQ ID NO: 182913 - DNA, 1326 bp, Klebsiella oxytoca
atgaaagcccgggaagtgaactttgacgggctgccgggcctgacccaccactatgcgggtttatctttcggcaacgaagcctcgacgaagcaccgctatcgggtgtcgaacccgcagctggcggcaaagcaggggctgaaaaaaatgaaagcgctggcggatgcgggctatccgcaggcgctgatcccgccgcaggagcggccaaacattccgctgttgcggcagatcggttttagcggtagcgatgagcaggtgctggaaaaggcggcgcgccaggcgccggaactgctctcggcggtcagctccgcgtcatcgatgtgggtggctaacgccgccacggtctccccctcggccgattcgctggatggccgggtgcatctgaccgtcgccaacctgaacgataaattccatcgcgccagcgaagcgccgaccaccgaagcgctgctgcgggcgattttccccgatgagcagcggtttgccgtacacggcgcgctgccccaggtatcgctgttcggcgatgaaggggcggcaaaccacaaccgcctcggcggcgactatggcgcgcccggcgtgcagctgtttatttacggccgccagcaggggggcgaagataatccgctgcgctacccggcgcggcagacgctcgaggccagccaggccgtcgcccgcctgaatcaggtcaatccccggcaggtgattttcgcccgacaaaatccggcggtgattgataaaggcgtgtttcataacgatgtgattgcggtaagcaatcagcaggtgctgttttgccacgagcaggcgtttgttgaccagccgcagctcctgcagcagctggcgcagcaggtctccggctttacgccgctggtggtgccggcgagtcaggtttcggtggaagaggcggtggcgacctatctgttcaacagccagctgctgagcaaagaagaaggcgggatgcggctgattttgccgctggaagcgcaggaacacccgggcgtctggcgctacctgaaccggctggtggagggcgataaccccatcgatgagctacaggtttacgatctgcgcgaaagcatggccaacggcggcggtcccgcctgcctgaggctgcgggtggtgctgacggaggacgagcgacaggcggtgaatccggcggtcatgatgaacgatacgctgttcgccacccttaatgactgggtagaccgctactatcgcgatcgcctgacccaggtcgatctcgcggatccgcagctgctgcgcgaagggcgcgaggcgctcgaccgcttaacgcaaatcctgcgcctgggctcagtgtattcgtttcagcaataa

SEQ ID NO: 182914 - DNA, 966 bp, Klebsiella oxytoca
gtggacgactttctggcacttactctggcggggcgtctgccccaccatttccatggtcaaaccgcgcatttccgctggcactggattgactgcggtattctgcagctcattcctcatgaaccctgcgatcggtcgctggttttgtcatccgggcttcacggcaatgaaaccgcaccggtcgaaatcaccgatttactgctgcggcagctgtttcgtggggaaataccgctccgctggcggctgctggcgatctttggtaaccctccggcgctgcgggccaacaagcgctatatgcacagcgatatcaaccggatgttcggcgagcgatggcgcgcttttagcgtcagcgatgaaaccgttcgcgcccggcagctggagcatgcgctggcgcgattttatgccgggacgcccggcgagcgctggcacctggatttacataccgccatacgcggttcgctgcatacccgctttggtgtcctgccggcgcgggatacgccgtgggatgaagcgtttttgcgctggttaggggcggcagggctggaggcgctggtgtttcatcagcagcctggcgggacttttacccatttcagctgcgaacgcttcggcgcgcgctcctgcacgctggagctcggcaaggcgctaccttttggcgaaaacgatctgcgcttgttcgcggcgactcaacgcgcgctgtcgctgctgctggcgggagaagtggcggcggaagaggcgcacgcgccgctgcgctacagggtggtacagcaaattacccgcagcagcgacagtttccagctgcatatgtcggcgcagacgctgaactttacgccgtttgccgccgggacgctgcttgctgaggatggcgatacccgctacgtagtggaaagggatcaagagtacgttttgtttcccaaccccagcgtcgccttcggccagcgcgccgggctcatgctggagcgcttccggtga

SEQ ID NO: 182915 - DNA, 483 bp, Klebsiella oxytoca
atgaagaagattactgcactgtttgttgcctctactctggctctgggcgcggctaacctggcccacgcggctgacgctactgcaaccccaaccgataacgcgccgatgatgcatcataagcgcggacctgcgggcccacatgaaatgatgtttaaagggctgaacctgaccgatgcgcagaaaacgcaaatccgcgacattatgaagagccagcgcgacaacatgaagcgtccgtctctggatgagcgccgcgcgatgcatgagctggtagccagcgataccttcgataaggcaaaagcggaagcgcagattgataagatggaagcccagcataaagagatggcgctggctcgtctggaaacccagaacaagatttacaacattctgacgccggaacagaaaaagcagttcaatgccaattttgagaagcatctgacagatcgtaaagcgccggaaggtaaaatgcctgcaccagctgaataa

SEQ ID NO: 182916 - DNA, 543 bp, Klebsiella oxytoca
atggaaatgtatatcggcctcgccgtcctcgttgtcgtcctcatctgggtcgtgatgacctataaccgctttatctccctgcgacgtttcaaagacgaagcctggagcggcattgccgtacagcttaagcgccgccacgacctggcgccgaatctgctgagcctggtgaaacgctatgcgcagcatgaaaaagaactgctggaagagatctcccgccagcgcggcgaactggtcggcagtacccgacagatcgccgacagcgaacgccagtactctggtacgctagggcgcgttttcgcgcttggcgaagcgtacccggaacttaaagccagcgaaaactaccttgccttacagcaatctctcagcgaaatagaagagcagctgcagatggctcgccgctacttcaacggtacggtgcgcgatttcaatatcctggtcgagtccttccccagcctgctgctggcgcgactgtttaattttcaaacggaagttttcttcgagctggactcaccagaagaagctaaatcaccgcggatggcgtga

SEQ ID NO: 182917 - DNA, 2043 bp, Klebsiella oxytoca
atggcgaatttacttcttcgggggctgcgccccctcgtcctgctgctgcttctgaacatcagcgcggcttttgccgccggcgacatgatcatcatcaaggatgcttcccagcttcccgctggcgctattccagcgtatgaacatatcctctctttcgatgcccgggcgcgctttaacccggacggcagcatggagatgcgggaaaatatcaaagtactttctctgggcaggcagattcggcgggggattttccgtacgctgcccctgacctggaaccgccaggacggcaagatctttcgtgtgtattacgcgatcgagtcggtgttgcgcgatggcgtgcctgagccgtttagccttgatgaagcagaaaaaaacctgacggtacgcattggcagcggcgaacgggtcctgaaaccagggatctataactacgagattcgctatcaaatcagcaaccatttcagccgcttccccgaatgggatgagctttactggaacgtgacgggcaatgactgggcgtggcctatcagcaaggccagctttagcctggcgctaccggatagcaccgcaaatctcaacgctgatgccaaagatgccaggctgcgctcaattgatatctataccggggttgcaggggcgaaagagcacaacgcaacggttcttcctgacggtagcgtacgcaccctgcggcctctggcgcggggggaggggctgaccgttgtctatacctggcctcggtcgatccttgccgacgctccggcgccggaggccgctttgccgctggtgcatctccttatccccaccctaaaaacctgcgtggtctggctacctctgctgctgatggccgcttattacctgatgtggtggcgaaaaaacgtcaccaaagccggactaaaaatgccgccggtcgttgcgctttattcgccgcctcccggcatgtctcctggctacctgcgttttatcacccggcgtaaatatgatgatgtggcttttagtagcgatttattagcgctggtggctaaacgcggaatggcggtcagcggggacagtcaacacacccctaacccgtggcttgcgaacgccggcgtaaaacagcggctgacccgtttgcccgtcgagggaaaccggcaattaaactatgatgacaggcagctattaagtacgctctttaaaggtaaacaaaaaaatatcgatctcagcaaggcccatcagcgatcgatgcagacagcgcgtgcagagcaggaaaagcgttgtgaagcgcagcgggataaattatttcgcaaatgggggcagccgctgcggcgctgcatctacattgcgctgttggtgccggtggcctgcggtctttgggttaatacggaggccgcgctgctgacgataccggccgcggtttttatgctgattggcggagcgatgctcgcctgtttgctgcgctttatatgccgcccgcgggaaatgtggcgtgcctgggggccggtgccgctctttttttgggcgatcttcggccccttcgcgacgctgggaggcgggatttttctctttggtatactgcccatcacccagcttccgtcaggatacattggcgcgcttattgccgcgctggtgctgtgcgttttcattgcctggaaaacgcctcgctatacgcagcgcgggcttgatgaactggctatcgcgaaaggattgatgcgctatctgggcaccgccgaaaagcatcgttatcagattatctatccgcccgagcagatgatttcccattttgaagcgctgctgccggttgccctggcgcttggcgtagggaaaacatgggcaaatacctttgcccactacctgagtagtacaggcgccgtgtcgcatgcgtttgccggcgccgactggggaagcgtccaccacttcagcgaagcctgccgaaccgcctctatgtcaacgccggatagcggttcagggagcggttcatcatcaggttcaggttacagcggctccggttcctccggaagcggttcatccggaggcggctcgggcggcggcggcgggggcggctggtaa

SEQ ID NO: 182918 - DNA, 861 bp, Klebsiella oxytoca
gtggcaagaaggcaatccgccccgcgtctcgaatttgaagcggcggcaatttatgagtatcccgaacatctgcgaccgtggcttgaggctttgcccaggcagccgggggtgtatctgttccacggcgaaagcgataccctaccgctctatatcgggaaaagcgtgaatatccgcagccgggtgttgtcgcatctgcgcacgcccgacgaagcggcgatgctgcgccagtcccggcgcattacctggcaacgaacggcgggagagctgggcgcactcttattagaggcacagctcattaaagaacagcagccgctattcaataagcgtctgcggcaaaaccgacagctatgttcattacgcctggctgacgcccgtccgcaggtggtgtacgccagcgagctggatttttccctgcaaagcgatctctatggtctttttgccaaccgccgcgcggcgctgcaggcgctgcaaaaaattgccgacgagcatcgcctgtgctacggattaatgggcctcgagccgctcaaccgcgggcgggcctgctttcgttcggcgctcggccgctgcgcgggcgcctgttgcggaaaagagagcgttgaagcacaccagcagcgtctggtcgacaatatgcaaaagatgcagctggtatgctggccctgggccggggcgatcgcgctggaagagagcagcgaggatatgacccaataccacattattcaaaactggctttggcttggcgcggtagagtctctgtcgcaggcgtcatcactcacgcgcctgtcggccaaatttgaccatgacggttataaaatattgtgtaagccgctgctcagcggccgctataagctccatcctctgtga

SEQ ID NO: 182919 - DNA, 828 bp, Klebsiella oxytoca
atgacgctacaacaagagattattcaggcgctgggcgcaaaaccccagatcgatgtcgaagccgagatacgccgcagcgtagactttttgaaggcctatcttcagagatacccttttattaaatcactggtcctcggcatcagcggcggccaggattcaacgctaaccggtaaattgtgtcagttagccatcaacgaactgcgtgccgaaaccggtgacagcagcctgcagtttattgccgtgcgcctgccctacggcgtgcaggcggatgagcaggactgccaggacgctatcgcttttattcagccggatcgcgtattaacggtcaatatcaaaggcgccgtgctggccagcgaacaggcgctgcgcgaggccgggattgaacttagcgactttgttcgcggtaacgaaaaagcccgcgaacgcatgaaggcgcagtacagcatcgccggaatgacccacggcgtcgtggtgggtaccgaccatgcggcggaagccattaccggattcttcaccaaatatggtgatggcggtacggatattaaccctatctttcgccttaacaaacgccagggcaaacagctgctggcccagctaggctgcccggagcatctgtataaaaagctgccgaccgccgatcttgaggacgaccgcccctccctgccggacgaagtggcgctgggcgtgacctacgaaaatatcgatgattatctggaaggcaaagcgctggatgagaaaattgcgaaaacgattgaaggctggtatttgaaaaccgagcataaacgccgaccgccgattacggtcttcgacgacttctggaaaaagtaa

SEQ ID NO: 182920 - DNA, 339 bp, Klebsiella oxytoca
atgaacaagcattttgcaggatttctgggcgcagcagcagtattgaccctgctggcagggtgtacggcctacgaccgtacgaaagatcagtttactcaacccgtggttaaagacgttaagaaaggcatgacccgcgcgcaggttgcgcaaattgccggtaaaccttcatcagaagtcaccatgatccacgcgcgcggtacctgccagacatatatcctgggtcaacgcgatggtaaaattgaaacctacttcgttgcgctggatgaaaccggccgcgtgatgaattctggttatcagacctgcgccgagtacgataccgacccacgcaacagtaagtaa

SEQ ID NO: 182921 - DNA, 321 bp, Klebsiella oxytoca
atggaaaagaaacatatctacctgttctgttctgctgggatgtcgacatcactgctggtatcgaaaatgcgtgcccaggccgagaagtatgaagtgccggtgattattgaagcatttccggagaccttagccggtgaaaaaggacctgatgcggatgtcgtattattaggcccacaaatttcctatatgctgccggacattcagcgtttactgccaaataaacccgtagaagtcattgattctgttctgtacggtaagatcgatggtttaggtgttctgaaagcggccgttgcggccattaagaaagctgctgcacaataa

SEQ ID NO: 182922 - DNA, 1359 bp, Klebsiella oxytoca
atgagtaaagtgattgactcgcttgaaaaggtactcctgccttttgccgtcaaaataggaaggcagccccacgtcaatgcaattaaaaacggctttattaagttaatgccattgacgctagccggggcgatgtttgttttaattaacaacgtatttttgagctttggcgacggctcattcttttattcaatgggcatccgtctggatgcgtctacaatagaaacgcttaacggttttaaagctatcggcggtaacgtttataacggtacgcttggcattatgtcgctcatggcgcctttctttattggctccgctttagctgaggagcggagagtagacccgatggccgccggtttactggccgttgcggcatttatgaccgtcacgccttatagcgtcggtgaagcctacgccgtgggcgcaaactggttaggcggcgccaatatcatttctggtattgtcatcgggctggtcgttgccgagatgttcacctttatcgtgcatcgcaactgggtgattacgctgccgtccagcgtgccggcttcggtttcccgttcattctctgcggtcatcccggcctttatcatcctctcgattatggggattatctcctgggcgttgacccactgggggaccaacttccaccagatcatcatggacactatctccacgccgctggcttcaatgggcgccgtcgtaggctgggcatacgtcattttcacctcgctgctgtggttcttcggcgtacacgggtcgctggcgctgtcagcgctggatagcggaatcatgacgccgtgggcgctggaaaacattgcaacctaccagcagtacggttccgtcgaggccgcgctggccgcgggtaagagcttccatatgtgggccaagccgatgctggattcctacatcttccttggcggtaccggcgcgactctgggcttaatcatcgccatctttatcgcttcacgtcgtgaggatcatcgtcaggtggcgaaactggcgctgccgtcaggcatcttccagattaacgagccaatcctgttcggtctgccgatcattatgaacccggtgatgtttatccccttcattctgattcagcctctgctggcggctatcaccatgacggcttataccctgggcatcatcccgccgattaccaatatcgcgccgtggaccatgccgaccggtttaggcgccttctttaacaccaacggtagcgtagccgctctgctgctggccctgttcaaccttgccgtgtccaccctggtctacctgccgtttgtggtgatttccaacaaagcgcagggcgtcattgagcaggaagagagcgaagaagatatcgctaacgcactgaaattctaa

SEQ ID NO: 182923 - DNA, 348 bp, Klebsiella oxytoca
atgtttgatctggataacatcgcagcagaagagaccgcggtaaacgacctcgaagaggtggtgatggggctgattatcaactccggtcaagcgcgcagcctggcttatgccgcgctgaagcaggcaaagcagggagatttcgaggcggcgaaaacgatgatggaacagtcgcgcatggcgctgagcgaagcgcaccttgtgcagacgcagttgattgagagcgatgagggtgaaggcaaaatgaaggtgagcctggtgctggttcatgcgcaggatcatctgatgacctcaatgctggctcgtgagctggttgccgaattgattgagctgcacgagaaggtacaatag

SEQ ID NO: 182924 - DNA, 825 bp, Klebsiella oxytoca
atgatgaccactgaaatcagtaccgcccgggagcaacaactctttaacggcaagaactttcatgtggtcatctataacaaaacggagagcgtaagcgggcttcaccagcatgattactacgagtacaccatcgttttaaccgggcgctattatcaggttattaatggcaaacgggtgctgctggagcgcggggattttgtcttcatcccaatggggtcgcatcaccagagtttttatgaatttggtgcgacgcgcattcttaacgttggcatcagcaaaagtttctttgagaaacactatctgccgctgctgccgtttggtctggtcgcctcacaggtctatgccgttaaaagtacttttctcagttatattgagtcggttattgcatcactgaattttcgcgaaactgaattcgacgaatttatcgagctggtgtctttttacaccctgaatcgtttgcggcattatcgtgaagaacctacggaagacgttattccgcaatggttaaaaaataccgttgagggtatgcacgataagcttaaatttggcgagggggcgctggaaaatatggtcgagctttccgggaaaactcaggaatacttaacccgggcgacccagcgttattacgccaaaacgccgatgcagatgattaacgatattcgcatcaacttcgccaaaaaacagctggagataaccaactactcggtgaccgatatcgcctatgagtcggggtacagtagcccaagtctgtttattaaaacattcaagaagctgacttcctttacccccagcagctatcggaaacacctcaccagtattaattaa

SEQ ID NO: 182925 - DNA, 1347 bp, Klebsiella oxytoca
atgagccagaaattgaaggtagtgactatcggcggcggcagcagctataccccggaattactggaaggcttcctgaagcgttaccatgaactgccgattagcgaactgtggctggtggacgtcgcggaagggcaggaaaagctcgatataatccacgcgctgtgccagcgcatggtggaaaaagccggcgtcccgatgaaagtctacaagactctcgatcgccgcgcggcgctggaaggcgcagatttcgtcactactcagctgcgcgtcggccagcttaaggcgcgcgaaaaggatgagcgtattccgctgagccacggctatttaggccaggaaaccaacggcgcgggtggactgtttaaaggtctgcgcaccattccggtcatttttgacattgtgaaagatgtgcaggaagtctgtccgaacgcctgggtgattaactttaccaacccggcgggcatggtgaccgaagcggtttatcgtcataccggctttaagcgctttatcggcgtatgcaatattcctatcggcatgaagatgtttatcaccgatgtgctgaagctgagcccgagcgatgagctcaatatcgatctgtttggtctgaatcatctggtgttcgtgcgggatgtgctggtcaacggcgtttcgcgctttgacgagctgcttgacggcgtggcgtcgggtcgattgagcgcaaactcggtgaaaaatatctttgatttgccgtttagcgaagggctgctccgttcgctgcgcctgatcccttgttcctatctgctctactactttaagccaaaagagatgctggcgattgaaatgggcgagtactacaaaggcggcgcccgcgcgcaggtggtgcagaaggttgagaaacagctgtttgagctgtacaaagatccggatctgaacgttaaaccaaaagagctggaacagcgcggcggggcgtattactccgacgcggcctgtgaagtaattaacgccatttataatgataaacaggccgaacattacgtgaacgtgccgcaccatggccacgtggataacatcccggccgactgggcggtcgagatgacctgtacgctggggcgcgacggtgcgaaaccgacgccgcgcatcacgcatttcgacgaaaaagtgctggggctgatttacaccattaaaggctttgaagtcgcggccagcgaagcggcaatcagcggtaaactggatgacgtgctgctggcgcttaacctgagcccgctgatccactccgatcgtgacgccgaacagctggcgcgtgagatgatccttgcgcacgagcagtggctgccaaactttgcggcgactatcgaaaaactgaaacagtaa

SEQ ID NO: 182926 - DNA, 759 bp, Klebsiella oxytoca
atggaacgcgtgttaatcgtcaatgccgatgactttggcctcagcaaagggcaaaactacggcattatcgaagcctgcaagaacggtctggtcacctccacgacggcgctggtcaacggcgcggcgatcggccacgctgcccagcttagccgctgcgtccctgagctggcggtggggatgcactttgtcctgacgctgggcgaaccgctgtcggcgatgccgggcttaacccgcgaaggtcgtctcggtaagtggatttggcagatggcggaagaggatagcctgccgctggatgagatcgcgcacgagctggagtgccagtaccggcgctttgtcgaactgtttggccatgagccgacgcatatcgacagccatcaccatgtgcatatgattgcgcagatttaccccatcgtcgcggcctttgcgcgcgagaagggggtggcgctgcggatcgatcggcagctggcgacgctgtcaggtttagcgcaggatgcggcgcgcagcagcgacgggtttaccagcgagttttacggggaaggggtttcggaagcgctgtttctgcaaaccctggatgcctctatccagcgtgatgagcgatcgctggaggtgatgtgccacccggcgttcgttgataacacgattatgggtagcgcctattgctatccgcgcctgaccgaactggacgtgctcaccgccgagtcgctgaagtatgcgattgccgagcgcggctaccggctcggcacctatcgcgatgtgtaa

SEQ ID NO: 182927 - DNA, 2259 bp, Klebsiella oxytoca
atgtctgataaacaccataacccgcaaccccatcaatcaccggttcacgacgaccgggaagcaaaaccaggtctggatgccttagcccccgaagaccagaactggcggcccacgccgcatcccaccgctccaggtgaagagccgaccgccccgggcagtatgaaagccccggatacgcacagcgaaaagctcgatgcccttgaaaaacagcgtaaaggcggcgaggattttgcgcttaccaccaatcagggcgtacgcatcgcagacgaccagaactcgctgcgcgcgggcaaacgcggccccacgctgctggaagattttatcctgcgcgaaaaaatcacccattttgaccacgagcgcattcctgagaggatcgtccatgcccgcggctccgctgcgcacggctatttccaggcgtacagcgacttaagcgatatcaccaaagcggctttcctctgcgatccgcagaaaaaaacgccggtcttcgtccggttttccaccgttcagggcggcgcaggctccgccgatacggtgcgcgacatccgcggctttgccaccaagttttataccgacgagggcatctttgacctggtcggcaacaacacgccgatcttttttattcaggacgcgatcaagttccctgatttcgtccacgcggtcaaacccgagccgcactgggccgtcccgcaggggcaaagcgcgcacgacacgttctgggattacgtctcactgcagcccgaaacgctgcataacgtgatgtgggcgatgtccgaccgcggactgccccgcagctaccgcacgatggaagggttcggcatccacaccttccgcctgattaacgcggaaggtaaagccaccttcgtacgttttcactggaagccggtcgcgggcaaagcctccctggtatgggacgagtcgcaaaagctgaccggtcgcgatcccgatttccaccgccgtgatttatgggaagcgattgaagccggcgattatcctgagtacgagctgggcttacagctgatcccggaagaggacgagtttgcttttgatttcgatctgctggatcccaccaagctgattccggaagcgctggtcccggtgcagcgcgtcggtaagatggtcctcaatcgcaacccggacaacttctttgccgaaaacgaacaggcggccttccatccagggcatatcgttccggggatagacttcagcaacgatccgctgctgcagggccgactcttctcctataccgatacgcagatcagccgcctcggcgggccgaatttccatgaaatcccgatcaataaacccacctgcccgtaccataattttcagcgcgacggcatgcaccggatggatattgataccaacccggcaaactatgaacctaactccatcaacgataactggccgcgggagacgccgccggccgcgaaacgcggcggctttgaatcctatgccgagcgggttgacggggaaaaaattcgccagcgcagtccgtcgtttggcgaatattactcgcagcccctgctgttctggcgtagccagacgcctattgagcagcagcatattatcgacggattcagcttcgagctgagcaaggtcgtcagggagtggatccgcgagcgggtggtcgatcagctggcgcatatcgacctgcagctggctcaggcggtgggtaaaaatctgggtattgagctcaccgacgaacagcgcagcatcacgccgccgccggatgttaacggtctgaaaaaggatcctacgttaagcctgtacgccattcccagcggtgacgtaaaaggccgggtggtagcggtactgcttaacgatcgtccggtcgccaaagagctcctgacgctgctcaaggcgctcaaagcgcacggggtgcatgccaaattactctattcccgaatgggaaaagtgcaggccgatgacggtaccgagctgccggtggccgggacctttgccgggtcgccatcgcttaccgtggacgcggtcattgttcccggcggcgatctgcaaagcctgagcaacaatggtgatttccactactacctgctggaagcctataaacacctgaagccgattctgctggcaggcgatgcccggcagtgcaaagcgccgctgcaggttgccagtcagggggaagaaggcatcgttgagacggacgccatcgataattcgtcggtggatgcgctgattaccctgatggcggcgcatcgggtgtggtcgagaagcgccaaaatctccgcgatcccggcgtaa

SEQ ID NO: 182928 - DNA, 162 bp, Klebsiella oxytoca
atgttcgtctatcagcacaaaagcaacgtatttaccccgcaaaacccaaacgtcgcgaaaaccatccattttgacggcgtgttccggcggcgcaggctcgactcgcggcacgtagctaatgacctgacgattttgttggcgaagtggtttcatcacaaatag

SEQ ID NO: 182929 - DNA, 1392 bp, Klebsiella oxytoca
atgaactttccattaatagcgaacgtagtcgtgttcgcggttttactgttggcgctggcccaaacccgccataaacagtggagcctcgctaaaaaagtgctggtcggtctggcgatcggcgttgtcttcggcctggcgctacagcttatctatggttccgacagcccggtgctgaaggattctatccagtggttcaatatcgtcggtaacggctatgttcaactgctgcaaatgatcgtcatgccgctggttttcgcctccattctgagcgcggtcgcccgtctgcataatgcctcgcagctgggtaaaatcagcttcctcagtattggaaccctgctgttcaccacgctgattgcggcgctggtcggggtgctggtgactaacatgtttggcctgaccgccgaagggctggttcagggcagcgcggagaccgcccgcctcaacgccattcagagcaattacgccggtaaagtcgcggacctgagcgtcccgcagctgatcctctctttcgtaccgaaaaacccgtttgccgatctgaccggcgcgaacccaacgtcgattatcagcgtggttatcttcgccgcgttcctcggcgtcgcggcgctgaagctgctgaaagacgatgtcgccaaaggccagcgcgtgctgaccgctatcgatacgctgcagagctgggtgatgaagctggtgcgtctggtcatgcagttaacgccgtacggcgtactggcgctgatgaccaaagtggttgcgggctctaacctgcaggacattatcaagctcggcagcttcgttatcgcctcctatattggtctgggcatcatgttcgtggtgcacggcctgctgctggcggtcaacggcgtgagcccgctgaaatacttccgcaaagtctggccggttctgaccttcgcctttaccagccgctccagcgcggcgtctattccgctgaacgtggaagcgcaaacccgtcgtctgggcgtgccggaatccattgccagcttctcagcatcgttcggcgctaccatcggacagaacggctgtgcgggactctatccggcgatgctggcggtgatggtcgcaccgacggtcggtattaacccgctcgatccgctgtggattgctaccctggttggcatcgtcaccgtcagttccgccggggtcgcaggcgtgggcggaggcgcgacgtttgccgcgctgatcgtcctgccggcgatggggctgccggtcacgctggtggcgctgttaatctcggttgaaccgctgattgatatgggccgtacggcgctgaacgttagcggctcaatgaccgccggtaccctgaccagccagtggctgcgtcaaaccgataaagctattctcgatagcgaagaggacgcggagctcgcgcaccgctaa

SEQ ID NO: 182930 - DNA, 591 bp, Klebsiella oxytoca
atgacggcggaaggccacctccttttctctatcgcctgtgcggtatttgcgaaaaacgcggaattgactcccgtgctggctcagggcgactggtggcacatcgttccttccgccatcctgacctgtctgctgccggatatcgatcaccctaagtcgtttctcggtcagcgattaagctggatatcaaaaccgatagctcgcgcctttggccatcgcggcttcacccatagcctgctggtggtctttggcgcggtcgcgattttctcattgaaagtaccggaaagttggatagtgccggcagatgcggttcagggcctggttcttggctacctcagccatattctcgccgacatgctcaccccggcaggcgttccgctgctctggccctgccgctggcgttttcgcctgcccctgcttgcaccgcgcaagggtaaccagctggagcgcgcgctgtgtatggcgctgtttatctatgccgtatggatgccgcaaaacgttgccgaaaacagcgccattcgctggtcatcggacatgattaattctttgcaaaccacctttaatcgcttaattagccaccaggctggacgataa

SEQ ID NO: 182931 - DNA, 762 bp, Klebsiella oxytoca
atggtactgaacgcctttgaccttacgggcaaggtcgctatcgtgacgggttgtgataccgggctgggccagggaatgacgctgggccttgcgcaggccgggtgcgatatcgtcggcgtgaatcgccggatcccccatgaaaccgcagagaaggttcaggcgctgggccgacgctttaccgctattcaggccgatttgagccggcaggatgagattgaaaccattgtcgatcgggccgtggccgccatgggccgggtagatattctggtcaacaatgcgggaaccatccgccgcgccgatgcgctctcctttagcgaaaaagactgggacgaggtgattaacctgaatctgaagtcggtgttctttctttcacaggcggtcgccagacagtttattcagcagggtgacggcgggaaaatcgttaacattgcctcaatgctctcctttcagggggggattcgggtaccctcctacaccgcgtcaaaaagcggcgtactgggcattacccgcctgatggccaacgaatgggcggggcatcgcatcaacgttaacgccattgccccgggatacatggctaccaacaatactcagcagctgcgtgaagacgccgagcgcagcaaagcgattctcgatcgtattccggccgggcgctggggcgtgccggatgaccttcaggggccggtcgtttttctcgcctcccgggcggcggattacattagcggctttacgctggcggtagatggcggctggctggcacgctga

SEQ ID NO: 182932 - DNA, 669 bp, Klebsiella oxytoca
atgtcagccaggcgccagattcacgccgcgatttttgatatggatggtttactgattgattctgagccgctgtgggataaagcggagctggaggtgatggcaagcctcggggtggatatcagccgccgccatgaaatgcccgatatcctggggctgcgcatcgatttagtcgtcgatctgtggtttgcccagcagccgtggaaaggcccggatcgtgccgaagtcaccgcgcggatcatcaaccgcgccatccagctggtggaagaagcgcgtccgctcctccccggtgcgcgggaagcggtggcgatgtgcaaagcccaggggttgaaaatcggcctggcgtcggcttcgccgctgcggatgctggaaaaagtcctcaccatgtttgaactgcgcgatcaatttgacgccctcgcttccgccgaagggctgccgttcagcaaaccgcacccgcaggtctatctggactgcgccgccagactcggcgtcagcccgatgcactgcgtggcgctggaagactcggttaacggcatgattgccagcaaagcggcccgaatgcgatctatcgtcgtaccggaagcggaaaacagccgcgatccgcgcttcgtgctggcggacgtgaagcttgccacccttgaatccctcaccctgagcgacctgctcggttaa

SEQ ID NO: 182933 - DNA, 537 bp, Klebsiella oxytoca
atgacgtatcaacaagctggacgcgttgcagtacttaaacgtattttggggtgggtggtatttatcccggcggttatctcgacgctgatctccgtgctgaagtttatgtacgagcacagtgagaaaaaaccgggcattgacgcggtgatgatggactttgctcatgtgatgattgagatgatgcgtttcaatacgccgttcctgaatttcttctggtacaactcgccgctgccggactttaagcacggtatgaatatcggcttctgggttatctatattctggtgttcgtcggcatggcgctacaggcctccggagcgcggatggggcgccaggcgaagtttctgcgcgagggcgttgaggatcagctgattctggagcaggcgaaaggggccgaagggctgacgcgcgaacaaatctctgaacgcgttgtggtgccgcgccataccatcctggtgcagtattttccgctatacgtcctgccggtaattattattgtgctgggctacttcttcttctctttactcggctttctgtaa

SEQ ID NO: 182934 - DNA, 399 bp, Klebsiella oxytoca
atgacaacaacagatcttacgccgaagggcgaattggtattacgcaccctggcgatgccggcggacaccaacgctaacggcgatattttcggcggctggctgatgtcgcagatggatattggcggggcgattatggccaaagagattgcccacggtcgcgtcgtgaccgtgcgcgtcgacggcatgacttttttacgcccggtcgcggtcggcgacgtggtgtgctgctacgccagctgcgtgaagcgcggcaatacgtcgataaccatcaatatggaagtgtgggtcaagaaggtgtcgtctgaacccatcggccagcgctacaaagcaaccgaagcgctgtttatctacgtcgcggtagataatgagggtaaaccgcgcgcccttcccacccagtga

SEQ ID NO: 182935 - DNA, 2181 bp, Klebsiella oxytoca
atgagaacgcagaaaaatcacatagcaacgcccctggccctggccattgcaggcttactcagcccaggggtcttcgccgaagaggtggaacaggatacggagaccatggtggttcatggcaccgccgaagaggcgctgaagcagcagccgggcgtctcgatcatcactgcggaagatattgctaaagatcccccggttaacgatctctcagaaatcatccgtaaaatgcccggcgtcaacctgaccggcaacagcgccagcggcagccgcggcaacaaccgtcagatcgacattcgcggaatgggaccggaaaacacgctgattcttatcgacggcgtgcccgtcacctcccgcaattcagtgcgctatagctggcgcggcgagcgcgatacccgcggcgacagcaactgggtaccgccggaaatggtggaacgcattgaagttctgcgcggccctgccgcagcgcgctacggctcaggcgccgcgggcggcgttgtcaatatcatcaccaaacgccccaccaacgactggcacggctcgctttcgctctataccaatcagccggaaaataataaagaaggcgccaccaaccgggctaacttcagcctcaacggaccgctggcgggagatgccctgaccatgcgtttgtacggcaacatcaacaaaacggagcccgatgcctgggatattaaccgcgcgcaaaatggctcttacgcggcgggccgcgaaggggtacgcaacaaagatattaacgccctgctgtcgtggaaagttacgccgcagcagatcctggattttagctacgcctatagccgccagggcaatatttatgccggcgatacgcagtacagcaacagcaatatgagcccaaatggcctggtggatacgctgtacggtcaggaaaccaaccggctatatcggcagacctggggcctgacctacaacgggatctgggactggggccagtcgaaggcgggcgtctactacgaaaaaaccaacaatacccgcctgcaggagggcaccaccggccgcgttgaagggatgatcaatagcgatgtctatgacaccagccgcctggagtcgtggcgctcaaccgctgaggtgaatctccccttcaactggctcgctgaacagaccctgactttgggcatggaatggaatcgcgatgagctaaacgatccggcgtccatgcaggccaccaccaccacggatgctctccccgggatttcgggcgatccttcacaacgcagccctaaaaacagcgccaccctgaccggtatctatctggaagacaatatcgaagcgacgccgggcaccaatattatcccgggtctgcgcttcgactatcataacgacttcggcagcaactggagcccgagcctgaacctgtcacaggatctgggcgatatgtttaaggtcaaagcgggcatcgcccgggtatttaaagcgccgaacctgtatcagtcgagcgaggggtatcttctttctacgcggggcaacggctgcccgataagtattgccgatggcaactgctatcttttgggtaacccggacctcgatccggaaatcagcatcaataaggagattggccttgagtttaacctgaacggttataacgccggcgtcacctggttccgcaacgactacaaaaacaagatcgtctccggcaccgagatactgggtaataccgctaccggagcgaatatcctgcagtgggagaacggcgggaaagcggtcgtcgaaggccttgaaggcacgctgctggttccggtcattgccgatacgctcagctggcgcaccaatgccacttatatgatcaaatcggaaaacaaagataccggaaacccgctgtccgttattccgaaatacaccatcaataccctgctcgactggcaggtgaccagcaagttttcggcgaacgtcaactggactctgtacggtcggcagaaaccgcgggaatatgcggaaattcgtactgaaaacggcgtactggccaccaatgaagtgggctcctattccgtggttggtatcggcggcaactatcagctaatgaaagacctgcgcctgaacgccgggatcagtaacctgttcgataagcaaatttatcgtgaaaacgaaggggcttcgacctataacgaaccgggtcgcgcctattacgctggcgtcacgatctccttctaa

SEQ ID NO: 182936 - DNA, 1317 bp, Klebsiella oxytoca
atgcgtgcaaaccgcttttcatcactctctctgcttttcttcctcggaaaatggctgctcctcgcctttatcatcgcggtgctggcgggtacggcatcggcgttttttcttttctcactgcagtgggccacggcaacgcgtgaagctgacctctggcttatcgggctcctgccgttggccggttttgccgtcggctggatctacctgcgctacggcacccgcgtggaggccggcaataacctgattctggaagagattcacgaccctcagcgcatcattcccttgcgcatggcgccgctggtttttttcggcaccgttgtttctcatctgtttggcgcctccgtcgggcgtgaaggcacggcggtgcagatgggggcctcgatcgccgaccgttttacggcccttttccgccttaacgacgatgcacggcgaatgatactgatggccgggatcagcgccggtttctcttcggttttcggtaccccgctcgccggagcgctattcgggctcgaggtcctggctatcggccggatggactacaacgccattcttccctgtctgtttgccgcgattatcgccgatcgggtcggcatcatgtggggcgtgcagcatacgcactactttattaccggctttcccacgctggcgctctggacgctgctggccatcattatcgccggctgctgctttggcctcgcggcgcgcattttcgccgacagcacgcatgcggtcggcgccttcatgaaaaaacggattcactacgcgccgctgcggccgtttattggcggactggcgattgccggcgccgtctggctgctgcacggagagcgctatattggcctgggcataccggtgatagtagacgctttccagcatccgctggcgccgtgggactgcttcggcaaactgatcttcaccgttgtctctttaggaagcggatttaaaggtggcgaagtcaccccgctgttttacgtcggcgcgacgctgggcaatgcgctggcgccgctgctgcatatgccgccaggttttctggccgggataggttttgtcgccgtctttgccggcgcggcgaatacccccatcgcctcgacgctgatggcgattgagctatttggcgcggaaatcggtgtttacgcggcgctggcctgcgtggtggcatggctggtctcgggctataccggtatttatcgttcccagcgcatagcctgcctgaaacaaagctatgtcccgaccggcatcagactggctgagctcccggcgtggtaccaatcgcaaacacgccgtcaaaaaaccgacaacgaaacccccacctcctga

SEQ ID NO: 182937 - DNA, 540 bp, Klebsiella oxytoca
atgaagcagtttcttgattttttaccgctggtagtcttcttcgcattctacaagctttatgatatctacgccgcgacgaccgcgctgattatcgctaccgccatcgtgctgatttacagctgggtgcgctatcgtaaagtcgagaaaatggcgctgattacctttgtgctggtggccgtatttggcggcttaaccatcttcttccataacgatgagtttattaaatggaaggtgacggttatctacgtgctgtttgccagcgcgctgctgtttagccagtgggtgatgaagaagccgctgatccagcgcatgctgggtaaagagctgacgctgccgcagcaggtgtggtcgcgtctgaatctggcctgggcggtgtttttcatcctttgcggactggcgaatatctatatcgctttctggctgccgcagaatatctgggtcaacttcaaggtctttggtttaaccgccctgacgctggtattcaccctgctgagcggcgtgtatatctatcgccatatgccgcaggacgacaaccactaa

SEQ ID NO: 182938 - DNA, 744 bp, Klebsiella oxytoca
atgtctatcacggcgaagtccgtctaccgtgacaccgggaactttttccgcaatcagttcgttactatcctgctgattgcgctgctatgcgcgttcattacggtagtacttggccatgccttttcacccagtgaagagcagctgtcaatactgagccagggcgatagcctggcgggtagcggcgggctgttcgaactggtccagagcatgacgccggagcagcagcaaatcctgctgcgcgcgtctgcggcctccaccttctcagggctggtaggtaacgccattcttgccggcggcgttctgctcatgattcagatggtctccgccggccagcgagtcagcgccctgcgtgcgatcggcgcttctgcgccggtgctgccaaagctgctgctgctgatcctgctgacgacgtttatcgtgcagatgggaatgatgctggtggtggtgccgggcgtcctgctggctatcgtgctctctttcgcaccggttatgctggtgcaggataaaatggggattttcagcgccatgcgtagcagtatgcgtctggcctgggccaacgtacgtctggtggcgccggccattatcggctggctgctggcgaaaacgctgctgctgctgtttgcctccagcttcgcggtcctgacgccaaacgttggcgcggtggtaataaataccctcagcaatcttatctccgcattgttgctgatctatttatttcgcttgtatatgctcattcgtaactaa

SEQ ID NO: 182939 - DNA, 639 bp, Klebsiella oxytoca
atgaaaaagttagcagcggcggttgttattctgagcagtctttccggcagcagcgtctgggcgcatgaagccggtgaattttttattcgcgcgggttcggcaacggtcagaccgaccgaaggcgcgggcggcacgttaggcagcctggggggctttaacgtcagcaataatacgcaactgggtttgacgttcacctatatggcaacggataacatcggcgttgaactgctggccgccacgccgttccgccataaagtcgggaccgcggcaaccggcaatattgcgaccgttcaccatttaccgccgacgctcatggcgcagtggtattttggcgactccagcagcaagctgcgtccatacattggcgcgggtatcaattacacgaccttcttcgatgagagcgtgaacgatacgggtaaaaagaccggcatatccgatctgagcctgaaagactcctggggggcggcaggacaggtggggatggactatctgattaaccgcgactggctgattaacatgtcggtgtggtacatggatatcgacaccaccgccaactataagctggcgggcgcgcagcagcacgacagtatccgtctggatccgtgggtgtttatgttctctgccggataccggttctaa

SEQ ID NO: 182940 - DNA, 246 bp, Klebsiella oxytoca
atgcacgaggaagtaccactgaaatattacgacattgcggatgagtattcgacggagtccgccgagcccgtcagcgagtcagaacgtgagcccctggcgcgctattttcaactgctgattacgcggctgatgaataacgaagaaatcagcgaggaggcgcagggagagatggccatacaagcgggcatcgatcggcagcgcatcgatgatatcgcggtattcctgaataaatggggtaatgagtag

SEQ ID NO: 182941 - DNA, 705 bp, Klebsiella oxytoca
atggtcgcttcccctaaaacagtactgatcgcaggcgcgtcacgcgggcttgggcacgccatggctgaacagtttctgctgcatggctggcaggtcatcggcaccgtacgcgatctctcacaaacgacgccgctgcaccatctggccgaggcttatcctggacgggtgcgcattgaggcgctggatatttgtgatagcgacgggatcgcggcgctgcgcaatgcgcttgccgatagcgtgctggatatgctgttcgtcaacgcgggcaccaccaaccgcgatcccacacaaaccatcggcgagatcgcgacggaagagtttattcacgtcatgctgaccaacgcgctcgcgccgatgcgggtcatagaaaatctgcaggcgctggtgctgccgcaggggctgattggcgttatgtcttcaggacaaggcagtttgagcaataataccggcgggcagcgcgagctgtatcgcgggagcaaagccgcgctgaatatgtttatgcgcagctttgccgcccgccctgccagcgtatcgcatccgatggtggtcatggcgccgggatggatccgcacggcccttggcggcgagaacgccccgctcaccatggcggagaccatcccctcgctggtgaacgtgctgctgaaaaaacaaaatcgtcccggattagagtatctggattatcgcggatgtcgcgtgccgtggtga

SEQ ID NO: 182942 - DNA, 900 bp, Klebsiella oxytoca
atgaacgatcctgatttcaatttactggcggcgctggatgtactgttgagcgagaaaagcgttgccggggcggctaaacggcttaagctcagcgcttcggcgatgagccgcacgctgacgcgcctacggcaggtcaccggcgacccgctactggtcagagccgggcgaaacatggtgctgactccgcacgcagaaagtctgcaggcgcgggcaaaaaacgttgtctccgagatgcgcgcggtgctcaacgcttcgcctgcgccgctgagtttatcgaccctcgagaagcgatttactttgcgtaccaatgagggatttatagacgcttttggcccggcgctggtgaacgccgccgcgcgggaagcaccgggcgtgacgctggaatttgtcgctaagccggagaaagatgcccgatttttacgcgaggggcgggtggacctggaaattggcgtactgaaaaatatggggccggagatccgcctgcaggcgctgtttcgcgatcgttttgtcatcgcgctggccaaaaaccatccgctggccgcctttgccgacatgtcgcgagaacaatttgtttccgtggggcacgtcattacctcccgtcgcgggttgatacgcgggccagttgatgacgcgctggcggcgtgtggcatgcgccgcaggattgccgcggtggtgcctggtttttccgccgcgctggccgtggcccgggattctcagctcatcgccgttgtcccggcctcctgcctgcagagcgcggcgggaaaagagatggtcgcttttcctctcccggtgagtacgccggagataacggtgtcacaaatgtggcatcctcgccacgagcatgaattagcacatcgctggctaaggcagctggtgcgcagagtgtgtcgacaaccataa

SEQ ID NO: 182943 - DNA, 948 bp, Klebsiella oxytoca
atgaaagcagccgtggtttttgacctgcagcagggtccggtgtggtccgattttcgcgatccgcagcccggtgagcatcaggcgttagtcgaggttcgggccgccgccatcagtcatgtagtgaaaggccgggcctccggtaagcattatagtttcgatggccgcctgccttttgtcccgggtatcgacggcaccggtatcttacccggcggagagcgcgtctatttcgccttccccgtcgcgccctggggcagcatggcgcaacgggctcccgtcgccttaaaccactgtctgccgctgccggatgcgctggacgatatcaccgccgcggcaatggctaatccggggatgtcggcctgggcggcgctggtcaaacgcgccgggatgaaagccggggaaacggtactgatcaacggcgccaccggcagcgccgggcagctggcggtacaaatcgcccgttttctcggcgccagaaaagtgatcgcctgcgggcgaaacgtggagaagctggccgccctcggcgctgatgaaaccgttaacttaagtcaggatgaggcggacttacggacgcagtttgccgggctggcggcgcagcagattgatgtcgtcgtcgattatctgtggggacgtagcgccgaacttttgctgccagcgctggcaaaacacagcccaggaaatgcgccggtacgttttattcaggtcggttccctttccgccgccgatatctctctcaatggcgcggtgctacgctcctcgccgctgcagctgatgggcagcggaattggcagcctttctgttccccagctgctggccgccaccggggagatgctgcaggccgccgtcgccggcggattgactatcgccacgactccccggccgcttcgcgaggtcgccacggcgtggccgcaggacgacagccagaaacgcaccgtctttgtcgtcgattaa

SEQ ID NO: 182944 - DNA, 456 bp, Klebsiella oxytoca
atgcaagatgcacataataattacgacatcaccggctttcacggcgcgctgctcgatatcatcagcgtgatgaaccagccaatgcgcgacgagcagatactgcaggcggctggggtccagctcgatcggatcctcttcccgctgctggtggcaatagggcgcaggggacccgttggggtcgttgaactggcggatagcctcggtcgcgattacaccaccgtcagcaggcaggtgaagaagctggaagcgcagcagctggtacttaagcagcccaatgcaaaagatcgccggattagcgaggtgacgctcagcgaagcggggcaggcgatgatcgatcgtatcgcgggagcaagaacgcggctgatgaatgaggtgctggccggatggacgcaagaagaggtgatggcgctgtttcgcctgacgcgtaaatacgccgacagcttacagctgaaataa

SEQ ID NO: 182945 - DNA, 810 bp, Klebsiella oxytoca
atggaacgttatgagacgctgtttgcacaactgaaagatcgccgggaaggcgcgtttgttcccttcgtcaccctcggcgatccgaatccggaacagtcgctgaaaattatcgatacgctgattgaagccggtgccgacgcgctggagctgggcattcctttctccgacccgctggcggatgggccgaccattcaggacgccaccctgcgcgcttttgccgccggggtgacccccgcgcagtgcttcgaaatgctgacggcgattcgccagaaacaccctaccattcctatcggcctgctgatgtacgccaacctggtgttcagccccggcatcgatgaattctacgccgcgtgcgaacgcgcgggcgtcgattccgtgctggttgccgatgtccccgtggaagagtccgcgccgttccgccaggccgcgctgcgccacaatatcgcgccgattttcatctgcccgcccaatgccgatgacgatctgctgcgccagatagcctcttacggtcgcggttatacctacctgctgtcgcgggcgggcgtgaccggcgcggaaaaccgcgccgcgctgccgctgcatcatctgattgaaaagctggccgagtaccacgccgcgccgccgctgcagggctttggcatctcggcgccggagcaggttaccgccgcgattgaggccggcgcggccggcgcgatttccggctcagccatcgtcaaaatcatcgagcggaacgtgaacgacccgcaggccatgctggcggaactcaaggctttcgcccgaagcctgaaagccgccactaaagcggcttaa

SEQ ID NO: 182946 - DNA, 1194 bp, Klebsiella oxytoca
atgagtactttactgaacccctactttggcgaattcggcggaatgtacgttccgcagatcctgatgcccgccctgcgccagctggaagacgcgttcgtcagcgcgcaaaaagatccggcattccaggccgaatttaccgacctgctgaaaaactacgccggtcgtccgacggcgctgaccaaatgccgcaacctcactgaaggcacccgcacgacgctgtatctgaaacgtgaagacctgctgcacggcggcgcgcataaaactaaccaggtgctcggccaggctctgctggcgaaacggatgggcaaaacggaaattatcgccgaaaccggcgccggccagcacggcgtggcctctgccctcgccagcgccctgctcggcctgaagtgccgcatctacatgggcgcgaaggatatcgaacgccagtcgccgaacgttttccgcatgcgcctgatgggggcggaagtgatcccggttcatagcggctcttctacgctgaaagatgcctgcaacgaggccctgcgcgactggtccggcagctacgaaaaagcccactatatgctcggcaccgccgcgggtccgcacccgttcccgaccatcgtgcgtgaattccagcgcatgattggcgaagagaccaaagcgcagctcctcgagaaagaaggtcgcctgcctgatgcggttatcgcctgcgtcggcggcggatcgaacgccatcggcatgttcgccgattttatcgacgaaaccgctgttggcctgattggcgtggagccggcaggtcacggtattgagtccggcgagcacggcgcgccgcttaagcacggtcgtgtgggcatctatttcggtatgaaatcgccgatgatgcaaaccgaagaaggccagattgaggagtcctactccatctccgccgggctcgatttcccgtcagtgggcccgcagcatgcttatttaaacagcattggccgcgccgattacgtgtcgattaccgatgacgaagcgctggaggcctttaaagagctatcacgccatgaagggattatcccggcgctggaatcctcccacgccctggcgcacgcgctgaaaatgatgcgtgaaaacccggaaaaagagcagctgctggtggttaacctctccggccgcggcgataaagacatcttcaccgtacatgatattttaaaagcgcgaggggaaatctga

SEQ ID NO: 182947 - DNA, 1359 bp, Klebsiella oxytoca
atgcagaccgttttagcaaaaatcgtggccgacaaagcgatttgggtagaagcccgcaaacaacaacaaccgttagccagttttcaaaatgaagtggtaccgacgcagcgcaatttttacgatgccctcgccggaacccgcaccgcgtttattctcgagtgcaaaaaggcctcgccatcaaaaggcctgattcgcgaagattttgatccggcggccatcgccggcgtctacaagcactacgcctcggctatctcggtgctgtgcgacgagaaatatttccagggcagcttcgatttcctgccgatggtcagtaaggtcgcgccgcagccgattctctgtaaggacttcaccatcgatccttatcagatttacctggcgcgctactaccaggccgacgcctgtctgctgatgctttcagtgctggatgatgagcagtatcgccagctctccgccgtcgcgcacagcctgaacatgggcgtgctgaccgaagtgagtaatgaagaggagctggagcgcgcgattgcgctgaaggcgaaagtggtcggcatcaacaaccgcgatctgcgcgatatgtcgattgatctcaaccgtacccgtaccctggcgcctaagctcggtcacgatgtcacggtgatcagcgagtccggcatccatacctacgcggaagtgcgcgaactgagccacttcgccaacggtttcctgattggctcagcgctgatggagcacgccgatctcaacgccgccgtgaagcgcgtgctgctcggcgagaataaggtctgcggcctgacccgcccccaggatgcccaggtggcgtatgaatccggcgcggtctacggcggcctgatttttgtcccgacgtcgccgcgcgcggtgaacgaggcgcaggcgcaagcggtgatcgccagcgcgcctctgagctatgtcggcgtattccgcaataccccggtggcggaagtgatcgcccgggcggaaaacctcgacttagccgccgtacagctgcacggcagcgaagaccagacctatattgataccctgcgcgccgaacttccaccgaaggtgcaaatctggaaagccctcagcgtaggtgaaacgctaccgccgcgcgatctgcgccatgtcgataaatacgttctcgacaacggtcagggcggcaccggccagcgtttcgactggtccctgctgcagggccaggacctgcataacgtcatgctggcaggcggcctcggcgccgataactgcgtagacgccgccaaaagcggctgtgccggactcgattttaattcaggcgtagagtcgcagccgggtattaaagatgccgacaagctgtcctctgtgtttcaaacgctgcgcgcatattaa

SEQ ID NO: 182948 - DNA, 1596 bp, Klebsiella oxytoca
atggccgacatcctgctgctcgataatatcgactcttttacctataacctggcagaccagctgcgttcgaacggccataacgtggtgatttaccgcaactccgtcccggcgcaggcgctgattgagcgcatcggcaccatgaaaaacccggtactgatgctttctccggggccggggacgccgagcgaagcgggctgcatgccggagttgctgacccgcatgcgcggcaagctgccgattatcggtatctgcctcggccatcaggcgattgtcgaagcctacggcggctacgtcggtcaggccggtgaaattcttcatgggaaggcatcaagcattgagcacgatggccaggcgatgtttgccggactgagcaatccgctgccggtcgcccgctatcactcgctggtgggcagcaatatcccggccggactcaccatcaacgcccacttcaacggtatggtgatggcggtgcgtcacgacgcggatcgcgtttgcggcttccagttccaccctgagtcaattctgaccacccagggggcacgcctgctggagcaaaccctggcctgggcgctgcagaagctggagcagaccaacaccctccagccgattctggaaaaactgtaccaggccgaaaccctgagccagcaggagagccatcagctgttctctgcggtggttcgcggtgaagtcaaacccgagcagctggccgccgcgctggtgagtatgaaagtacgcggtgagcatccgcaggaaatcgccggcgccgccaccgcgctgctggaaaacgccgcgccgttcccgcgtccggattatccgtttgccgatatcgtcggtaccggcggcgacggcagcaacagtatcaatatttcgaccgccagcgcgtttgtagccgccgcctgcggcctgaaggtcgcgaagcacggcaaccgcagcgtgtcgagtaaatccggctcttccgacctgctggcggcgttcggtatcaatctcgatatgaatgccgataaatctcgccaggcgctggatgaactgggcgtttgcttcctgttcgcaccgaagtaccacaccggtttccgccacgcgatgccggtccgtcagcagcttaaaacccgcaccctgtttaacgtgcttgggccgctgatcaacccggctcatccgccgctggcgctgattggcgtctatagcccggaactggtgctaccgattgcggaaaccctgcgcgtgctgggctatcagcgcgccgcggtggtgcatagcggcggtatggatgaagtgtcgctgcacgcgccgacggtggtcgcggaactgaaccatggcgaaatcaagagctaccagctcaccgccgccgactttggcctgacgccttaccatcaggagcagctggcaggcggcacgccggaagaaaaccgtgacattcttacgcgcttgctacaaggtaaaggtgaagccgctcacgaagccgccgttgccgccaacgtcgccatgttgatgcgtttacatggacacgaagacctgaaggccaacgcgcagcaagtcatcgatgtgctgcatagcggagcggcctatgacagagtgaccgcattagcggcaagagggtaa

SEQ ID NO: 182949 - DNA, 1563 bp, Klebsiella oxytoca
atgcaaacatcaaaaccggcactcgagcttctcaccagcgacgccatctatcgggaaaaccccacggcgctgttccaccagctatgcggcgcgcgtccagccaccctgctgctggaatccgcggatatcgacagtaaggatgatttaaagagcctgctgctggtggatagcgcgctgcgcattaccgcgctaggtgacactgtcactattcacgcattttccgccaacggtacggcgttactcgaactgctggatagcgcgctgccatccggcatcgataaccagcgtcagccaaatagccgggtattaaccttcccaccggtcagcgcgctgttggatgaagatgctcgcctgtgttcactttcggtattcgacgcttttcgcctgctgcaggatctgataaccgtcccgcagcaggagcgcgaagcgatgttcttcggcggcctgttcgcctatgacctggtcgctggctttgaagacctgccgccgctggagagcgacaccgcctgcccggattactgcttctatctggcggaaacgctgctggttatcgaccatcaaaccaaaaacacccgtatccaggcgagcctgttcacgccgctggaaagcgaaaaacagcgtctgctacagcggctcgctcagcttcgtcagcagctaaacgagccgccggcgccgctgccggtgaccacggttgccgaaatgagctgcgactgcgatcagagcgacgaagagtacggcgccgtcgtgcgtaaaatgcagcgcgccatccgcgcgggcgagatttttcaggtcgtgccgtcgcgccgcttctcgctgccctgcccgtcgccgctggccgcttatgatgtgctgaagaagagcaacccgagcccgtacatgttctttatgcaggacaacgatttcaccctcttcggcgcgtcgccggagagttctctcaagtacgatgccaccaatcgccagattgaaatctatcccattgccggtacccgcccgcgcggccgccgcgcggatggttcgctggatcgcgatctcgacagccgcattgagctggagatgcgcaccgaccataaagagctctccgagcatctgatgctggtcgaccttgcgcgtaacgacctcgcgcgcatctgtaccccgggtagccgctacgtcgccgacctgaccaaagtcgaccgctactcctttgtgatgcacctcgtctcccgcgtggttggcgagctgcgccgcgatcttgacgtgctgcatgcctaccgcgcctgtatgaatatgggcaccctcagcggggcgccgaaagtgcgcgccatgcagctaatcgccgccgctgaaggcaaacgccgcggcagctacggcggcgcggtgggctactttaccgcccacggcgacctcgatacctgcatcgtgatccgttccgcctacgtgcaggatggcgtcgccacggtgcaggccggcgccggtatcgtgctcgactccgttccccagtcagaagcggatgaaacccgtaataaagctcgcgcggtgctgcgcgctatcgcccaggcccaccacgcgaaggagattttctaa

SEQ ID NO: 182950 - DNA, 870 bp, Klebsiella oxytoca
ttgagcaacaccaattacgcagtgatttacgacctgcacagccataccatcgcctctgacgggcgtctgactccagaagaacttgtccatcgcgcccaccagatgcgcgtcggcaccctggcgattaccgaccacgataccgtggcggcaattcccgcggctcagcgtgaaattgaacgtgccggtttaccgttggcgctgattaccggggtggaaatttccactctgtgggaaaatcatgaaattcatattgtcgggctgaatatcgatatcgaccatccggcgatgaccgcgctgctcgatgaacagaaagcgcgtcgccagatgcggggtcagcagatcgccgagcggctggaaaaagcgcggatcccgggcgcctgggaaggggcgctgaagctggcggacggcggtgcggtgacgcgcggccattttgcccgttttctggtggaggccggctatgccaacaatatggctgacgtatttaagaagtatctggcgcgcgggaaaaccggttacgttccgcctcagtggtgtacaataaaacaagcgattgatgtcattcatcattctggcggtaaagcggtcattgcccatcccgggcgctacgatctctccgccaagtggttaaaacggctgttggcccattttagcgagcaggggggcgatgcgatggaggtggcgcagtgtcagcaggcgcctcacgagcgcgcacagcttgccgcttacgccgtgcagtatggcctggatgcctcgcaggggtctgattttcatcagccctgcccgtggatcgaactgggccgcaaactttggctacccgcgggcgtggaagggatctggcgcagttgggaagtggccgtagaacaaaattga

SEQ ID NO: 182951 - DNA, 621 bp, Klebsiella oxytoca
atgagccagtttttttatatccatccggaaaatccacaggcgcggttaattaaccaggcggtggacattgtgcgtaaaggcggggtcatcgtctatccgaccgactccggctacgcgttaggctgcaaaattgaagataaaggcgcgatggagcggatttgccggatccgtaatctgccaaacggccacaacttcaccctgatgtgccgcgatttgtccgaactgtcgacctattcattcgttgataacgtggcctttcgtctgattaaaaacaataccccgggtaactacacgtttatcctcaagggcaccaaagaagttccgcgccgtctgctgcaggataagcgtaagaccatcggtatgcgcgtgccgtccaacccgattgcgcaaatgctgctggaaacgttgggcgagccgatgctctccacttcgttgatgctgccgggaagcgactttaccgaatccgacccggaagagatcaaagatcgtcttgagaagcaggttgacctgattattcacggcggctatctgggccagcagccgaccacggttatcgacctcactgaagatgcgccggttgtggtgcgtgaaggcgtgggggacgtaacgccattcctgtaa

SEQ ID NO: 182952 - DNA, 888 bp, Klebsiella oxytoca
atgagcgagaaattacaaaaagtgctggcccgcgctggccacggctcccgccgtgaaatcgaagccaaaatcgaagctggccgcgtcagcgtcgatggcaaaatcgccacccttggcgatcgcgttgaaattgtcccgggtttaaaaattcgcatcgacggtcatctgatttcggtgaaagagtctgcggaacagatttgtcgcgtgctggcttactacaagccggaaggcgaactctgtacccgtaacgacccggaagggcgaccgacggtgttcgatcgtctgccaaagctgcgcggcgcgcgctggattgccgtcggtcgtcttgacgtcaacacctgcggcctgctgctgtttaccaccgacggtgaactggcgaaccgcctgatgcacccgagccgcgaagtggaacgtgaatacgcggtgcgcgtatttggccagatagatgatgacaagctgcgccagctctcgcgcggcgtccagctggaagacggcccggcggcgttcaaaaccatcaagtttaccggtggcgaagggattaaccagtggtacaacgtcacgctgaccgaaggccgtaaccgcgaagttcgccgcctgtgggaagccgttggcgtacaggtcagccgcctgatccgcgtgcgctacggcgatattctgctgccgaaaggcctgccgcgcggcggctacaccgagctggacctggcgcaaaccaactacctgcgcgaactggttgagcttacgccggaaaccacctctaaggtcgccgtcgaaaaggatcgccgtcgcatgaaggcgaatcagattcgccgcgcggttaagcgccacagccaggtgagcaataataataacaaccgtcgttccagcagccgtaataacggtaacggttaa

SEQ ID NO: 182953 - DNA, 1365 bp, Klebsiella oxytoca
atggaaacagcaggaaaactttcggcaagctatgtggttatcggcgttaaagaaaaaatagggtatggttttggcgatttcgcctctaatttatccttcggcttcgtttctctgtttttactttttttctataccaatatttacggcattagcgccgtacaggcgagcctgatctttgttattgcccgcgtggttgatgcggcctttaatattcttattggttttgccatcgataaaacccacagccgctacggtaagcttcgaccctggttgttgtatggttcaattccgctcggcttcttaacggtgctctgctttgtgcctttcggcggtgaggccaaattctacttcgcactgatttcctatactatttattgcctggcctatacggcggtaaatacgccttattcggcgctgaccaaccgtttgacccagcatgaagcctcccgttcatcgctgtcggtataccggtttgtcctggcgatcgttggctatctgattgtgtccactaccgcggacaggctgatttccccgtttagcgataaacagctggggtacgtcttcgccgtctcttgctttgcgctgctggcgacgtttttgttccttgcctgcttcgggatgaccaaagagcgcgttggtgaagaagaggaagagaccccggcgccaacgctgcgggaaatgttgaaggcggtggcaggcaacgcgccgctaattaacctctccatgttcaccatctttttttatattgcctataccgtgtggatggcgatcgctatttactttatcaaatatataattggtagcgaaggttttacttccaccttctttatgattcagtcggcggcttatattgtcggtaccgttatttcggaaaaaatcattgcgttgataggtaaaaagaaaatgacgctggtggcgctgtcgatcggcgttgcgggcgtactgatgcaatattttatcgctggcgacaatatctggctgatcatgaccggcgtgtgtctgtacagtattacgctggggatgggttttgtttcaatgtggtcaatgattgccgataccgtggaatatgccgagtggcaccatggggtgcgcaccgaaggcgcaatttacggtttctttaatttcatcaccaaaatagcgatggccatcggcggcggctgcgcgggctggatgctggactattaccactatgacgcgggcaacattaccgccagcgcgattaacggcattaacgtactgatgacgctatttcccggcgcgatgtttgcgctcagcgcactgtttgtcgcctgctattcgctggatgaaaaaacctatcgcgatattgtgcaaaaaatcagcctgcgcaaacagaacgcgctttaa

SEQ ID NO: 182954 - DNA, 2361 bp, Klebsiella oxytoca
atgaataacgattttaacaccaccctcgccgcgatgagcgcggaagaaaaagtggcgctgctgaccggcagcggcctgtggcggacggcctcgctgccgcagcacggtatcgaagatatcattatgaccgacggcacctacggcgtgcgctacagcagcgcgcagattgatggccgggaaaagtggagcatggatgattttatctcggtcatcacccaaaccgcagaccaggccagcgcggaagagcccgccgcgaaaggggggagtgaggcgctattcagcacttcgctaccggcgacctgctttcctaatggttccagcctggcctgcagctgggacgtggagctggtgcatcagatgggggaagcgctggggcgggagtgtcagcaaatgggcgtcgggattctgctcgggccggggattaacattcgccgtacgccgctggccgggcgaggctatgaatattacgccgaagacccggtggtcagcggcgatattgccgctgcgctgatcaacggcctgcagcaggagggggttggtgccagcctgaaacactttgcggcgaacaactcggagtaccgccgcacggaaatggattcgattattgaagaacgggcgctgcgggaaatctatctggcgggtttccagcgcgcgattgcgaaatcccggccgtggacggtgatgtcttcctacaatcgtcttaacggcgtgcaaacctcccaggatccgtttttgctcactcaggttttgcgcgatgagtggggatatgaagggctggtgatgtccgactggtacggtattaaagatcgccccgcatcgctgatggcgggtaacgatctggcgatgcccgaaacccgccgcgataaacaaactctgctggcggcgattgaagccggagaggtgccgatggcggtggtggaccgcgcctgtctccgcatgctggaactgctcgacaaggtccagcgccatcgccgcccgcaaacgcgagccgattttacggcgcaccacgcgctggcgcagcggcttgccggtgaatccattgtcttgctgaaaaatgaagataatctgctgccgctgcgtccggagaaaacgccgcgcgtcgcggtgctgggtaaaccggctcaggagccggtgatccaggggtccggatgcgcgaccacggtgccgtatctgctcgatcggccgctggatgaaatttttgacctcgccggcgacgacttcagcgtctcctgggccgtgggcgcgccggacgatctgcgctgcgatgaacaggcgctggcgcaggcctgccgcgtcgcgcaggaggccgacgtggcggtgatcttcgtcagcaccgccgtaggcgaagatggcgaaaacggcgatcgtcaggatctgcatattctgccggtgcacgaacggttaattcgcgaagtggcgacggtccagccgaatatcgtggtggtgctggcgaatagcgatgcggtggtgatgccgtggctcggcgagtgcaaagcgctgctggaaacgttctttgccgggcaagggatggggcgcgcggtggcggaaatcctcttcggccagcgtaacccctgcggcaaactgacggtaacggtgcctaattccctggaggaaacgccggcctggctgcactatccgggcgaaaacctgcgtcatcattacggagaagggctttttgtcggctatcgctattatgataaacgtcgtatgacgccgcagtttccgtttggctttggcttaagctatacccggtttgcgtacgataatatcgcgctgtcagcccgccgtgcaggcgcaggcgagacgcttaccgtgtcgttcgacctgaccaactgcggagagtatgcgggcaaagagatcgtccagctgtacgttagcgcgccgaagggggagctgattcgcgaagtgcagtcattaaaagcgttcagcaaagtggcgctggccgccggagagacccgtcgcgtgagcctgcagctgcccattggcgagctggcctgttatcatccgggcctgggtgattgggtcgtgacgccgggcatctggcaggttcgcgtcggcgcctcatcacgggatctgccgttgatcgcggagattgaggtagattgtccgcagcggtacgtcccgctgcgcgatgataactctctacaacagctgatccagcagccggaggcctttgcccgcgtagtgaagctgattgccgataagagccagatgccggcggagcaggtgcgtgaaaaactgattcgcctggcgccggatctgttctgcgggctgctgattgcgctgaccgaattcctggcgctggatatcgaacgcgacgagcttaacgccgtgctggccggcgctcatcattgccaatga

SEQ ID NO: 182955 - DNA, 975 bp, Klebsiella oxytoca
atgtttcctttttcagtgactcaccctcgcccggtcacccagagcggacgacaaacggcgaacagcggctacgagctgattgcctttgacgcggagaagctgaacgtgtttgccgcggaggttcgctactgcgagcctcactggcatccggctccggagctgattaccgtgctggcggggcgatttaccctcgtcgtcggccagcaaagcctggagctggcgcagggagacatgctgtatatcaatgccgaagaggtccattcgctgagcgccgaggaggcgggcagccagctgctcaccgtacagttttcccccggcctgtttgatgaacttcatccctcgccgcagctggactggagtacctgcggacgaccttactctccggcagacagcgaggtacgccagcggctggcgaggctactggaacagctgatcgataaccacgcgccatttcagcgtatcgcggcgatttatctgctgctggatgcggtcgtctccgccggaaagccgacgcggcgcgccgaaagctcgctgcgcgacgaggcgatgatcaaaaaaggcattgattttatcaatcaacactttgatcagccgctgacgctgagcgaggtcgcctgccatagcgggatgagctactcctggttctcgcggctgttcaaaaaggtgagccggtataattttaaagagtatctgacgctggtgcggctaaataaagcccgcaccctgctgcgcgatacccgcaccccgatcacggagattagccacagctgcggctttcaggaacacaagtatctgatcgccgcctttaataaatactgcggcgtcacgccaaccgaataccgcaagcgcttcgtctcgcggcaaaatatgcgcgaaagcgaactggcgctgggggaggattgcctgtgcctgccgctgaatcatgcgctgctcaagcggctggcggctagtagtcgatccccatctgcgctttga

SEQ ID NO: 182956 - DNA, 591 bp, Klebsiella oxytoca
atgagtgatgaacgccaccgcgaacgccagcagcgggtaaaagataaagttgacgctcgcgtcgccgccgcgcaggaagagcgcggcatcgtgatcgtctttaccggcaacggtaaaggcaaaaccaccgccgcttttggcaccgtcacccgcgccgtcgggcacggtaaaaaagccgccgtcgtgcagtttattaaaggtacctggccaaacggcgagcgcaacctgcttgagccgcacggcgttgagtttcaggtgatggcgaccggttttacctggaatacgcaggatcgcgaaagcgacaccgccgcctgcctcgcggtctgggagcacgggcgccgcatgctggctgatgaaagcctcgacctcgttttgctggacgagctaacctacatggtggcttatgattacctgccgctggaagaggtgcttaccgcgctgcgcaaccgcccggcgcaccagacggtgattattaccggccgcggctgccaccgtgagattaccgaactggccgataccgtcagcgagctgcgcccggtgaagcacgcctttgacgccggaatcaaagcgcagatggggatcgactactag

SEQ ID NO: 182957 - DNA, 762 bp, Klebsiella oxytoca
gtgcactatcaaccgcaacgtcacctgttacaggaccgcatcatcctggttaccggcgccagcgacggcattggccgtgaagccgccctgacctattcccgctatagcgccagcgttatcctggtcggccgcaacgaagaaaagctgcgcagcgtcgcgcacgaaattcagcaggcgggcggcattcccgcccgctggtttactctcgacctgttaacctgcacgccgcaggagtgccagcagctggcgcagaaaatagccatccactacccgcgcctcgacggggtgctgcacaacgcgggtctgttgggcgacgtgtgcccgatggttcaacaaaagccggaagtatggcagcaggtgatgcaggtgaacgtgaacggcacctttatgctcacccaggcgctgcttcctttattacttgaatccgaatcgggttcgctggtctttacctcttccagcgtcggccgccagggacgcgcgaactggggcgcgtacgccgcgtcgaaattcgccaccgagggcatgatgcaggtgctggccgaggagtatcagaaccgtcatctgcgggtcaactgcattaacccaggcggcacccgaaccaaaatgcgcgccaatgcgttcccgacggaagatccgcaaaaattgaaaacccccgctgatatcatgccggtttacctgtggctgatgggcgacgacagtcgtcgcaaaacgggaatgacctttgacgcccagccgggccgcaaaccaggaatcgcacaatga

SEQ ID NO: 182958 - DNA, 1092 bp, Klebsiella oxytoca
atgtacactgtgcgccaacgtcagcggtttacacaaggtgaaaacgtggaattacttgctcaatatggcctgtttttggccaaaatcgcgaccatcgttgtcgcaattgcggttatcgtcgccattattgttaacctgactcagcgcaaaaaacagcgcggcgagctgcgggtcaccaatcttagcgagcaatataaggagatgaaggaagagctggcggtttcgttgctcgatgggccgcagcagaagctgtggcataaagcgcaaaagaaaaagctcaagcaggaagcaaaggcgtcaaaggcgcgggcgaagctcggcacaccagagccggacgtcaagccgcgcgtttgggtgctggattttaaaggcagtatggatgcccatgaagtcagcagcctgcgcgaagaaatcaccgccgttctggcggcggcaaaagcgcgcgaccaggtcgtcattcgccttgaaagcccaggcggcgtggttcacggttacggcctggcggcttcacagctgcagcgcctgcgcgacaagcagatcccgctaacggtcgcggtcgataaagtcgcggccagcggcggctatatgatggcctgcgtggcgaacagaatcgtcagtgcaccctttgctatcctgggctctattggcgttgtggcgcaaattcccaacatcaatcgcttcctgaaaaataaagatatcgacattgagctgcatacggccgggcagtacaaacgcaccctgacgatgctgggtgaaaataccgaagaagggcggcagaaatttcgcgaagacctcaacgatactcatcggctattcaaagattttgtccaccagatgcgccccgggctggatatcgagcaggtagcgacgggtgaacactggtacggcgttcaggcgctggaaaaaggccttgtggacgcggtggaaaccagcgatgaacttctgctggggctgatggataagcacgaggttatcagcgtgcgctatcagcagcgtaagaaaatgctcgagcggtttaccggcagcgcggcggaaagcgccgataaacttctgctgcgctggtggcagcgcgggcaaaagccgctgatgtaa

SEQ ID NO: 182959 - DNA, 252 bp, Klebsiella oxytoca
atgcaaggtacaacccaacccatcgatcgccagacgcttctggaaaaagccaacaaactcattcgcgaacatgaagatacgttagccgggatcgaggccaccgacgtcgttcagcgtaacggcgtgctggtgttcagcggcgagttctatcttgacgagcagggtctgccaacggcgaagagtacggcggtatttaatatgtttaaatacctcgcacacgagctgtctgataagtaccacctggcggattaa

SEQ ID NO: 182960 - DNA, 2598 bp, Klebsiella oxytoca
atgggtaaagctctcgttatcgttgagtccccggcaaaagccaaaacgatcaataagtatctgggtaatgactacgtggttaagtccagcgtcggtcatatccgcgatttgccgaccagtggctcagcttccaaaaagagcgccgactctacctccaccaaaggggctaaaaagcctaagaaggatgaacgcggcgctctggtcaaccgtatgggcgtggacccgtggcatgactggaatgcgcactatgaaatactcccgggtaaagaaaaggtcgtttctgaactcaaacagttggcggaaaaagctgaccacatctatctcgcaaccgaccttgaccgcgaaggggaagccatcgcatggcacctgcgggaagttatcggcggtgatgaacagcgctatagccgcgtggtgttcaacgagatcacgaagaatgcgattcgtcaggctttcgaaaagccgggcgaactgaatattgaccgtgtcaacgctcagcaggcgcgccgttttatggatcgcgtggtgggctacatggtctctccactgctgtggaaaaaaattgcccgcgggctgtcagcaggccgcgtccagtcggttgcggtgcgactggtggtcgagcgcgagcgcgaaattaaagcgttcgttccggaagagtactgggaagttgacgccagcaccacgacccctggcggcgatgcgttaccgctgcaggtcacgcataacggcgataagccgttccgtccggtaaaccgtgatgaaaccatggcggcggtcgcgctgcttgagaaagccagctacagcgtgctggagcgtgaagataagccgaccagcagcaagccgggcgcgccgtttatcacctccacgctgcagcaggccgccagcacgcgtcttggcttcggcgtgaagaaaaccatgatgatggcgcagcgtctctacgaagcgggccacattacctatatgcgtaccgactcgacgaacctgagccaggacgcgctgagcatggtgcgcggctacattggcgacaacttcggtaagaaatatctgccggagagcgcgaatcagtacgccagcaaagaaaactcgcaggaagcgcacgaggcgattcgtccatccgacgtcaacgtgctggccgaaacgttaaaagatatggaatctgatgcgcagaaactgtatcagctgatctggcgccagtttgtcgcctgtcagatgacgcctgcgcagtacgactccaccacgctgacggtgaaagccggcgatttcaaactgaaagcccgcgggcgtacgctgcgctttgacggctggaccaaagtaatgccagctctgcgtaaaggcgatgaagaccgtactttaccgatggtcaataagggcgacagcctgagcctggtcgagctgacccctgcgcagcactttaccaagccgccggcgcgttttagcgaagcttcgctggttaaagagctggaaaaacgtggcatcggtcgtccgtccacctatgcgtcgatcatttcgaccattcaggatcgcggctacgtgcgggtggaaaaccaccgcttctatgcggaaaagatgggcgaaatcgtcaccgatcgtctggaagagaacttccgcgatctgatgaactatgatttcaccgcgcagatggaagaccgcctcgaccaggtggctaaccatcaggccgagtggaagcaggtcctcgacagcttcttcggagactttacctcgcagctgcagacggcagagaaagatccggaagagggcggcatgcagccgaacccaatggtgctgaccaccatcgactgcccaacctgcgggcgcaagatggggatccgtaccgccagcaccggcgtattcctcggctgctcgggctacgcgctgtcgccaaaagagcgctgtaaaaccaccattaacctggtgccggaaaacgaagtgctcaacgtgctggaaggcgatgacgctgaaaccaatgcgctgcgcgctaaacgccgctgtaaaaaatgcggcacggcgatggacagctacctcatcgatccgaagcgcaagctgcacgtctgcggtaataacccgacctgcgatggctacgagatcgaagagggcgagttccgcatcaagggctatgacggcccgatcgttgagtgtgaaaaatgtggctccgaaatgcacctgaagatggggcgttttggtaagtatatggcctgcaccaacgacgagtgtaaaaacacccgtaagatcctgcgtaacggggaagtggcgccgccgaaagaagatccggtgccgctgccggagctgccgtgcgagaaatcggacgcctactttgttctgcgcgatggcgcggcgggcgtcttcctggccgccaacaccttcccgaaatcgcgcgaaacccgcgcgccgctcgtggaagagctgtaccgcttccgcgaccgtctggcggagaagctgcgctatctggccgatgcgccgcagcaggatccggaaggcaacaaaacgatggtgcgttttagccgtaaaactaagcagcagtacgttgcctcagagaaagatggcaaagccaccggctggtcagctttctatatagatggcaaatggactgaagcaaagaagtaa

SEQ ID NO: 182961 - DNA, 975 bp, Klebsiella oxytoca
atgaaactacagcagctccgctatatcgttgaggttgttaaccataatctgaacgtctcctccacggccgaaggcctgtacacctcacagccgggcatcagcaagcaggttcgcatgctggaggatgagctgggaattcagattttcgcccgcagcggcaaacatttgacccaggtcacgcccgcaggccaggagatcatacgcatcgctcgcgaggtcctgtcgaaggtcgatgcgatcaaatcggtagcgggggagcatacctggcccgataaggggtcgctgtacgtagcaactacccacacccaggcccgctacgcgctaccgggcgttatcaaaggctttatcgaacgctatccccgcgtctccttgcacatgcatcaggggtcgccaacgcaaatcgccgaggcggtgtcgaaaggcaatgctgacttcgctatcgcgaccgaagcgcttcatctttatgatgatttggtgatgctgccgtgctaccactggaaccgctccgtggtcgtcacgccagagcatccgctggcgtcgcgagagtcggtatcgattgaggagctggcgcagtatccgctggtgacttataccttcggcttcaccggccgctccgagctggataccgcctttaatcgcgccggcttaacgccgcgcatcgttttcaccgccaccgacgccgatgtgattaaaacctacgtgcgtctgggccttggggtaggggtaattgccagtatggcggtggatccggtttccgacccggacctggtgaagctggacgccaatggtattttcagccacagcaccacgaaaataggtttccgtcgcagtaccttcttgcgaagctatatgtatgattttattcagcgatttgcgccgcatctgacccgggatgtggtcgataccgccgttgccttgcgctcaaatgaagatattgaagcgatgttcaaagatattaaattaccggaaaaataa

SEQ ID NO: 182962 - DNA, 168 bp, Klebsiella oxytoca
atgattagtgatatcgattatatgaagtttgcgatgtcacaggaacgtgacaagactgagatagatccagttttgagaagtaaggcctggagcgccgttatccttgggcttgcgatgttctggagcgtcattgctctggttgtctgcaacgtttggttactaagctag

SEQ ID NO: 182963 - DNA, 2673 bp, Klebsiella oxytoca
atgtcgtcaaccctacgagcagccagtaaggatacgctccaggttaaagataaaacctggcattactacagcttaccgctggccgctaaacaactgggcgatctctcgcgcttgcccaaatcgctcaaagtgctactggaaaacctgctgcgctggcaggacggcgattccgtgaccgccgaagatattcatgccctggccggatggctgaagcatgcccatgccgacagggagattgcctaccgtccggcgcgcgtcctgatgcaggactttaccggggttcctgccgtggtggacctggcggcgatgcgcgaagcggtcaaacgcctgggcggcgataccgccaaagtgaacccgctttcgcccgtcgacctggtgattgaccactcggtcaccgtagaccgttttggtgacgatgatgcttttgaagagaacgtccggcttgagatggagcgcaaccatgagcgctacgtctttttgcgctgggggcagcaggcattcagccgcttcagcgtagtaccgccgggtaccggtatttgccaccaggtaaacctcgaataccttggccgggcggtgtggagcgaacagcaaaacggcgagtgggtggctttccccgacaccctggtcggcaccgattcccataccacgatgattaacggtttaggcgttctgggctggggcgtcggcggtatcgaagcggaagccgccatgctcggtcagccggtttccatgctgatcccggacgttgttggcttcaagctgagcggcaagctgcgtgaaggcattaccgcgacggacctggtcctgacggtcacccaaatgctgcgtaaacacggcgttgtgggtaagtttgttgaattctacggcgatggcctcgattctctgccgctggcggaccgcgcgacgattgccaatatgtcgccggagtatggcgcgacctgcggctttttcccgatcgatgcggtaacgcttgactatatgcgcctgaccggccgcagcgaagagcaggtggcgctggtagaagcctatgcgaaagcgcagggtatgtggcgtcagcccggagatgaaccggtattcaccagcacgctggcgctggatatgggaaccgttgaagccagcctggccgggccgaaacgcccgcaggaccgcgtagcgctcggcgatgtgccccaggcctttgccgccagcaccgagctggaagttaatcacgcgcagaaagataaacggccaattgactacacgctgaacggacagcagtattcgctgcctgacggcgcggtggtgattgccgccattacctcctgtactaacacgtcgaaccccagcgtcctgatggccgccggcttgctggccaaaaaagccgttgagcgggggctgaaaccgcagccgtgggttaaagcgtcgctggctcccgggtcgaaggtcgtttccgactatctggcccacgcaaagctgacgccgtatcttgatgaactgggcttcaatctggtcggctatggctgtaccacctgtatcggtaactccggaccgctgccggacccgatcgagcgcgcaatcaagcagggcgatctgaccgtcggggctgtgctctccgggaaccgcaactttgaaggacgtattcatccgctagtaaaaaccaactggctggcgtcgccgccgctggtggttgcctacgccctggcggggaatatgaatctcgacctgacccgtgagccgttagggacgggtaaagatggtcagccggtgtatctgaaggatatctggccgagcggaatcgaagtcgcgcaggcggttgagcaagtctcaacggagatgttccgtaaagagtacgccgaagtgtttgaagggacagccgagtggaaggcgattaaagtggatcgctctgatacctacgactggcaggatgattccacctacattcgcctgtcgccgttctttgatgagatgggcgttgagcctaaaccggtagaggatattcacggcgcgcgcattctggccatgttgggcgactcggttaccaccgaccatatctccccggcgggcagcattaaagccgacagccccgcgggccgttatctgcaaaatcacggcgtcgaacgcatcgattttaactcctacggctcccgtcgcggcaaccatgaggtgatgatgcgcgggacgtttgccaatattcgtattcgtaacgaaatggtccccggcgtggaaggggggatgacccgtcatcttcctgatagccaacccatcgctatttacgatgccgctatgctctacaaagcggagggcacgccgctggcggtgatcgcaggcaaagagtacggttccggctccagccgcgactgggcggctaaaggaccgcgtttgctcggcgtcagggtggtgattgccgagtctttcgagcgcatccaccgctccaacctgattgggatggggattttaccgctggaattcccgcagggggtgacgcgtaaaacgctgggactgagcggcgaggagcggatagatatcagcaacctgcaggctctgcagcccggtatgacggtgccggtcacgctgacgcgtgctgatggccggcaggaagtgattgattgccgctgccgcatcgataccgcgactgagctgacctactatcagaacgacggtattttgcactatgtgatccgcaatatgctgtaa

SEQ ID NO: 182964 - DNA, 591 bp, Klebsiella oxytoca
atgcagcttaaacgtgtggcagaagccaaactgccaaccccatggggcgattttctcatggtgggttttgaagaactggcaaccgggcaggatcacgtcgcgctggtatttggcgatatttcggggcaatccccggttctggctcgcgtacactctgagtgtttaacgggcgacgccctttttagcctgcgctgtgattgcggatttcaactggaagcggcgttgtcgcatattgccgaagaggggcgcggcattctgctgtatcaccgccaggaagggcgcaatatcggtctgctgaacaaaatccgcgcctacgcgttacaggatcaaggctatgacaccgtggaagccaaccatcagctgggctttgccgccgatgaacgcgacttcacgctgtgcgcagatatgtttaagctgctcaacgtcgaccaggtacgcctgttgaccaacaacccgaagaaggtcgaaattctgactgaagcgggaattaacattgtggaacgcgtgccgctgattgtgggacgcaacccgaaaaatgcccactatctggatactaaggctgccaaaatggggcacctgctgagcaagtaa

SEQ ID NO: 182965 - DNA, 768 bp, Klebsiella oxytoca
atgctgttgattgccagacgaaccgccgttggcgcggccctgttattaatcatgcctgctgcgatctggatttcgggctggaaatggcatcccgggctgtcggcagggacgatgaagctgctgtactgggtgaccgaaacggtgacgcagccatggggcatcattacgcacgttatcttatgcgcctggtttctgtggtgcctgcgttttcgtctgcgagcggcgataatgctgtttctcattctggccgcagcgatactggttgggcagggaatgaagacgtggattaaaggccgcgttcaggagcctcgtccctttgtcatctggctggagcagacgcagcaggtgccggtcacgcaattctacgcgttgaaacgcaaagaacgcgctaaactggtgcatgagcagctggcgcaagagcagcaaatccccggatttttgcgcaagcactggcaaaaagagaccggcttcgctttcccatctggccatacgatgttcgctgccagctgggcgctgctcggcgttggtttgctgtggccgcggcgtcgctgggtcaccctggcgctgctgctaacgtgggcgacggcggtgatgggcagccgcctggcgctgggcatgcactggccgcaggatctgatcgtcgcaacgctgatttcctggctactggtgaccctggcgacctggcttgcccagcggttctgcggcccgctatcgccgccgggagaagaggcgcaggatattaaaaaaagggcggcagcgccggaataa

SEQ ID NO: 182966 - DNA, 309 bp, Klebsiella oxytoca
gtgaaatattttcttattttcttactggtgttagccatcttcgtcatttcagtgacgctgggcgcgcagaatgaccaggtggtcacgttcaactatctcctcgcgcagggtgagttccgtatttcgacgctgctggccgtgctttttgctgccggttttgctatcggctggctgatctgcggtcttttctggctgcgcgttcgcgtctctttggcgcgcgctgagcgtaaaattaagcgtctggagcatcagatcgcgccagccagcgctacgcctgcagaagccggtgttcctgcggtgaaggaataa

SEQ ID NO: 182967 - DNA, 1170 bp, Klebsiella oxytoca
atgctggagttgttgtttctgcttttgcccgttgccgcagcgtatggctggtacatggggcgcagaagtgcacaacagtccaaacaggacgatgcgagccgtctgtcgcgtgactacgttacaggggtcaacttcctgctgagcaatcagcaggataaagccgtcgatctgttcctcgatatgctgaaagaggataccggcaccgtcgaagcccatctgacgctgggcaacctgttccgctcacgcggtgaagttgaccgcgctatccgcatccaccagagcttaatggaaagcgcctcgctgacttacgaccagcgcctgctggcggttcagcagctggggcgcgattatatggccgccgggctctacgatcgggcggaggggatgttcaaacagctggtggatgaaacggattttcgcctgagcgccctgcagcagctgctgcaaatttatcaggcaaccagcgactggcagtcggcgatagaagtggccgagcgtctggttaagctggggaaagagaaacatcgcggcgaaatcgccaatttctggtgtgaactggcgctgcagcaaatggcgggcaacgatctggataaggcgatggcgctgctgaaaaaaggcgccgcggcggatcgcaacagcgctcgcgtctccatcatgatgggtcgggtatggatggagaagggcgactatgccaaagcggtagagagcctggagcgggtgattgagcaggataaagaactggtgggtgaaaccctggagatgctgcaaacctgttaccagcagttagggaaaaccgacgagtgggaagcatttttgcgccgctgcgcggaggaaaataccggcgcgacggccgatctgatgctggcgcagatcctcgaacagcgggaaggagttgacgccgcgcaaaactacgtgactcgccagctggagcgccatccgacgatgcgcgttttccataagctcatcgattaccacatcaatgaagccgaagaggggcgcgcgaaggagagcctgggcgtgctgcgccacatggtgggcgagcaggtccgcagcaagccgcgctaccgctgccagaaatgcggctttaccgcccatacgctgtactggcactgtccatcctgccggtcgtggtcaactattaagcccattcgcggactcgacgggcagtaa

SEQ ID NO: 182968 - DNA, 738 bp, Klebsiella oxytoca
atgacgtctactgctacatcttcttcccgcgttgtcacatcctctcccatcgtcgttgctctcgattatgataaccgtgataaagcgctggcgtttgtcgaccgtatcgacccgcgcgactgccggctcaaggttggtaaagagatgtttaccctgctggggccgcagtttgttcgcgacctgcaccagcgcggttttgagattttcctcgatctaaagtttcacgatatcccgaataccacggcgcgtgcggtcgccgcagcggcagagcttggcgtctggatggttaacgttcatgcctccggcggcgcgcgtatgatgaccgccgcacgtgaagccctgctgcccttcggaaaagatgcgccgctattaattgcggtaacggtgttaaccagcatggaagccagcgatctgcaggatctgggcattacgctttctccggcagaccacgccgcgaagctggcggcgctgacccagcgctgcgggctggatggcgttgtctgttcggcgcaggaggcggttcgctttaaacaagagctaggccaggcgttcaagctggtgacgcctggcattcgtccgcaaggtagcgacgcgggtgaccagcggcgcattatgacgccggaacaggcgcaggcggcgggggtagattacatggtgattggtcgtccggtaacgcagtctgccgatccggccgccaccctgcgcggtatcaacgcatcgttgaataagggggtatga

SEQ ID NO: 182969 - DNA, 327 bp, Klebsiella oxytoca
atgaacgattccaacagtcgtctggtgtattcaacggacagcggtcgtattgatgagcccaaagcggtacaggcgcgtccgaaaggggacggtatcgtacgtatccagcgccagaccagcgggcgcaaggggaagggcgtgtgtctgattagcggaatagatgaaagtgacgacgcgctggctaagctggctgccgagctgaaaaagaaatgcggctgcggcggggcggtaaaagatggcgtgattgagattcagggcgataagcgtgacttgctcaaatcgcttctggaagccaaaggcatgaaggttaagctggctggcggttga

SEQ ID NO: 182970 - DNA, 222 bp, Klebsiella oxytoca
atgatgacttcaatgaacaaaaaaatggccgctgtggttctggccgtcactgttgcaatgtctctgagcgcttgttctaactggtctaaacgtgaccgtaataccgctatcggcgcaggtgccggtgcactgggcggtgcggtattaacggacggcagcaccctgggtaccctcggcggcgcggcagtcggcgggattatcggccaccaggtgggtaaataa

SEQ ID NO: 182971 - DNA, 720 bp, Klebsiella oxytoca
atggtcatcgataaaggccgtatgagcgtggccgatctcgcgaagatgaccggtgtctctgaagtcaccattcgccaggatctgaattcactcgagaaacagagctacctgcggcgtacccacggcttcgccgttccgctggatagtgaagatgtggaaacccgcatgatgaccaacttcgcgattaagcgagagctggctgcgcgggccgctacgctcgcttcgtccggggaaacggtgtttatcgaaaacgggagctgcaacgccctgctcgcccgtacgcttgccgagcgcggcgatatcactatcatcaccgtcagcagctatattgcgcatctgctaaaagagacgcccggagaagtcatcctgctgggcgggatctatcaaaagcgcagtgaaagtatggtaggtccgctaacccgccagtttattcagcaggtccacttcagcaaggcctttattggcattgacggctggcaggctgaaactggatttaccggacgggatatgatgcgtgctgacgtggtcaacgcggtgcttgaaaagggctgtgaagcgattgtgctgagcgatagctcgaaattcaacgtggttcatccctatccgctcggcccgatagggcgcttcaaccgcattatcaccgatgataatctcaatgatgccgtgcgcaaccagttaacccagtgcggtttagccgtcgatatcgttaaccatccctga

SEQ ID NO: 182972 - DNA, 183 bp, Klebsiella oxytoca
atgtcagatctgaatgcccgcctgctcgcccaacgaatcgataccgtgctggatattctggttgccggggattatcactccgcaatccataatctggaaattctgaaagctgaactgcaggcgctttccagcgacgagcaggaaaataaacccggtcagcctaaagcgccgtgggaaatttga

SEQ ID NO: 182973 - DNA, 1935 bp, Klebsiella oxytoca
atgtttcaggacaacccgctgctagcgcagcttaaacagcaactgcattcccagactccgcgcgttgaaggggtcgttaaggggacggaaaaaggatttggcttcctcgaagtcgactcgcagaaaagctatttcattccgccgccgcaaatgaaaaaagtgatgcatggcgatcgtattatcgccgtggtcaatactgaaaaggaacgcgaaagcgctgagcctgaagaactggttgagccgttcctgacgcgttttgtcggcaaagttcataagaaagacgatcgtctttccatcgttcctgaccatccgctgctgaaagatgccattccttgccgcgccgcgcgcggcgtagagcatgattttaaagagggtgactgggccgttgccgaaatgcgccgtcatccgctgaaaggcgaccgcggtttctacgctgagctcacccagtacattacctacggcgacgatcatttcgttccatggtgggtcaccctggcgcgtcataatctggaaaaagaagcgccggacggcgtggcgaccgagatgcttgatgaaggtctggaacgccgtgatttaacggccctggctttcgtgaccatcgacagcgccagcaccgaagatatggacgatgcgctgtacgttgaacaaaccgctgacggcaagctgcatctgaccgtcgctatcgccgatccgaccgcgtggattgccgaaggcagcaagctggacaacacggcgaaaattcgcgcctttaccaactatctgccgggcttcaacattccgatgctgccgcgcgagctctcggacgacctctgctctctgcgccccaacgaggttcgcccggttctggcctgccgcatgatcctcgcggatgacggcaccatcgaagatgatattcagttcttcgcggcgaccatcgagtcgaaagcgaagctggcctacgatgatgtttccgactggctggaaaataacggtggctggcagccgggaagcgagactatcgcccagcaaattaagctgctgcaggaggcctgcctgcgccgtagcgaatggcgtaaaaaccacgcgttggtattcaaggaccgcccggattaccgctttgtgcttggcgacaagggcgaagtgctggatatcgtcgccgaaccgcgtcgtatcgccaaccgcatcgttgaagagtcaatgattgccgccaacatctgtgccgcccgcgtgctgcgcgacaaactcggtttcggcgtttataacgtccacaccggtttcgatccggccaacaccgagcagctcgcggccttactgaagactcacgatgtgcacattgacccggtggaagtgttgacgctggaaggcttctgcaagctgcgtcgcgagctggacgcgcagccgtctggtttcctcgatagccgtattcgtcgcttccagtcgtttgcggaaatcagcaccgagccgggcccgcacttcggcctgggtcttgaggcctatgcgacctggacttccccgatccgtaagtacggcgatatgattaaccatcgtctgctgaaagcgattatcaaaggggaagcgatctcccgtccgcaggatgacgttgcgatccaaatggctgaacgccgtcgcctcaaccgcatggcggagcgcgatgttggagactggctgtacgcccgctatctgaatccgcaggccggcaccactacccgttttgcagctgagattatcgatgtcagccgcggcggcatgcgcgtgcgtctggttgataacggcgcggttgcctttatcccggcgccgttccttcacgccgtgcgcgatgaactggtgtgcagccaggaaaacggcaccgtgcagatcaaaggcgaagtcgtctacaaagtcacggatgttatcgacgtcacgattgccgaagtgcgcatggaaacccgtagcgtgattgcgcgtccagccgcctga

SEQ ID NO: 182974 - DNA, 1158 bp, Klebsiella oxytoca
atggagcaacgccgcgttaacggcaaaaaccactggtatcatgagacccagtcaacaatctgcccggtggatgtattgccgctcgtccctgaagccgcccatgtcgaagatcgttttctactcgatctgactctcccccgggagctgctcgaggcgcatgcgcgctggcttacgccggcccgtcggctggcagatgccctctttcccgcgtcagtgacggttaaccgtctacagacatttagcgcctatgaccggctaagtacggcgctgaccgtcgcccaggtttatggcgtacagcgcctgtgtaatcactacgccgctcgcctggcgccgcttcccggcccggactcctcgcgtgagagcaaccgtcgtctggcgcaaattacccagtatgcgcgtcagctcgcgagctctccttcgctgatcaacgcgctcgcccgcagccagctggacgaagtcggcctgaccagtcgcgatattatccttatcaatcagattattggctttatcagcttccaggcccgcgctatcgccgccttccatgccgcgctgggttacccggtgcgctggatccccggcatgccgcagcaggaagatgccccggaagcgcttttcgtcacgagggagagtgactggcagcctggacttgacgacgcggacttacgctatgccgacgatgagcgccagtctcttttagcgaactggcgaaaacatccgggcctgtttgaactggccccgctgctggcggctcaggaacctcctctggctctgctggaacagcttctgacccacctcagcgatcggcaaccgttcgccgcgcaggtggcactgatcgctgcgcgaattaatggcagcatcagttgctttaacgcgtgggcctcgcgatgtccagatttagccgatctcacggacgctttgcgtggtaatgaatccggcgtccagccatggggagacaacccgtcaatggaacgccagcttctacaatccgtacagcttttgacccgcgcgcccgaccgtttcagcgccgcccagctaactcccctcactgattacgggctttcccgtagcgcggctatcgatctactcgcctggtgcgggctgtgcggttggatgaatcggctgaaaatcgccctcgggaatgtacgtcaggagacgtaa

SEQ ID NO: 182975 - DNA, 789 bp, Klebsiella oxytoca
atgggttttctttccggtaagcgcattctgttgactggccttgccagcaaactgtccatcgcctacggcatcgcgcaagccatgcaccgtgaaggggctgaactggcgttcacctatcagaacgaaaaactgaaaggtcgtgtggaagaatttgccgccgcgctgggctctaatatcgtcctgccgtgcgatgtcgcggaagatgagagcatcgagtctcttttcaccgagctggcaaaagtgtggccgaagttcgacggtttcgttcactctatcggctttgcgccggcagaccagctggacggcgactacgttaacgcggtcactcgtgaaggtttcaaaattgctcacgatatcagcgcctacagctttgtggcgatggcgaaagcctgccgcggtatgctgaacccgggctccgccctgctgacgctctcctacctgggcgcagagcgcgccatcccgaactacaacgtgatgggtctggcgaaagcctctcttgaagctaacgtgcgctacatggcgaacgccatgggcccggaaggcgttcgcgttaacgccatctctgccggtccgatccgtaccctggcggcttccggtattaaagatttccgtaagatgctggcgcactgcgaagcggtcaccccgatccgtcgcaccgtcaccactgaagacgtgggcaacagcgcagcattcctgtgctccgacctgtctgccggcatctccggcgaagtcgttcacgttgacggcggcttcagcatcgccgccatgaacgagctggaactgaaataa

SEQ ID NO: 182976 - DNA, 810 bp, Klebsiella oxytoca
atggtcgaaacattgcttgaagtgcgcaatctgagtaagacctttcgctaccgcaccggttggtttcatcggcaaacggtggaggcggttaagccgttaagctttaccctgcgcgagcgccagacgctggcgattatcggcgagaacggctccggcaagtcaacgctggcaaaaatgctcgccggaatggtcgaacccagtaccggcgaactgctgattgacgatcgcccgctggcgtttggcgattactctttccgcagccagaaaattcgcatgatctttcaggatccgtcgacctcgctcaatcctcggcagcgtatttcgcaaatcctcgattttccgctgcgcctgaataccgaccttgaacccgaggcgcggcagaagcagattatcgaaacgttgcgaatggttggcctgctgccggaccacgtcagctactacccgcatatgctggcgccggggcagaaacagcgtctgggcctggcgcgcgcgctgatcctgcgtccgaaggtcatcgtctgcgatgaagcgctggcgtcgctggatatgtcaatgcgctcgcagctgataaacctgatgctggagctgcaggaaaaacagggtatctcctacatatacgtgactcagcatctgggcatgatgaagcacatcagcgatcaggtgctggtgatgcatcagggcgaagtggtcgaacgcggcagcaccgccgacgttctggcgtctccgctgcacgagctgacaaaacgcctgattgccggccatttcggcgaggcgctgactgccgatgcctggcgtaaagacggtaaataa

SEQ ID NO: 182977 - DNA, 993 bp, Klebsiella oxytoca
atgccattactcgacatccgtaatttaaccattgaattcaagaccaacgaaggctgggtgaaagccgtagatcgcgtcagcctgactctcgccgagggggaaatacgcggcctcgtcggagagtccggctccggcaaaagcttaatagctaaagcgatatgcggcgtcaccaaggacaactggcgggtaaccgccgaccgcatgcgctttgacgacatcgatctgctgcgtctctcggtgcgcgagcggcgtaagctggtgggccacaatgtctcgatgatttttcaggagccgcaatcctgtctcgacccttccgaacggatcggccagcaattaacgcagaatatccccggctggacctttaaaggacgctggtggcagcgcctgggctggcgcaagcggcgcgccatcgagctcctgcaccgcgtcgggatcaaagaccataaagatgcgatgcgcagcttcccctacgagctgacggacggagagtgccagaaggtcatgatcgccatcgcactggctaaccagccgcggctgctgatcgccgatgagccgaccaacgccatggaggccacgacgcaggcgcaaatcatccgcctgctgacgcggttaaaccaaaacaataacaccaccattttgctgatcagtcacgatatgcagatgctcagtaaatgggcggacaaaatcaacgtgatgtactgcgggcagacggtggaaaccgcaccgagcgaagaactggtgacgattcctcatcacccttacacgcaggcgctgattcgggcgattcccgatttcggcagcgccatgccgcacaagagtcggctcaacaccttgccgggggcgatccccttgctcgaacagctgcccattggctgccggctcgggccgcgctgcccctatgcccagcgcgaatgtatcgaaacgccccggctggtgggcgcccgtaaccacctctatgcctgtcatttcccgctgaacatggagaaagagtga

SEQ ID NO: 182978 - DNA, 891 bp, Klebsiella oxytoca
atgccctacgatagcgtctatctggagaagcgcccgccgggtgcgctgcgcaccgtatggcgaaaattctacggcgatacgaccgccatgatcggcctgtacggctgtgcggcgctggcgctgctgtgcgttttcggcggctggttcgctccttacggcatcgaccagcagtttctcggctaccagctgctgccgccgtcctggtcgcggtacggcgaagtgtcgttctttctcggtaccgacgatctcggtcgcgacgtcctgagccgcctgctgagcggcgcggcgccgacggtcggcggcgcgtttgtggtgacgctgggcgccgccctgctgggactggtgcttggcgtgattgccggttctacccacggcctgcggtctgcggtgatgaaccatattcttgacacgctgctgtcgatcccgtcgctgctgctggccattatcgtggtcgccttcgccgggccgcacctcagccacgcgatgttcgccgtctggctggcgcttctgccgcggatggtacgttcggtctacagcatggtgcatgacgaactagaaaaagagtacgttatcgccgcccgccttgacggggcctcgacgctgaatattttatggttcgcggtgctgccgaatattacctcaggcctggtcaccgagatcacccgcgcgttgtcgatggcgatcctggatatcgctgcgctgggcttcctcgatctcggcgctcaactgccttcccccgaatggggagcgatgctcggcgacgcgctggagctgatttacgtggcgccgtggacggtgatgctgccgggtgcggctatcatggtaagcgtcctgctggttaatctactgggcgacgggatccgccgcgccatcatcgccggggtggaataa

SEQ ID NO: 182979 - DNA, 966 bp, Klebsiella oxytoca
atgattatttttactctgcgtcgcctgctgctgctgctgattaccctcttcctgctgacctttgtcggttttagcctgagctattttacgccccacgcgccgctgcagggtgcctcgctgtggaacgcctggctattctggtttgagggcgtgctgcactgggatttcggcgtttccagcatcaacggtcagctgatttccgagcagcttaaagaggtctttcccgccaccatggagctctgtatcctcgccttcggcttcgcgctggtgatcgggatccccgtcggtatgctggcgggcattatgcgcaacaaatggcaagataccctgatcagcgccctggcgctgctgggcttttcgattcccgtcttctggctggcgctgctgctgaccctgtttttctcccttaccctgggctggtttccggtctccgggcgcttcgatctgctgtatgaagtgaaatcggtcaccggctttgcgctgatcgacgcatggctatccgactctccgtggcgccatgaaatgatcgtcagcgcggcgcgccacatggtgctgccggtgctaaccctggcggtagcgccgacgacggaagtgatccgtttgatgcgtatcagcaccagcgaagtatacgacaccaactatgtcaaagccgccgccacccgcggcgtatcgcggcggacgattttacaccgccacgtcctgcacaacgccctgccgccggtgatcccgcgcctggggctgcagttttccaccatgctaacgctggcgatgattaccgaaatggtctttagctggccggggctgggccgctggctgattaacgcgattcgccaacaggactacgccgcaatctcagcgggcgtgatggtcatcggcgcgctggtaattattgtgaacgtgatatccgatattctgggtgctatggctaacccactgaaacataaggaatggtatgccctacgatag

SEQ ID NO: 182980 - DNA, 1644 bp, Klebsiella oxytoca
atgcgcctgaaattgtcttctctcctggcagcggtatgtatgctgtacgggcaagcttttgccgcgccagcgctgcctgcgcacgcggatattcgcgatagcggcttcgtttattgcgtgagcggtcaggtcaacaccttcaacccgcaaaaggtcagcagcggcctgattgtcgataccctggccgcccagctctacgaccggttgcttgacgtcgacccctatacttatcgcctggttcccgaactggcagaaagctgggaggtgctggacaacggcgcaacctaccgcttccacctgcgcaacaacgtgccttttcagaccaccgcctggttcaaaccgacccgtaattttaatgccgatgacgtcattttcacctttggccgcatttttaatcgcgaccacccgtggcacaacgttaacggcagcagctttccctatttcgatagcttacagtttgccgacagcgtggaaagcgtgcgtaagctggatagccataccgtcgagtttcgcctcaaacgcccggacgcctcgttcctgtggcacctggccacccactacgcctcggtgatgtcggcagagtatgccgcgaagctggcgcagaacgatcgccaggaactgatcgaccggcaaccggtcggcaccggtccgttccagttggaggagtatcgcagcggtcagtacattcgcctgcagcgccatccggcctactggcgcggtaaaccgctgatgccgcaggtggtggtcgatctcggctccggcggcaccggccgcttgtcaaaactgctgaccggcgagtgcgacgtgctggcctggcccgccgcaagccagctctctattctgcgtgacgacccgcgtctgcgcctgaccctgcgcccgggaatgaacatcgcctggctggcgtttaacaccgctaagccgccgctcgataatcctgaggtacgccatgcgctggcgctggccatcaataatcagcgcctgatgcagtcgatctactacggcacggcggaaaccgccgcgtctatgctgcctcgcgcctcctgggcctacgataacgacgccaggatcaccgaatataaccccacggaagcccgcgcccggctgaaagccctggggctggaaaacctaacgcttaagctgtgggtgccaaccagctcgcaggcctggaaccccagcccgctgaaaaccgccgagcttattcaggcggatatggcgcaaattggcgtgaaggtgattattgtgccggtcgaaggccggttccaggaggccagattaatggatatgagtcatgacctgacgctgtccggctgggcaacggacagtaacgatccggacagctttttccgtccgcttttgagctgcgcggcgattacctcacaaaccaactatgctcactggtgtcatcgcgaattcgacgaggtgctgcaaaaggcgctcacttcccagcagctggcttcgcgcattgaggcctacaaagaggcgcagcgcattcttgccaatgaactgccggtgctgccgctggcctcctccctgcgcttgcaggcctatcgttacgacatgaaaggcctggtgctgagcccgtttggcaacgcctctttcgcaggcgtctcgcgggaaaaagaagacgaggtgaaaaaaccatga

SEQ ID NO: 182981 - DNA, 285 bp, Klebsiella oxytoca
atgattccggttaatccttcaacgctcggccgctatgcggcgcacgtcagcctggtccataccatgaaaagccaccgcgcgccggcgctctcggtcatgatgatcttttcggacctgcttatccgctcaaccgaagatgcatatcgtcaacagggctggacaattacgccacaaaacagcggcctggtactgcgtacttatgttgcccaccatcacgatggcgaaaagctggaaattaatcccaaagattacatcgcccgctataaccgactccttcccctgtag

SEQ ID NO: 182982 - DNA, 2307 bp, Klebsiella oxytoca
gtggagcatcattcaggcgactttcaggttgtggttcgcgatatccggcagctgagccagcaggaaaacgatgctctgacgctgctatggctgcttgagggcagcgtcgaactccgcgatggcgagacgggtcggtacctgcaggccgatgaactggcgatagtcaatcgtcatcgccgctggagcctgcacagcaagacggcgaacgtcgtgatggtgctgtcgctgaacgccggatggctgacccgcctcgacggcgatttttttgcctccgcctaccagagcagcagcgcaacccgcgatgccgaagacaccctgcgctacctgatgcgccagctgctggtcctcggtctggtcaatccgcaggcccactaccggctggaggccaaccgctggcttagcgaaattgctctcctgctggcgtcacgcttcagccgtcccctcaccgcccaggcgtctcgcggagccgaacgctggagccagcgaattaacagagtggtggcgcgaatcgacgccaactatcaacggcgcctgtcgctgcaggagatagccgccgcggagtttgtttctgaggcctggctctcgcgtctgttccgcaaagaggtgggcgtcagctttatgcagtacatcactgggctgcgcctgcgcaaagccgcggagcagctgacgacgacgcgtcaatcgatacagcagatcgctcagcagcagggctttgccagcagccgggtgatgagcgacctgtttaaacgcgagcacggcctgacgccgcgccagttccgccagcagcacccgcagacggcggtcgaatctctccgcccgcacccacagcagaccgagcgatggcagccggtgtcaatcgatcggctgtacgcccggctcaacgcgccgcaaacctacggtctggatagcccgccgctgcggctcagcccccaacaaacccgccatctcgatgttcgcgaactcccggcgcgcggcgcgccgctgcgtcacacccgaatagtgattaccgttcgtgaactggacgatctgctgcgcgaggatgtccgccgcgaactggaacagttgcacgacgcgctgccgatattcgccatcgatattcacgatccgtttctcagcagccgcctgttcggcaccggctgggacgatccgcaaatggccgggtatgcctgctggtataacctgcagcgcatttttagctggctggcgacccagggcttggcggtgatactgcataccgggctcaccacccgcggcgatctgctgcaacgtttcctctctctgtccgctaaccattttccgccggcaaccctcgccagctggcacttcgtatggcactggtcccctcaggccagcgacgaagcccgccagcacgcctggcggcaacaaaaggcgatcctgcagaggctatcgccgcagtcggcgctggggatctggcaccgttttcctcaacaggtggaggacgatccccttctgcgttcaccgctgctggtcgaggcggattttctggcctgccaggccgatgctaatgaactgctggatctcgcgcaggtggatagccagaaactggccgccagcgaaaactatccggtacacaaattgcgcaaacttcatagcgcgctgcgccagcggcagctcctgctgccgctttggctgctctcgtggaataccctcaccggcgatacccgcgataccaacggccgtttctttcgcggcgcgctgctgatggataatctgctgggactggcggatcaggtttggctcgcggggttctggctgaattcagggctgcagggggaagcccgcgccaacggcaagctggatacttccagcctggcgctgcactatctccacggtctgccgcgaccggtctactgggtgctatggctgtggcgcaggctgcggggcgaggtggtgatcaacgacaagaacttgctgctgctgcgccataacggccattatcagctactgctgcgcaacacgatagttttcaatccctggctttccagcgaggaggcgtttatccagcgctttagtcagccctggagcgtgcgcctgctcggccttgaaggacgctggcgaatcaaacatcacctgttcgatcggcaccatggcgcgctcttcccgctgtttgaggcctttcgcagccaaagcggaccggacgatgaggactatcgctggctgatgcacagagcgcgtccggcgctgcgcgtcagtgaagagacgcccgatagcgaccgctggcagcttgtcgattcgctggagagcaatgcgctggcgctttatgaattcacgccgctcggcgattga

SEQ ID NO: 182983 - DNA, 1170 bp, Klebsiella oxytoca
atgacacacccgattattgaggcattacaggttaacgaggcgcagtttgtcgcgcttcgccgccgtttccatcagcagccggaaattggttttgaagagcataaaaccagcgaagaggttgcccgcctgctcggcgaatggggatatcaggttcaccgcggtctggcgggcaccggcgtggtcggtactttacgcgtcggcgagggtaaaaaacggttggggctacgggcggatatggacgcgctgccgatgcaggagatgagcggcaaagggtgggccagccgggtcgacggtcgttttcacggctgcggccacgacggccataccaccacgctattgtacgccgcggaatatctggcgcgcacccggcagtttaacggcaccctgcagcttatttttcagcctgctgaggaattactctacggcggtcgggtcatgctggaagacggcctgtttgaccagttcccctgcgatgccatttttggcctgcataatatgccggggcagccgttaggcagaatcggcctgcgcgatggggcgatgatggcctcctcggatactctccatattgaagtcaaaggggtgggcggacacggcgcggtaccggagcataccgtcgacgccacgctggttgcctgtcatatcaccctggcgctgcaatccattgtttcccgaaacatcacgccgtttgaaccagcggtcgtgaccgtgggcagtattcaggccgggcacgccccgaacattatcaacgacaaggtgctaatgaagctcacggtgcgcaccttaaacgaacaggttcgcgagaccgtcctgcagcgcattcacgatatcgccgttgctcaggccgagagctttaacgccagcgccgccttaacccacgttaacggcagcccggttttaaggaacgatccggctgccaatgagatggtccgcacggtggcgaccgcgctgtttggcgcggcgcaggtcggcgaggtgaagccgtttatgggcagcgaagattttgcttttatgctcgagcgcaatccgaacggctgctatttcactatcggggccggggacgaagcggatcgctgcatggtgcataacccgggatacgacttcaacgatgcgctgttgctgaaaggcgccgcgctgtggtgcgccctgacggaacactatttgcgttaa

SEQ ID NO: 182984 - DNA, 1392 bp, Klebsiella oxytoca
atgagttctgtatcgctaagcgaagcgcagttcgtcggcaccgatcgtctgctggcgggtattgtattgagcgttctgaccttctggctgtttgcccagtcggtgattaacgtggttccggcgatgaagagcagcctcgatatttcgctggaaaccctgaccctggcggtgagcctgagcgcgttattcagcggctgcttcgtggtcgccagcggcgggctggcggataaattcggccgcatgcgcatgactaccctgggcctgatcctcagcattgtcggtagcgcaatgctggtgctctctcagggacccgcgctgttcctggccgggcgcgttttacaggggctgtcggccgcctgcatcatgccggcgacgctggcgttaattaaaacctggtatgaaggcaaagcgcgccagcgggcggtcagcttctgggtcatcggctcgtggggcggcagcggtctgtgttcgtttgtcggcggggcgatcgccaccggtctgggctggcgctggatctttgttttctccatcgcggtagcgctggcggcgctgtttttgctgcgcggtacgccggaaagccgcagcgccagcgcgcagcagcataagctggacatcagcggcctgctcagcctgatccttgcgctggtgctgctaaatctgtttatcagcaaaggccacggctggggctggaccagcgcaacctcgctggcgatgctggccggcgcgctggcatcggggctgttttttatccgcagcggccagcgtaagggcgacgcggcgctgattgatttcgcgctgtttcgcaaccgggcctacagcgccgcggtgttgtcgaactttatgctcaacggcgccatcggtacgatgatgattgccagcatctggctccagcaggggcatcatctgagcccgctggagagcggaatgatgacgctcggctatctggttaccgtgctggcgatgattcgggtgggcgagaagctgctgcaacgctacggcgcgcgtttgccgatgatgagcggcccggtctttaccgcggtcggtattcttcttatctcctgcaccttcctcgataaatcgacctatatcgtcacggtctttttcagcaacgtgctgtttggcttcggcctgggctgctacgccaccccgtcaacggacaccgcggtggttaacgctcctgagaataaggtaggcgtggcctcggggacctgtaagatgggcagttcgctcggcggagcgatgggcattgcggtgacagcgtcactttttgcgctgtttttaccgctcggcatggccagcgcggcgcagtatgcgctgtggtttaacgccgcgctctgcctgggttcaatggcggtgagcgcgctgctgcttccgcgtacaggtcaaagctga

SEQ ID NO: 182985 - DNA, 975 bp, Klebsiella oxytoca
atggcggattacaaggacaacctgctcggcgaggccaatagctttcttgaggtgctggagcaggtctcaagactggcgccgctcgataaaccggtgctggttattggcgagcgcggaaccggcaaggagctgattgccagccgtctgcacttcctctcttcccgctggcaggggccgtttatctccctgaactgcgcggcgctcaatgaaaatctgctcgattcggagctgttcgggcatgaggccggcgcctttacgggggccagtaaacgtcacccggggcgcttcgagcgcgccgacggcggtaccctgtttctcgatgagctggccaccgcgccgatgctggtacaggaaaaactgctgcgcgtgattgagtatggcgaactggagcgcgtcggcggcagccaaccgctgcaggttaacgtccgcctggtgtgcgcgaccaacgccgacctgccacaaatggtggaagacggactttttcgcgccgaccttctcgaccgtctggcctttgatgtggtgcagctgccgccgctgcgcgagcgccagagcgacatcatgctgctcgccacccagtttgctatccagatgtgccgcgagctcggactgccgctgtttcccggctttagcgaacgcgccgccatgacgctgcagaactaccgctggccggggaatatccgtgaattaaaaaacgtggttgaacgctcggtctaccgccacggcagcagcgagcgcgagctggataatattattattaaccccttccgccagcagcacgcggcgacgcccgtcgaagtggagaagacgcctggccccacgctgccgctcgatttacgcgctttccagcaggagcaagaaaaaagcctgctcgagagaagcctcgaacaggcgaagtacaatcaaaagcaggcggccgaactgctggggctaacctaccaccagctgcgggcgctgctgaaaaaacatcagctttga

SEQ ID NO: 182986 - DNA, 669 bp, Klebsiella oxytoca
atgggtattttttctcgttttgccgacatcgtgaacgccaacattaactctctgctggagaaagcggaagatccgcagaagctggttcggctgatgatccaggagatggaagacacgctggttgaagtccgttcgacctcggcgcgggcgttggctgaaaagaaacagctgagccgtcgtattgaacaggccgttgcccagcaggcggaatggcaggaaaaagccgaactggcgctgcgtaaagagaaagaggatctggcccgtgcggcgctgatcgaaaagcagaagctgaccgaccttatcggcagcctggaaaacgaagcgcagctggttgatgaaacgctggcgcggatgaaaaaagagattggcgagctggaaaacaaactcagcgaaacccgcgcccgtcagcaggcgctgatgctgcgtcatcaggctgcaagctcctcccgcgacgttcgccgtcagctggacagcggtaagattgacgaggcgatggcgcgttttgaatcgtttgaacgccgcatcgatcatatggaagccgaagccgaaagccaccgcttcggtaaagataaatcgctggatcagcagttcgccgatctgaaagcggacgatgaaatcagcgagcagctggcggcgttgaaagccaaaatgaatcaaaataaccagtaa

SEQ ID NO: 182987 - DNA, 225 bp, Klebsiella oxytoca
atgagcatgctttttctcgccatccctttgacgttgtttgtgctgtttgttttgccggtctggctctggctgcattacaacaaccgcaccgccagcggcagcctatcgcagaacgaacagcagcgcctgctgcagctgaccgatgacgcgaagcgtatgcgcgagcgtattcaggcgctggaggcgattcttgacgctgagcatccgaactggagagagaaataa

SEQ ID NO: 182988 - DNA, 360 bp, Klebsiella oxytoca
atgagcggactggatctgagtaaaaaactgtggcgcattccgcagcagggcatggtgaaaggggtttgcgccggcatcgcgcagtatctggacgtgccggttaagctggtgcgcctgattaccgtactggcaatgatttttggcctgttcctgtttgtggtggtggcctacatcattctctcgtttgcgctggatcctatgccggaaagcgagctgtatggtgaaaaaacgccgagcagcggagagctattggccgccgcggataaggagctggcaacaggggagcgtcgtctgcgtgaaatggaacgctacgtcacttccgacaccttttcgctacgcagtcgttttcgccagctataa

SEQ ID NO: 182989 - DNA, 231 bp, Klebsiella oxytoca
atgaacatgaaatggcagcaggccaggcaaaaagtcaaaccgggtctgaaaatcgcaggcaagctggtgctgctcaccgcgctgcgctacggcccggcgggcgtcgcaggctgggcggtaaaatccgtcgcgcgtcggccgctgaaaatgctgctgatgcttgttctggaaccgatgctcagccgggcggcgcagcggttttctaaacgtcgcggatggcgtatgttatga

SEQ ID NO: 182990 - DNA, 315 bp, Klebsiella oxytoca
atgcgaaaactgcttctgggtttagcgctggccatggccttacccgtcttcgcggcggagcactggattgacgtccgcgttccgcagcagtatcaaaaagaacacgtcgacggggcggtgaatatcccgctggcggatttaaaaacgcggattgcggctgaagtaccggataaaaacgataccattcacgtctattgcaacgttggccggcaatctggccaggctcagcagatgctgagcgaaatgggctacacgcaggtggtgaatgccggcggcctcagtcagatcgccaggccgaaaagcgccagcaaataa

SEQ ID NO: 182991 - DNA, 1398 bp, Klebsiella oxytoca
atgaagcgactcaaaacagaatttaatgcgctggtgaatcgtggggttgaccggcatcttcgcctggccgtcaccggccttagccgcagcggcaagaccgcctttatcaccgcgctggtaaatcaactgctcaatattcacgccggggcgcggctgccgctgctcagcgcagcgcgtgaagaacgcctgctgggcgtcaagcgcgtcccgcagcgggatttcggcattccgcgttttacctatgacgaagggctggcccagctgtacggtcagccgccggtctggccaacgcccacccgcggcgtcagcgaaatccgcctcgctctgcgctatcgctccaacgattcgctgctgcgccattttaaagagacctcgaccctctacctggagattgtcgactatcccggcgagtggctgctggatctgccgatgctggcccaggactatctgacctggtcacggcagatgaccggattactgcaggggcagagggcggagtggtcagcgcgctggcggcagctatgcgaaggactggatccgctggcgcccgccgatgaaacccgtctggcggagatcgccgcggcgtggaccgactatctgcatacctgtaagcgcgaagggatgcacttcattcagccggggcgctttgtgctgcccggcgaaatggccggcgcgccggcgctgcagttcttcccctggccggacgttgatgccgccggtgaagctaagctggcgcaggcggacaaacagaccaatgccggaatgctgcgcgagcgttttaaatactattgcgagaaagtggttaagggcttctacaaagatcatttcctgcgcttcgatcggcagatcgtgctggtggattgcctgcagccgcttaatagcgggccgcaggcgtttaacgacatgcgtctcgcgctgacgcagctgatgcaaagcttccactacgggcagcgcacgctgtttcgtcgcctgttctcaccggttatcgataagctgctgtttgccgcgaccaaagccgatcacgtcaccgtcgatcagcacagcaatatggtgtcgctgctgcagcagctgattcaggatgcctggcagaacgcggcgtttgaaggcatcagcatggattgtctggggctggcgtcgattcaggcgacgcagagcggccttatcgaggtgaacggtgagaagatccctgcgctgcggggacatcggctaagcgacggacagccgctgaccgtctatcccggagaagtgcccgcgcgcctgccgggtcaggccttctgggagcagcagggctttcagtttgaaaactttcgcccgcaggtaatggacgttgataaaccgctgccgcatattcgccttgacgcggcgctggaatttttgatcggagataaattgcgatga

SEQ ID NO: 182992 - DNA, 1062 bp, Klebsiella oxytoca
atgaccgaacctttaaaaccgcgtatcgatttcgatggcccgctggaggtggaaaaggcgcaaattctgaaatccgcgcgcgcttttgacggcgccgatgcggagaagttcgctcctgcgcggctcgacgcgccggaagaagaagagggcgcggcggaagcggtggtggaatcggtgctgcgacctaagcgcagcctgtggcgaaagatggtcagcgccgggctggctatttttggcgtcagcgtcgtggcgcagggcgtgcagtggacgatgaccgcctggcaaacgcaggactggatcgccctcggcggctgcgctgccggcgcgctgatcgtcggggcgggcgtcggttcggtggcgaccgaatggcgccggctgtggcggctacgccagcgcgcccacgagcgcgatgaggcgcgggacctgatgcacagccatgcggtcagcaaagggcgcgccttttgcgaaaagctggcccggcaggcggggctggatcactcgcacccggcgctgcagcgctggtatgcggcgatccatgaaacgcagaacgatcgtgaagtggtgagcctgtacgcgcagatcgtgcagccggtactggatgcgcaggcgcggcgtgagattagccgttcggcggcggaatcgacgctgatgattgccgtcagcccgctggcgctggtggatatggcgtttatcgcctggcgtaatttacgtctgatcaaccgcatcgccactctgtacggtattgaactgggctactacagccgcctgcgcctgttccgcctggtgctgctgaatatcgcttttgccggcgccagcgagctggtgcgggaagtcgggatggactggatgtcgcaggatctcgcggccaggctatcggcgcgcgcggcgcagggaattggcgccggtctgctgacggcgcggctgggtattaaggcgatggagctgtgccgtccgctgccgtggatcgccgacgataaaccgcggctgggggattttcgccgcgagctgatcggccagctaaaagagacgttgcagaagagcaaaagcggcgcggaaaaataa

SEQ ID NO: 182993 - DNA, 1542 bp, Klebsiella oxytoca
atgcgtcttgaagtcttttgtgaagaccgtcttggtctgactcgtgaattgctcgatttactggtgctgcgcggtatcgacctgcggggcatcgatattgaccctatcggccgaatttatctcaacttcgccgagctggatttcgccagcttcagcagcctgatggcggaaattcgtcgtatcgccggcgtcaccgacgtgcgcaccgtggcgtggatgccgtcagagcgcgaacatctggcgctcagcgcgctgctggtggcgatgcctgagccggtgctgtctctcgacaccaaaggaaaagtcgaactggctaacccggccagctgccagctgtttggccagagccaggagaagctacgcagccacccggtcgcgcagctgattaccgattttaacgtccagcgctggctggaaaacagtccgcaggagtcccacgccgagcacgtggtggtcaacgggcagaacttcctgctggagatcaccccggtttatctcgaaggcgaacacggcgagaaggtactgaccggcgcggtagcgatgctgcgttcaacggtccgtatggggcgccagctgcaaacgatgaccattcaggacaccagcgcctttagccagatcctcgccgtaggcccgaaaatgcgccacgttgtcgagcaggcccgtaagctggccatgctcagcgcgccgctgctgatcgtcggtgataccggcacagggaaagatttgctggcccacgcctgccatctggccagcccgcgcgcggggaaaccttatctggcgctgaactgcggctccatcccggaagacgcggtggagagcgagctgttcggcgacgccgttcagggcaagaaaggcttcttcgagcaggctaacggcggctcggttttgctggatgaaattggcgaaatgtcgccgcgcatgcagaccaagctgctgcgcttcctcaacgatggaactttccgccgcgttggtgaagatcatgaagtccacgttgatgtccgggtgatctgcgctacccagaaaaacctggtggagctggtgcaaaaagggctgttccgcgaggacctctactatcgtcttaacgtcctgaccctgtatctgccgccgctgcgcgattgcccgcaggacatcatgccgctgaccgagctgttcgtggcgcgttttgccgatgagcagggcatcccgcggccgaaactctccgctgatttgaacagcgttttgatgcgctacagctggccgggcaacgtgcgccagctcaaaaatgcgatctatcgcgcgctgacgcagctggacggtttcgagctgcgccctcaggatattctgctgccggatcacgacgtctcctcgctggcggtaggcgaagaagcgatggaaggctcgctggatgatattacccgccgtttcgaacgctcggtgctcacccagctttatcgcagcttccccagcacgcgtaagctggccaagcgtcttggcgtctcgcataccgccatcgccaacaagctgcgtgaatatggcctgagccagaaaaagggcgatgagtaa

SEQ ID NO: 182994 - DNA, 1056 bp, Klebsiella oxytoca
atgtggatctggcgtagtcatttttttcaatggatgaaactgctggcgctctccagcgcgatctcttttgtgctgttctggtttcaccttcccgccgcgctgctgctggggccgatgattgccggcatcaccctgagcctgcgcggtgcggcaattcgcgtaccccgtcccttttttattgccgcccaggcgattatcggctgcatgattgcccgcagcctgacgccctccattttcggcgttctgctggcaaactgggcgctggtgctgctgattctcttttccacgctcgctatcagcgcgctggcgggatggctgctggtgcgctacagcgacctgcccggcgccaccggggcgtgggggagttcgccgggcggcgcctcggcgatggtgattatggcccaggagtacggcgccgatgtccggctggtcgcgctgatgcagtatctgcgggtgctgtttgttgccggcgccgcggcgctggtggtgcgcgtcgcgctcggcggtgaagcgcaggagatgactcagcaggtcgcctggtttccgccgatcagccggcagctgccgcttacgcttctgttgacggcggcggcggggtggcttgggctgcggctgcgctttccttccggggcgatgctcttcccgatgctgattggcgcgctggtgcagggagaaggctggctgctgctcgaactacccgaatggctgctggcgctggcctatgccgccgtcggctggagcgttggtctaaagtttaataaacagattttcctgctggcgctgaaaaccctgccgcagatcctggcatcgattatcggcctgatcctgctgtgcgcgctgatggcttatgggctgacgcagattttgccgctggactttatgaccgcctatctggcaaccagtccgggcggactggacacggtggcgattatcgccgccggtacgcgggccgatatgtcgtttattatggcaatgcagacgctgcgcctgttcaccatcttattgaccggcccggcgattgcgcgcttcatctcccgctatgcggcgcggcaataa

SEQ ID NO: 182995 - DNA, 507 bp, Klebsiella oxytoca
atgtcacaaaccgtgcatttccagggcaaccccgtttctgttcaaggcaccattccgcaggcaggcgctaaagcgcagccgtttacgctggtggccaaagatctctctgacgtcgcgctgagccagttcgccggctcccgtaaagtgctgaacattttcccaagcatcgataccggcgtttgcgcggcatcggtacgtaaatttaaccagctggcgtctgaactggacaacaccgtcgtgctgtgcatttccgctgacctgccgttcgcgcagtctcgcttctgcggcgctgaaggcctgaacaacgttgtcactctgtctaccctgcgcggcgcgcagttcctggccgactacggcgtcgctatctccgcgggcccgctcgccggtctggcggcgcgtgctgtggtcgtcattgatgaaaatgaccaggttgtttacagccagctggtgaatgaaatcaccgaagagccggactacgacgcagccctggccgcgctgaaagcgtaa

SEQ ID NO: 182996 - DNA, 966 bp, Klebsiella oxytoca
atgcgaaatctgcgagtctatgaagaagcctggccgttacatactccgtttgtgatcgcccgcggcagccgcagcgaggcaaaagtcgtggtggtggagattgaagagaatggcgtcaaggggacaggtgagtgcacgccctatcctcgttacggagagagtatagcctcggtgatggcgcagattatggcgattggcgaacagattgaacgcggcgtctctcgtgagcagattcagcacctgctgccccccggggccgcgcgtaacgccgtggactgcgcgctctgggactgtcaggcgcgcagcgcgggtaagagcatcgcgcagctgttgggcgtgacgctgcccaaccgggtggttacggcgcaaacggtggttatcggcacgccggaccagatggcggcgagcgcggcggcgctgtgggaaaaaggggccacgttgctgaaagtgaagctcgacgatcatctgattagcgagcggttgattgccattcgtgaagcggttccgcaggcaacgctcatcgtggatgccaacgaagcctggcgcagcgatggcctggccgagcgctgtcagctgctggcggatattggcgtggcgatgctggaacagccgcttccggctggggccgatgaagcgctggagaattttatccacccgctgcccatttgcgccgatgagagctgtcatacgcgcgacagcctggcggcgctgcgcggccgctatgagatggtcaatatcaaactggataagaccggcggtctgaccgaagcgctgctattggctgaggaggcggagcgcctgggatttgcgcggatgctgggctgcatgctgtgtacctcaagagccatcagcgcggcgctgccgctggcgccgctggcccgatttgccgacctcgatggcccgacctggctggcggtggacgttgagccggcgctgcatttcagcaccggcgtgcttcatctttga

SEQ ID NO: 182997 - DNA, 714 bp, Klebsiella oxytoca
atgcccgtttctcgtcctcgccctcagcgcggtgattttccgcccggcacacaacgctatggccagtctcacctcggcgcgccgctgctgtggttccctgcaccgctggccgatagccgcagcggcctgatccttgccggtacccacggcgatgaaaacgcatcgattgtcaccctctcctgcgcgctacgtacgctcaaacccgagctgcgccgccatcatgtcgtgctggcggtcaacccggacggttgccagctggggctgcgcgccaacgcgcgcggcatcgacctgaaccggaattttccggcggcaaactggaaagaaggcgaaacggtctatcgctggaacagcgcggcggaacagcgcgatgtggttctgctcaccggcgaaaaacccggttcagaaccggaaacccaggcgctgtgccagctgatccaccagatccatcccgcatgggtggtttcgtttcacgatccgctggcctgtattgaagaccccggccacagcgcgctggggcagtggcttgccggggcgttcagcctgccgctggtaggcagcgtcggctatgaaacgcccggctcctttggcagctggtgcgcggatatcggcctgccctgcatcaccgccgaattcccgccgatatccgccgacgaggcgacggataaataccttcaggcgatgacggacctgctgcactggcatcctcaaagatga

SEQ ID NO: 182998 - DNA, 1617 bp, Klebsiella oxytoca
atgaagtatcctgtcacattgacatgcggcgcgctgtggttagccagcgtctcttctcttgcctgggcggccgatgtcccgccgggcaccgtattagccgaaaaacaggtgctggtgcggcacattaaagatgaacccgcctccttagatcccgccaaagccgtcggtctgcctgaaattcaggttatccgcgatctttttgaaggtttagtcaatcaggacgagaaaggcaatctgatcccaggcgtggcgactcgctggcagagcaatgataatcgtgtctggacatttaccctgcgcgataacgcccgctggtccgacggaacgccggtaacggcggaggatttcgtctatagctggcggcggctggttgatcctaaaaccacctccccatttgcctggtttgctgcgctggccggaatcgccaatgcgcaaaatattattgatggtaaagccgcgccggataccctcggcgtcaccgccgtggacgcgcgtaccttgcgcgtgcagctggataaacccctgccgtggttcagcaatctgacggcgagctttgctttctatccggtgcagaaggctaacgtggagagcggcgacaactggacgcgtccgggaagcctgattggcaacggcgcgtatgtcttaaaagatcgcgtggtgaatgaaaagctggtggtggttcccaatacgcactactgggataacggcaaaacggtgatccagcaggtcacatttacgcccattaaccaggaatcggcggccaccaaacgctatctggccggcgatatcgatatcaccgagtcgttcccgaaaaatctgtaccagaagctgctgaaggatattccggggcaggtctataccccgccgcagctgggcacttattattacgcgtttaacacgcagaaagggccaaccgccgatgagcgcgtccgcctggcgctcagcatgactatcgatcgccgtctgatggcggagaaaattctgggtaccggcgagaaaccggcctggcgcttcaccccggacgtgaccgcaggttttaccccgcagccgacgcaaatcgagagcatgagccaggccgagctgaatgcccaggccaaagcgctgctgcaggcggcgggctacggtccgaaccgtccgctgaagctgaccctgctgtacaacacctcggagaaccaccagaaaatcgcgattgcggtggcttccatgtggaagaaaaatctgggcgtcgacgtgaagctgcaaaatcaggagtggaaaacctatatcgacagccgcaataccggcaacttcgatgtgattcgcgcctcatgggtcggggattacaacgagccgtcgacgttcctgtcgctgctcacctcgacccacagcggtaatatctcccgtttcaacgatccggcctacgacaaaattctgacccaggcggcgctggaaacgtcggaaaaggcgcgcaatgacgattacaacgcggcggaaaaaatcattatggcgaaagcgcccatcgcgccgatttatcagtacaccaacgggcgtctgattaaaccgtggctgaaagggtatccgatagccaatccggaggacgtggcctatagccgcacaatgtatatcctgaagcactga

SEQ ID NO: 182999 - DNA, 273 bp, Klebsiella oxytoca
atgacgcagaaagctgacgaaaatatcaacatattggcgttctctcgccgtaggttgctctcgcagagcaaccttagcggagaaagcgaggaatggcctggcgactatcggcagggaacgctgcaccagcgcttcctgcatcatctgcgtagctactgggatgtgtatcgttatcggaaagcgccgcaggtggccgatcgtgctgccgccattgccggagaaacgctggcgacgctgggtttcagcctgtccgcccgatgtcccgagtcctga

SEQ ID NO: 183000 - DNA, 1407 bp, Klebsiella oxytoca
atgccatcgcaacgagagattcgccttaacgcgtttgatatgaactgtgtcggtcaccagtcgccgggcctgtgggcccatccgcgcgaccgctcctggcaatataaagatctggaatattgggtcgatctggcgcgccttctggagcgcggcaaatttgacggcttgtttattgccgatgtgcttggcgtttacgatgtatttaacggcaacggcgatgcggcgattcgtcaggcgacgcaggtgccggtaaacgatccgctggcgctgataaccccgatggcgctggtgacggaacaccttggctttggtctgaccgcatcgctgtcatttgagcatccctatccattcgcccgtcggctgtcgacgctcgatcatctgaccaaaggacgggtgggctggaatattgttacctcgtatctggaaagcggcgcgcgcaatattgggtatcaggcgcagaccgaccatgatgcgcgctacgactacgccgatgaatacctcgacgtcgtgtataaactgctggaaggcagttgggaagacggcgcggttttgcgcgatcgtgaacggggaatttttagcgatccgcagaaaatccatccgattaaccatcagggcaactttttctccgttccgggcatccatctgtgcgagccgtcgccgcagcgcacgccggttctctatcaggcgggggcctccagccgcggaaaacagtttgccgccacgcatgccgagtgcgtttttgtcgctgcgccgtcgaaagttctgttgaagaagacggtcgcggatattcgtcgtcgcgccgcggaagccgggcgcgatccgcgcagcattctgattttcaatctgcaaacggcgatcgtgggcgaaaccgatcgcgaggcgcaggccaaatggcaggaatacaaatcatacgttagctatgagggcgcgctggcgctgatctccggctggaccggtattgacttcggtcagtatcggccggaccaggtgctgaaatacctgcataccaacgccatccagtcggcggttgaggcgttttcctccgccgacccgaatcgtcaatggacggtggaagcgctggcggactgggtgggtatcggcggctttggcccgctgctcgtcggcagtgcggaaacggtggccgatgaactccaatcctgggtcgaggaaaccgatgtcgatggcttcaatctggcctacgccgtgacgcatgaaaccttccgcgacgtggtggagctattaataccagagctgcaaaaacgcggcgtctttaagcaggattaccggcaaggcacgctgcgcgaaaaactgttcggcgccgggccgcgcctgaccgcgccgcatccgggggcagactaccgtcgcggcgtgcgaaacgatgtcggggcgaaggagacggcggcatga

SEQ ID NO: 183001 - DNA, 141 bp, Klebsiella oxytoca
atgattgatatcgataatctgcataaacgctaccgcacggcggatggccgcgtcagcgaggattatttccgcatcccgcgctttaccaggtgcttaactggggcgtcaacatgggacgctctctgccctttctggtgttaa

SEQ ID NO: 183002 - DNA, 456 bp, Klebsiella oxytoca
atggcggcgattatcccgtttacgttctggcttacgggtaccactatcggcattcctgccgcggtggtgccgatgattgccgctggcgtgccattttttggccgtctggtggaaaacgccctgcgcgaactcccggcggaggttaccgcggtggggctggtgtgcggcggttcgcgctggcagataatccgccacgcgcagctcagcgaggcgctgcctgcgctggtggcggcggtcacgcttaacctggtgtcgatgatcgaatattcggcgattgccggcactatcggtgcgggcgggatcggctatctggcggtcgtgtacggctatcagcgtttcgacaatcacatcatgatcgccaccattgtcgtgctgatcgccacgattcagatcattcaattctttggcgaccgtctggtcaataagcttcgccacactcaggggatttcttcatga

SEQ ID NO: 183003 - DNA, 879 bp, Klebsiella oxytoca
atgacaacagaacagtttgaactccgtaaagcccgccgctggccatggctggcggcgctggcagcgatcgcggcgctggccgtcgcgttctggtggtggcgcggatacgcgcaggcgccgcaggtcgttttcggtacgacgttaaaaattcactacgaaccggcgatggcgggcgagcagcgaattattgagtacatcagtcagcatattgcgcccgattatggcctgaagctggaggcggtgggcgtacaggatccggtacaggcggacagagccgtggcggaggggcagtatgccggcactatctatcaacatcagtggtggcttaagcaggtggtggacgccaacggctttgcgctttcgacgaccgtgccggtttttcagtgggccttcgggatctattccgaccgctataaatcggtacaggatttgcccgtcggggcgaccctcgtcgtaccggatgatggcgctaaccaggggcaggcattatggttgctgcaaaggatagggttaatctcactcgaaccggcggttgagccgcgcacggcgaaactgaaaaatattgtcggcaacccgcacaagttcaattttaaagagctggatttattaaccatgccgcgtgcgctgaattcggtggatgccgctattggttatgtttcacaatttgatgccggaaaagtcccgcgggaaaaaggcatattattcccgcctgcgcctaaaacgtttgcctcgcagttagtcatcggtacaccgtatttatcgcaggagaatattgttaaattaaaacaggctttttccgatccgcgtattcagacgtggttaaagaccactgacgatccgctggtcaaagacgtactggttccggtctcagcaaactaa

SEQ ID NO: 183004 - DNA, 1422 bp, Klebsiella oxytoca
atgagtactctgtctgttgataatgctggcgccgtttcggcaccggtgagtagcgtcggggatgtggcgcgattaattaattccggcagggagcagagtaaatatgcgcggatgattgtattcctcgcgctcggcggtgtattcctcgacgcttatgatttaaccacgctctcttacggtattgatgatgtggtgcgggaattccagctctcgccgcttttaaccggcattgtcacctcgtcaataatggtcggcacgattatcggtaatttaatcggcggctggctgacggataaatatggccgttattcggtgtttatggccgatatgctattttttgtggtatcggcgattgcggcgggactggcgccgaatgtctgggtattaatcggcgcgcggtttctgatggggattggcgtcgggatcgatctcccggtcgccatgtcttatctggccgagttttcccgctttagcgggaagggtaataaggccgcgcggctcgcggcctggtgtccgatgtggtacgccgcctcgacggtctgttttttaatcatctttgggctctatttcctgttgccaaaagaacatctggactggctgtggcgcgcatcgctgctgtttggcgcggttccggcgctgctgattattgccgtgcgcagcaaattcatgaatgaatcgccgttatgggcggccaaccagggcgatttgacctcggctgttcgtattctgcgcgactcttacgggatcaacgctcacgaagcaccgccagaacgtcctgctccgccgcccaaagtgagctttcgcgtgctatttgcaaaaccgtaccgcgaacgcactattgtcgccggggtgatgaacgtctgtatctcatttgagtatacggcgatcgcctttttcctgccgtccattctcgcccaattccttggcgctggcgtgttcgaaaccatctccgcttcgctgggactcaatgcgctgttcgcctttaccggtgggctgctggggatgcacctggcatggaaatacccgtcgcgacacgtcgcgatcgccgggttcgcactgcagtttatcgccctgatcgtcctcgcgctggtggggcaaccgcaggccgcgctgggtgtagcgctggcgattgcgatgctggggctgtggctgtttgccgagggctttggtcccggcgcgcagttgatgatctatccggcgctttcatacccaaccgcgattcgcgccaccggggtcggcttcagccgcgcgctttccggtattggcagcgcgctggcgctgtttgtgctgccgctgctgcaggcatcgctcggtacgcaaatgttctgggtcgtatcgctggccgccattatcccaattttcttcctgctcgcggtacgccatgagcctacccaatatgacattgacgacagccaccattga

SEQ ID NO: 183005 - DNA, 1224 bp, Klebsiella oxytoca
atgactttactctctaccggcaccgactatgaacagctggcggcgaccttccgaccgatttttgctcgtatcgcgcagggggcagcggggcgcgaacaaaaccgcatcctgcccgatgagcagatccgctggctgaaagaggccggatttggcacggtacgcattccgcgggaaaagggcggctggggcgcgtcgttgccgcaattaattgcgctgcttattgagctggctcaggccgactccaacctgccgcaggcgctgcgggcgcatttcgccttcgttgaagaccgcctcaatcaacctgactcgccggcgcgcgatcgctggttccgtcgcttcctcgacggcgagctggtgggcagcggctggaccgaaatcggcgcggtcaggctgggggaggttttcacccgcgtaacgcccgttgaaggcggctggcggctggacggtgagaaattctatagcacaggtacgctgtttgccgactggatagatgttttcgcccggcgcagcgacaaccagggcgatgtgattgcgctggtcagcacgagccaggccggcgttgaacgtgaggatgactgggacggcttcggtcagcgtctgaccggcagcggcacgacccgcttcaaacaggcgcaggtggagcaggatcacgtctacgactttgcgcagcgctttcgttatcagaccgcgttttatcagcatatcctgctggcgacgctggcgggaattggcctggcggttgagcgtgacgtcgccgaaggcgtgaaaaagcggacccggatgtacagccacggcaatgccgccgtgccgcgcgacgatgcgcaggtactccaggttgtgggacaaatcagtagctggagttgggcgacgcgggcggcggtattgcaggcggcggaatcgttgcatcaggcctaccttgcgcatgccagcggcgacgaagcgctcattgaacagcgcaatcgtctggctgaagtcgaagcggcgcaggcgcaggtgattgccagcgactggatcccgcgtgcggccaccgagctgttcaacgccctcggcgcgtcggatacgcgagtgagtaaggcccttgatcggcactggcgcaacgcgcgcaccgtggcatcgcacaatccggtgatttataaggcgagaaatatcggtaactggctggttaacggcgaagcgccaacctttatctggcagattggcgacggcgagaaatcgcagggctga

SEQ ID NO: 183006 - DNA, 2364 bp, Klebsiella oxytoca
gtgagtcagttcgatatccgtgatgcaggcgattacatcgctccgaagggcttgtatgagcagaataaagcccggccgtttctgggcagtgtggcctgctcgcatactcagttgactgctggtgcgtgggaagagatccaactggtatataccgtgggcgccagcgggcttgctgacggcgcatggctgaagctcgcctttaaattttactcggactgggcgctgtttcagaccagcgatccctcggcagccaactatgtcagcgccgagtatcaggcaggcccgctagtgccaggacagagccctgccacggtccagcatttgaaggtgcgttttgatcagaaggggcacgagcgtccgttccagaaagccattctgatcgacattattgatggctacatcaatccgggagacaaaatcattatccgcctgggcgatcggcgccatggcgggggcggtacgcgtgtacagagtttcgttgagaaagatttccgcttccgcctgtttgttgatccgctggggagctcaaaatttgctgaggtacccggcgatacgctgctggatatcgtgcccggtgagcccgcttctcttgccgcgatcgcgccaaggttactggcacctgaaacgcctttctccgttatcgtccggctggatgaccgctgggggaatacctgccggagcctgccgctggcaggacgcctgacgctgacctcatcgggaggtgaaacagagcatcatgatttccggctggccgaagagggctgggcgattgcgcgtatcagcgatttgcatctctgcgcaggagaatggtcgttcagcgccgcactgggcgcgctgcccttgctggaaggcaaaggatggataacggtggaggaaaccgccacaggtctgcgcccgctctatgccgatcttcatgtgcattctgatgacacggttggtaccaacgacacgctgtataacctcagctacgggcgtgatgtcgccggtctcgatattcttggctataccgccaacgattttaatgtgactgaagcgcgctggaagcaggcggtaaagctgattaatgcgctgaaccagccagacagttttgtctgctattccggtaccgagtggtgcggtaatacctgcgccggtggcgatcataatgtggtgttccttgaagatgatgaacctcagttcccgtttgataatcaggggcggctggtgcgttcattcgagtggaatgagttcactgccggaaccatcaaaccgggtgcatggccacttgatgaactttatgcggcctacgcacgcgaaccgcacaaacatctgttaatcccgcatgttggcgggcgccgctgcaacctggactggcatcacccggagctggagcgcttgatagaagtcggttccgcctgggggcagtttcactgggtctatgccgaggcgctcgaacggggctatcgtctgggcgcgaccgccaacagcgatgaacatcaggggcgatgtggtggtggcgtgcctgcgacagccgtcttcggatcccgtggaggcctgactggcgtacttgctgaacaattcgacagaaaaggtgtggctgcagcgcttcgtgcccgccacacctatgccacaacaggtgaacgaagctatgccgagttgcgtgcgggcgatgcgctgatgggagatgtagcggaattcagttcagcagatgtactgcgttatcgtctgttaggcgatgcgggctgggaagcggtaacgctttacgatggagaaagagaggtatggcatcgcgatttgcacgcggaatttgggcgctctaaatatcagttccgggtgcgtctggggggggcacgcattaaggaccgctatcggggtgcttactggacgggacatattgaggtcacagggacaccaatcaatgcgttttccctctcgggcgcagatcacccggagcagaccgtctggcgtaaaagtcatacacagattggcttgcggaccgacaccaatggtgacagcgacacagttactgtcagtaccggtgggctggccggagcaaaaatacacgttcatctggacatcagtagctatatcaaagtgggcgatccgcttttgccacaaccacatgcctgggcgccggtttttgaaacggatattgatggtcaaacgcttctgattgcaggcaaagagacttttacgcttccaggcaccgaacttgaggtagatattgaactggttaccgaacagccgcttccacgtgatatcagcggcgaaattccactttctgaacttatcctgtcagaaaaacgggaacatccgttcttcatcagtgccaggcaaaaggaccagtcccggatttggacctcagccatcttcttaacgcgttaa

SEQ ID NO: 183007 - DNA, 747 bp, Klebsiella oxytoca
gtgaagttcaaaccaaactggggctgggcttccctgcccgcgttactcatggtctgggttatcgttgcgagtcactatccctcttatgtgttgccgcaaccctgggacgtatggcgggaagccatacgctggttcagtgatggttccatctggggtcagctacaggccagcctgctggaagaattcaccggctttttgactgccgtgctgctggcactgattcttggtgtcagcgccggactttccgatcgcgtcagggagttccttacgccactgaacagcctgtttatggctatcccgcccatcgcatgggcaccgctgatgctgctgatcttcggcctgggattcgtttccatcgtggtggtgattgtcatcgctgcgctgttcccgatgtgtctggccattcaggaggggatccgcggcatccgtggcggtgaagtgcgtgcagcacgcacgctgggagctcgaccgtttcaactgcttcttcatgtctatctgcccagttccctgccatttatcaccgccgcactgcgcatcggattcagccaggcgtggcgtgcgctggtggcagcggaaatgctcggcgcctctcagggcataggctggatggttgccatgggcggacagacgggtaacagcagtcaggtactactgggaatttgccttatcgggcttatcgcctggttaatggaaaatcttgtttttcgccgcattgaacagcgctatcagcgctggcgcgcccaataa

SEQ ID NO: 183008 - DNA, 996 bp, Klebsiella oxytoca
atgggtaaatcatttcttgctgtgctgatatcaggggttttattcaatgctgctgacgctgcggattcccagccgctgcgtattggctgggtctatgcgctggccaacgcgcctgcacttatcgccgagaaagagggtttttatcagcaggaagggctgaccgtcgagcttaaatcctttggtgatggtcccgtcatcagtcaggcgctggcggcgcatgaacttgatgcagcctatatgggtgcgacaccggtattccagtggttttcgcgcgggctcaaggggcaaattatcgctaaggtgaacagcggacaggccgcgctgatcgttcccgcacagagtgctatttcccggttggctgacctaaaaggcaaacgcatcgctggcgtcaaaaaagggagcggaatggatgttctgctgcgcggtgtggtgctgcaacagcaggcaggtctggttgctgacaaagatgctcagatcctgagtatgcccgccggtaacatgcccgctgcgctgcagcagggcgttgtggatgcagccttcacctgggagccctttgtcagcgaagcactgctgcgcggcgacgccagactgctgctcgatgtaaacaaagtccaaccgggttatccgtggtatgtactgatggcgttaccggagaccctgaaggaccgcccggacgatgtagtgaagcttatccgtgcgcatcaaaaagcagtggattttatcaatcagcatcctgcagaaaccgatcggatcatggccgatgcgtttaagctgcgggctattaaaaccgctgacggtaaaacgctgccgccggaggcgctggttcaggaagcccgtaaacgtattgagtggtctgtgtcactgacgaagaaagatggcgccttttttgagcagctgatgaaggactcacagacgctgggctacatgcaaaaggcgccagagctgaatgaatttgttgatacgcagtggctgacaaaagcagggataacgcagtga

SEQ ID NO: 183009 - DNA, 807 bp, Klebsiella oxytoca
atgacgctcagcatgacgaattctcaaccatacgcactggcggtagacaatatcacttttcgctatcccggcggcgcgccggtattcagccatttcagttttcatgcccgccagggggagtttgtggtgttgctgggcccctcggggtgcggtaagagcacgttactcaatctgctggccggtttcacagagccggagcggggagccgtgcggattggcggtgagcgtaccacgccggaaaaccatcggcttggctatgtttttcagcagccacagctctttggctggctgaccgcgctggagaatgtccggttcggattgcggatgcaaaggcgcgaggacgtggcctctcagcgccgacgcgctatgacatatctgcaacgtgtgggcctggtacatgccgcacatcagttgccgcaccagatgtccgggggcatgcagcagcgcgtgtcactggctcgcgcgctggcgctggagccggatgttctgttaatggacgaaccatttgctgcgctcgatgccatcacccgtggggacatgaacgaggagacactacgtctctggtccgccattgggcagacaacggtcttcatcacccacgatattgaagaggctgtgtttcttgctgaccgcgtcatcgttctgaatcgtgcacccggtggcgtacacagcgaattgtctatcgccttaccgcgcccgcgaagcaatctggagacgcgacagcttccggcttttgccatgtaccgtaatgaattactgaagcgcattaccgatgtgatgcagcagtccgacaaccactcactctaa

SEQ ID NO: 183010 - DNA, 717 bp, Klebsiella oxytoca
atgacactggtgcgtgaaaacattacatcgctctaccggcagattgccgataccctgcggcaggaaattgccgccgggcattttcaacctggcggaaaactgccctctgaagctgcgcttgaacagcgctttgcggtcagcagggtgacggtacggctcgcgctgaagcatctgactgagcaggggattgtcgagcgcaagcagggaaagggaacctacatatcgggcaagaaggttgcacatggcatcaacgtcatgcgtagctttcatgagtcgctaaagcagcagggactgaatgccacaatgcgtttgctggtcaaagaggaggtgccaacgccagagtcgctgcaatcgctgtttcaaatgtcccggtcgctgacgtttatttcacggctgcatctggtggataatgatcccattgcggtgggttacagtcatttcccggcatttcctcatgagctgagctgggaagagaccgagaaggaaccgacctgggtcctgttagaaaaagccacgcaacatcacatcagtcgctccgatattgccatccggctagccttcgcggataagggactcgttgacgtgctgggaaccgataaaaacgcgccgctatttttactggagcgaacatcctggtttgaaaacgggcagtgcgctgagaactctcgctttttcattcgtccggaacgctacgagtttattttgagcaacagctga

SEQ ID NO: 183011 - DNA, 543 bp, Klebsiella oxytoca
atgccgtacaagctctatacagccgtgttgcttctcgctgccgcaagtttctctgcaacggcaatttctgcttcaaccccttcgattggcaatttgatcaatgaacgtttgtccttgatgaaagatgttgccggatataaagcgcaacatcaccaggcgattgaagatctacagcaagagaagaaggttctggagagcgccactgctgatgctgattcgctgggattaaaaggcgagagcgtaaggccatttattcaggcgcagatggacgccgccaaggcgattcagtaccgctatcgcgccgactggttggcggcgccggaaactgactggcagcctcgcccgcttcaggatgtccggacgcaaatcggccaacttagccatcgtattctgcaaagtgttgcggcacgattaaagtccgggcagcctctgacggaacagagtcgggaggcatttatgcacgccgtgcagcagaagaatttacacgagcaggataagcatagaatctgggaaacaatgaaagggatttcgttgaaagattaa

SEQ ID NO: 183012 - DNA, 771 bp, Klebsiella oxytoca
atgaaagcactcgcaacattagtcgtcgccgggattatgcagcttggttttgcccacgcagcgctggcgcaggatgatttggcaaagattcagtccgctggcgtactgaaaatcggtactgaaggcacctatccgccattcactttccacaatgcttccggcacgctggagggttttgacgtagagattggccgtgaaatcgccaaacgcctgaaagtgagcccgcagttcgtagaagggaaatgggacggcctgatcgccggtgtcgatgcgagccgttacgacgtggtgattaaccaggtcggcattacgccagaacgccagaagaaattcgacttctccgagccgtatatcgcgtctaaagcggtgctgatcgtcaatgacaaaagcagcattaaaagttttgaagatctgaaaggcaaaaaatcggcccacacgctgaccagtaattatgcgcagatcgcgcgtaaatacggggcggatattgtgccgaccgatggctttaaccaatctgtggatttagtggtgcagggccgtgccgatgcgaccatcaacgacaacctgtcgttcctcgacttcaaaaaacataaaccggatgcgccagtgaaaattgtcgcaacccagtctgacgcggagaaatccggcgtgttgctgcgcaaaaacaacccgcagctgaaagcggcgattgataaagcgctggaagagatcaaggccgacggcacctacgaacgtatttcccagaaatacttcggtgcggacgtgtcgaagtaa

SEQ ID NO: 183013 - DNA, 753 bp, Klebsiella oxytoca
atgataacgctctccagcattgaaaaaagtttcgacggcagccgggtgctgaagaacatcaatttaacgattgaagaaggcacggtaaccacgctgattggcccttcaggcagcgggaaaagcaccttattgcgctgcattaatttgctggaaattcctcagtccggggagctgaccatcggcaaagagcgcatcgcattcgcgccggacacgcggataaaaggccaggatattcgtcgcatcagccgccagaccggcatggtatttcagaacttcgcgctgtttccgcatatgaccgccctcgacaacatcaccgaagggctgattacggtgcataaatgggatcgcgaacgcgcccgccgccgtggtgaagaactgctggataaagtcggcatgctgcacaaatgcaacgccctgccgaatacgctctctggcggccagcagcagcgcgtggcgattgcccgcgcgctggcgccgtcaccggcggtgctgctgtgcgatgaaccgacttccgcactcgatcctgagctctccggcgaagtggtggccgtgctgcgccagctggcgctggaaggaacaaccatgatcatggcgacccatgatttacgtctggcggcgaatatcgccagccaggtggtgtttctggaagccggggaaattgttgagtccggctccgctaacgatttgtttttacacgcgaagagaccccgaactgcggagtttatcgcctctttaagcaccgcgctcccgtaa

SEQ ID NO: 183014 - DNA, 654 bp, Klebsiella oxytoca
atgctttccgcggggctgaaattcaccattcccttaacgctgatctcttttattcttgggctgtcgctcgggtttgcggtggcacttttgcgtctgtacggcccggcctttttaaagccggtgatacggttttacgtctggctgattcgcggtacaccgctgctggtgcagctatttttgattttctacgcgttgccgagcgctgggctaaccattgatgccttccctgcggcggtgattggctttaccgtcaatattggtgcgtatacctcagaagtgatcagggcaacgctgctggccgtgccgaaagggcaatgggaagctgcccattccatcagcatgacatgggcgcagtcgctgcgtcgtattattctgccgcaggccgcgcgcatcgccgtgccgccgctctctaacacctttatttcactggtaaaagacacttcgctggcgtcggtgatcaccgtaccggagatgtttcttgctgcgcagcaaattgcggcagtgacctatgaaccgctgattctgtacagcgaagcggcgattatttatctgttcttcagttcggtgttatcgcatttgcaagagaagctggagcggaaattagcgggtacgacagtaaaaggtcaggtcaatgataacgctctccagcattga

SEQ ID NO: 183015 - DNA, 786 bp, Klebsiella oxytoca
atgcgcgctttatccgatgctcccgctaatgaattcgagccagtacgttttgtcctcaccgatatggatgaaacgctcacctggcagggccgtttgtcggccgccgcctatacctcgcttgaacaattgcagtccgccgggatacgggtgatcccggtcaccgccgcgccggcgggctggtgcgatcagatggcgcggatgtggcctgttgacggcgtcattggcgaaaacggcgggctttttttccgccgcaccgcggacgggcatggcatcgagcatcattactggcacgcggacgacgccacggcatccgtcgccgcccggctgcggaccatcgccgaccgggtcctggcagcgctaccggaagcccgtctggcggacgatcagcccttccgcctgaccagcctggccttcgcgcggcctgccgacccggtactggagcgccgcatcgtcaacacgctgcggcaggcgggtgccgacgctaccgtcaacaacttgtgggtgctgggctggctgggtggctacgacaagctgaccatgacgcgccgtactctggctcagcactacggcgtcgatatcgatcgggagcgggaagctattctctacagcggcgattcaaccaacgacgcgccgatgttcgcttttttcaaacacacggtaggcgtcagcaccgtccggcagtatctggatcaactccccgtagccccccgctgggtaacgctcggccccggcggcgcggggttcgtggagatggcgcaggcggtattcggccaaaaatccctctga

SEQ ID NO: 183016 - DNA, 957 bp, Klebsiella oxytoca
atgccggaagcgggtgaattgtatctcatgccgaaaagagaaaataactggcatttaaataatgtcgtcgatgaactccgtcgcgttcgtcaggcgtggcgcgatgaacatgcgaaaaataattatcgtaataaacgtagtttaccttcccgggaaagcgttaattcagtcaccgataccttgataaaagtgctttatccgatgcgattaggtgatattgaattacgcaaagagggcgaagattattacgtcggtcatttgctaggcacctcgcttgaccgattgactgaagaagcggtcctggaactttattatcagtcagatgagcaggatgcgagtcacacgctgtcgcaggaggcggtcaggcgggttcagcagtttgccaaccgtttgccggtcatccgccagcgtctcgatcgcgatatcctcgcggcgtatcagggagatccttccgcgcgcagcatggatgaggtgctgctctgctatccgggaattcatgccgttatgcactatcgtcttgcccacgagctgcatcaactcggtctgcctctgctggcgcgaatgatatctgaaaaagcgcacagccagaccggaatagatattcatcccggcgcgcagattgatgacggattctttatcgatcacggaaccggcgtggtgattggtgaaacggccatcgtcggtaaacgcgtgcgtatttaccaggcggttacccttggggccaaacgatttattgctggcgatgacgggcagttgcaaaaaaactatcctcgccatccaatcattgaagatgatgtcgttatttacgccggtgcaacaatattaggacgaattactatcggcgcgcgttccagcattggcggaaatatatggctgacccgtgatgttccgccggatagtcatgtgcagcaggcccgggtacagcaaaaacatttcagcgacggtgacggaatttaa

SEQ ID NO: 183017 - DNA, 906 bp, Klebsiella oxytoca
atgaatttacttgaaacgatcggcgctacgccgttaatcacgttaccctcttttgccgccgagctacctggcgtaacgctgctggcaaaagcagagtttatgaaccccagcggctcggtgaaagaccgcgcggcgaaagcgatggtgctggacgggattgctcgagggttattaacgccgggtaaaacgattattgatgcgaccagcggtaataccggcattgcctacgcgatgattggcgcggcgctgggatatcaggtccggctatatctgccgcagaataccagcccggagcgcaaacgtattattcgtcattatggcgccacgattgtggagaccgatccgctggaaggttctgacggcgcctatattgaagttcaggcacaagttgctgcgtatccggaacgttatttttatccggaccaatataacaaccccgtcaatccgaatacgcatttcgcgacgaccggaaaagagatttgggagcagagcgggcaacagatcacccattttgtcgccggtatgggcacctccggcagcttcgtcggcatcgcgcggcggcttaaatatgaaaatccgcgcgtgaaaacgctcgccgtacagcccgcttcgccattccacggcattgaagggaccaagcatatggggagcagcattaaaccgggcattctcgacgaaaccctgttcgacgacgttattcccgtcaccaccgaggaggcttatgcgagcacgcggcgcctcgcccggcgggacggcatttttgtcggcatttcctctggcgctaatgtcgccgccgccgcgcggctggcccgcacgctgccggcgggatcggtggtggtcacgctgctgtgtgatgttggctcgcgttatctgactgacgctttctggaatgaaacccatgattga

SEQ ID NO: 183018 - DNA, 429 bp, Klebsiella oxytoca
atgattgaattgactcaagaaatcaccaggctgattggcgctgaaggggaaaaggcctatcccaacgaatgctgcggtgcgctctttggccacttttccgcgcagggcgatgcccgcgtgacggcgattttccccattgttaatgctcgcgagtcggaggagcagtaccaccgttttgtcatcaccgccgatgactccctgcgggcggaacgcgctgcgctggctcaggatgtggacgtgatcggctattaccattcgcaccccgatcacccggccattccatctgaatttgatcgcgaacatgcgctgccgttttacgcctatatcatcgtggcggtcgcgcagcgcgaggcgggggcactgaccagctggcggctgacccaggaccgccagcgctttttgcaggaggacgtgcagatcgttttataa

SEQ ID NO: 183019 - DNA, 291 bp, Klebsiella oxytoca
atggcatcgacattactgattcccactgcgctacgcgccttcaccgacggtcaggggaaagtgatcctcgaaggccacaccgttgggcagctggtcgcagcgctggcggagcgatttcctgacattcagccgcatctgtatgacgatacgggcgcgctgcgcagtttcatcaatctttacgtgggagagaacaacattaaaaccaccggcgggctggagactccggttagcgatggggcggaagtgctgttggttcccgccattgccggcggcgtcgggaaggcgatatga

SEQ ID NO: 183020 - DNA, 1176 bp, Klebsiella oxytoca
atgagcagaccgagcattatcccggatgaccgtctgacggagctgacgcatgcggaaattgcccgctacagccgccatctgctgctgccggaagtcgggcttgaggggcaaaagcggctgaaggccgcccgcgtattgcttatcggcaccggcgggttgggggcgccggtggcgctttatctggctgcggcgggggtcggtaagctggggattgtcgattttgattttgtcgacgtctccaacctgcaaaggcagatcattcacaacaccaaagatatcaaccgacccaaagtggcttcggcgaaagacaagattaaagccatcaacccagagatacaggtggtgacctataacaccaccctgagcagcaaaaacgcgctcgaaattattggtgaatatgacctcgtcgtcgacggtacggataattatcccacccgttatctgatcaatgacgcctgcgttttgctgggtaaaccgctggtctatggctccatttttcagttcgaagggcaggccagcgtcttttatgccggggaaggaccgtgctaccggtgtctttatcccgagcccccgccgccggggttggtaccttcctgtgccgaaggcggcgttgtcggcgtgctgccggggattatcggcaccattcaggcggcggaagcgatcaaacttatcgtcggtggcagcgagagcctgattggccgcctgttgctcttcgatgtatggcagatgaagcaacgcgagctgcggctggagagggctcccgactgcccggtatgcggtgagcatccctcgattcatgcgctcatcgactacgaggagttttgcgggctgaaacctgatgaagcagaagttccggttgaaagcgtcacggcgcttgagcttcacgcctggatagaggagggaagacccctgcagctgatcgacattcgtgaaccccacgaaagggcgattgcaaaatttccgcaggcaaaggtgataccgctgggccagatagtcagacgtatcggtgaattcgacccgacggtcgatgcggtatttctgtgcaagatagggcagcgcagtattttcgccattcgggcactccagcgcgcaggttatcaggggcgcgtgatgaatttaaaagatggcctaaacgcctgggcacgggatgtcgatacccgtttgccgcagtactaa

SEQ ID NO: 183021 - DNA, 945 bp, Klebsiella oxytoca
atggcagaacaaaaaggcattaatgcactggggcgtgaagccgcgtatcagttagcgaacgtgaccaaaacggcaccgcaatttgcggcaatcaccccgcgctgggtcagccgttttctcgattataagggcctggaatcgggaatttaccgggtgaacaaggtcgtggagggggagacgccgctggatgtattatgcagccaggatccgtcgcgcgttgaaataccccagggctatatcgagtatcagaccacgccgcgtgaataccagctggattcgattacgaccattataaacgtcgataccaaaatcgccgatctctacagctcgccctacgaccaggcctcagagcaaatcgcgctggcgattgaaagcctgcgcgagcgccaggaaagtcagctgatcaataacgatgaatatggattgctgaaaaatatcgacgactcgcagcgtattcagacccgaaatggccgaccaacgccggatgacctggatgagctgttgtccaaagtctggaaggagccctccttctttctggcccatccgcgcgcgattgccgcatttcagcgtgaggccacgcgacgcggcgtgccgccggtcaccgtgaatttgcatgggggcacgtttatcctgtggcgcggtattccgctgatcccttccgacaagctgtttgtcgatggtctgaaaaacccgaaaggccagggcggaaaaaccaatatcctgttgattcgttccggtgaaagcaaacgcggcgtgctgggactttatcaggaagggctgccaaacgaacagtctcgcggtttgtcggtgcgcttccgggggatcgacgataacggcgtggcatcctatttactctcactttattgctccgctgcgatcctggccgatgacgccattgccgtgctggaggatgttgaagtgggtgaatattatgactacgagtaa

SEQ ID NO: 183022 - DNA, 1524 bp, Klebsiella oxytoca
atgacgccattgccgtgctggaggatgttgaagtgggtgaatattatgactacgagtaatttattcacgcttccctatgcgcccagcggatgggcgggcgacgcgccctccgcgcgtgattatggtctgcccgacgcgcgcgatctgcaggggctgcctgacgacgcgcccacacgcccgcgtgcgaccgaagcggcttacgcgccgcgggtgctgccattgggccaggagagcagggcggatatcgcgcctcgcggattcgcgccgttacccccttccagcgtaaaaacggcgccgccggcgcgggttggacagatcccggtggaacgcatccgcgctgatttcccgatccttagcgaacaggtggacggacatccgctggtgtggctggataatgccgcgacgacccagcgcccgaagcaggttatcgatcgtatcagccactattatttacatgagaattcgaacgttcatcgggcggcgcatacgcttgccgctcgttccaccgatgcttatgaagccgcgcgtgagaaagtgtcgcgctttatcggcgcccgcggcccggaaaatatcatcttcgtgcgcggtaccacggaagggctcaatttgatagcgcacagctacgtgaagccgctattacgaccgggggatgaaattatcctgacgttgcttgagcatcacgccaatattgtaccgtggcagcttattgcccaggaaacgggcgcgacgatccgcgttgcgccggttgatgagcacggtcagctgatcgttgaggaatatatccggttgttcaacgataaaacccgctttgtctccgcgacccacgtttctaacgcgctgggtaccgtcacgccggttcaggagctggtgcagatcgcccatcgttttggggtgcgcattgccatcgacggcgcgcagtctatttcgcatatcccgaccaacgtgacggcgctggatgccgatttcttcgtcttctccggccataaaatttttggaccgaccgggatcggcgtggtctatggcaagcaggaggtgctggaagaggcgcgcccttatcagggcggcgggaacatgattgccgacgtgaccttcgaactgacgcgctatcagccctcgccgaataagtttgaggcggggacgggcaatattgctgatgccgtcgggctgggggcggctatcgattatgtcacctcgctggggatagaaaacattgcgcagtacgagcacgccttactggagtatggcatcgagaagctgtcggctattccgggcctgacgctggtcggcaccgcggcgaacaaaaccagcgtcttatctttcgtgctggcgggtcatgaaaatgcagccgtggggcgctatctcagtcaggtcggcattgccgtgcgatccggacatcactgcgcgcaaccgatcctgcgccattttggttatgagagtaccgtccggccttcgctggctttttataatacgccgcaggaaattgattttctcgcagagcatgttgccaggtttgcttcgcggtag

SEQ ID NO: 183023 - DNA, 867 bp, Klebsiella oxytoca
atgtcccagccaccgtacattcgtcctgaattcgaacgcgaattaccgccgctacgtaatctgccggtggaaacgccgctacccttaagccagcgcctgtggaatcaggcatggctgcgtaagtctgtgattgtcgccctggtgctggcgctatgggagatcgccgcgcgaatacagcaaaacgatctgatgctgcccggggtatttcagacgctgcaggcgttcagtgaagacctgcgcaatggcgaactgccggaaaaaatcgtcaattcactcagtaccctgctgaaaggatatctggccggcagcgcgctggcgctgattgccagcgccctggcagtgaccacgcagtttggtcgcgatctgctcagcacattaaccgcgatgctcaatccactgccggcaattgcgctgctgccgctggctctgctgtggtttggtctgggaaatgccagcctgatatttgtactgatacattccgtcatgtggcccatcgctctgaatacctggtccggatttagcagcgtgccggaaacgctgcgcatggccgggcgcaactatggcctccgtgggccacgctatgtgatcacgattcttattccggcatcgttgcccgccatcctttccggtttgaaaataggctgggctttcgcctggcgaacgctgattgccgccgaactggtattcggcgcctccagcggcgaaggggggctgggctggtatatattccagaatcgcaatgaactgttcaccgaccgggtatttgcagggctgttaacggtcatcgcgattggtctgctggtggaaggcatcgtattcgccagtctggaaaagatcacaattaagcgctgggggatgcagcgttaa

SEQ ID NO: 183024 - DNA, 843 bp, Klebsiella oxytoca; identical to SEQ ID NO: 178099

SEQ ID NO: 183025 - DNA, 1008 bp, Klebsiella oxytoca
atgaataaaacaagcagaatactcgcctgtacgctggcgctttccgccctgggcgggataagccagccggcattagcggaaggaaacattagtatcgcgcagcaatttggcatcggctatttaattcttgatgtggtacgtgaccaacagcttatcgaaaaagagggtcagaaagaggggctggatataaaagtagagtggcgcaccatttccggagtaaccgggatgaatgaggccctgctctctggcgctctggacgttgcgtcagcgggggttccccccgtactcaccctatgggatcgcaccaaaggtaagcaaaatgtgaaagcgattgcctcgctggggtcgatgcccaattatttgttgagtaataatccggcggtaaaaagcattaaagatctgtccgcaaaagatcggatcgccgtaccggcagcaggcgtcggttttcagtctcgtacattacaaatcgagaccgcgaaattatatggtgacggggacttcaaacgcttcgataaaattagcgtcagtttaccgcatccggacgccagcgcggcattaattgccggcggatcggagattaccacccacttctcaagcccgcccttccagtatcaggcgctggaacataaaaacgtgcataaagtgctcagctcctatgacgtactggggggacaggcaacctttaatgttctctataccacccagaaattccatgatgaaaaccccagaacctataaagcgttttatcgcgcgctcagcgaagccgcaagtattattaaccgtgacaaaaatgccgctgccgaaacttacattcgcgttgagaaatcgcggctgcctttaccgctggtacaaaaaattgttaacgatcccgaaataagctttacggtttcccctgaacgtactggcgtatatgccgaaaaactccatgagcttgggatactgaaaaataaggccgactcgtggaaagattatttttttaacgaagcatgggaaaaccccggcagctaa

SEQ ID NO: 183026 - DNA, 1023 bp, Klebsiella oxytoca
atgcctttattttcggatcatcacttacgttcgcttttgcagcgccatctggtaagggttggcaccggacctgatatcgctcaaaaggtcgcggataacctggtcgaagcctcactaaaaggccacgactctcatggcgtgactctgttaccgcgctatattcgggccattctggcaggggatttgaaccctggcgccacgctcaccatgttgtctgatgccggaccgatcgtctcttttgatggggggcacggctttggccaggcgttgggcgaacaggccatggccgcgggtattgagcgtgcgcgcgagtttggggtggcaatcatcggattgtctaatacccaccatcttggacgaatcggcgcatgggcggaacaggcggcggacgccggactggtctcgctccattttgccaacgtggcagcgccgtcggtcgtactgcctttcgatggactcggtgcccgactcggcacaaatcctttttgtgtcggggtaccgctcgcgaaccggcccccggttatccttgacttcgcaactagcgccatagcaggcaataaagcgcgcatcgcatggaatgaagggcgagccatccctgaaggatgtgcggtagatgcgaacggacaacccaccaccgaccctgcggtattaatgacggaaccgttcggtgccttgctgccttttggcgggcataaaggcgcaggattgtcgctgatttgtagtctactcggcgctgcgctgaccggcggcgaaaccgaaagccagcaaattccgccacgtgccggaatcatcaacaatatgctgtcgattttatttgatcctgcgcgactgggggcgcaggagagttaccagcaggcgctattagcgcaggtggactgggtgcgtagcgggcaggaagggcgcaatgtgcagatccccggagagccagaattgcgcgcgtatacccgccgtcggcaagagggtatctggatcgatgaggtgagctggcaggcgtttgtcgccctggaagcattaaatacctga

SEQ ID NO: 183027 - DNA, 1014 bp, Klebsiella oxytoca
atgcatctggcgcgtttcccccggcttcattttggccacttcccgacccctctggagcctctcacgcagctttcacgcttgctggaggggccaaatatctggataaaacgagacgattgcacaggactcgccactggcggcaataaaacccgcaaacttgagtttttgctgggcgatgcccaggcaaaacaggcggatattatcattacccagggcgccacgcagtctaaccatgtgcgtcagaccgtcgcggcggcagccagactgggtctggaaacgcatatttttctcgaacaacgcgtcacgacgctgggtgatgagtatcagcaatccggcaatgtgctgctggacggtttgctcgggggcaaaattatcgctcatcttcccggcggtacggatatgcagcaggcaatggaacaacacgcggaaagcctgcgagccaggggccacaccccttatgtcatccccggtggaggctcgaacgctatcggcgcgctgggctacgtctcctgcgcggaagaactgctttggcagtccagccagctacggctgcgcatcgatcatatcgttcatgccaccggtagcgcaggtacacaggctggcctgattacgggcttaactgccacgcacagcggtattcctctcctcgggattagcgtccgcgctccgcgcgaaaaacaggaacacaacgtctggcgtctggcgcagcagacgcgggaactgctcggtgtaccgggtgaattgccgcgtgaggcggtggtggcgaacagtgattatgtcggcgaaggctatggcttgcccaccgaagggatgcttgaggcgctgcagttgctggcgcagcacgaggggattctgctcgaccccgtctattccggaaaaggcatggccggattgattgatctgatccgtaaaggtcatttccgcagggatgagaatgtggtgtttatccatacggggggaagcgcaggtctgtttggctaccgtcaggtcatcgccgattctttgccatcatga

SEQ ID NO: 183028 - DNA, 720 bp, Klebsiella oxytoca
atgagtacaccatttctgctgggaattcttggcggcatggggccgctggcgacgctggatctgatgcataaattgctgcgggcaacgcccgccagcagcgaccaacagcaaattccccatgtggtatggaatgtgccgcaaattgcggatcgccagcgggcgctggcgggaacggggccatccccgctgccgcagttgttgttcggtgtggaacagctgaaccgcgtgggcgtcagtcatattgccattgcttgtaatacggcgcaccactggtatgaggcgttggcgcagcatagcgacgcaccgttgctgcatattgtggatgccacgctggcggtattcgacgggaaagagaaaccccggcgggtcgggattatcgctacccagggcacgctggatgccggttggtttcagcacggatttaccgcgatggggatccaaagcgtacagccaacgcaagaagaactgcggcagtggtttgtgccgggatgctatgcggtaaaacgcggcgaactgcgtaccggcggagaactgctgagtctacaggcccaggcattgcgcgatcgtggcgcagagcggctggtgctggcctgtacagaagtgccggttgcgctggctgaggtgacctcaccgcatctggccgtgtcaattgatcccgcagaagcgctcgcccggcagtgtgcccggctatggctggcgcaacgcgagacatggcattaa

SEQ ID NO: 183029 - DNA, 1008 bp, Klebsiella oxytoca
atgaataaaagtctctgtgtcttacttgcagcgggtggcctgtgggttaatagcagctttgccgaaacgccagcggaagttcgggtggcatatagcggcggttctcaggtgctgatgctggctaaggccgatggttctttggataaggcactcaacagcaaggtgaaatgggtgcaatttgcgtccggtgctgatgcgttaaattactttgccagcaatgcgattgatattgctaattttggatccagcccggcaacggcaggcattgtcagaaaactgccggtggaaattatcggcgtctctggcgtgattgccagctacgagcgtttaattggtaaagacggtattgccagcattaaagatattgagggtaaacgagtagcctatccgccaaactcgacggcgcaatatgcgcttgaggccgctatcagcgttaaccatctcgaccgcagtaaaataacgttattgccgctgcgtccggcggaaatggtcgcagcctggaaacgcggtgatatcgacgcgggctatgtctgggcgccgtttgctcaggaactggagacttctggcgggcatcaggtgttcgcaaccaaagatctgcaaaaagatggctacctgatttataacaactacgttgtgcgtaaagcttttgctgagcagtatccgcaaaccgtcagcgcgttcctgcgtgttcatcagcaaaaagtcgatgagtttaagaaagacccggagcgcgcggcggccattgttgcgaaagaggtgggcgcgccggtgacgaccgccgtcaatacgttgggtgggctggaatatcccacgctgagccagcagggtacggcgcaatggttggggaacggtacgcaaaccaccgacagcgggattgggaaagcgctgaccaaaacctctcacttccttgctgatatcggtgagattcgccaacgtgatatcccggccagctgggacagcgccattaactcccgttatatccgtgatgcagcggtagccgcgcaatga

SEQ ID NO: 183030 - DNA, 771 bp, Klebsiella oxytoca; identical to SEQ ID NO: 178093

SEQ ID NO: 183031 - DNA, 777 bp, Klebsiella oxytoca; identical to SEQ ID NO: 178092

SEQ ID NO: 183032 - DNA, 564 bp, Klebsiella oxytoca; identical to SEQ ID NO: 178091

SEQ ID NO: 183033 - DNA, 807 bp, Klebsiella oxytoca
atggaaaaatatacgattaatggaatagtggaatttactccgcaacgtagcgttttaatactcattgctgacgagacgaaagcggtatcattaaatatgccggccagccgctgcctgttgctgcttattcagcaggatggcaaaaccgtagcccgtgaaacctttttcgaggaagtgtggataaagcatggtgcccaggtgaccagcaacggtttctatcagaatatttccctgttgcgccgcgcatttaaggaactgggcgtcgaggaagatattattattacggtgccgagagtgggcgtcaggctggaggcgacattaacgatgacggaatttcagccgggcgaggcggaaaagacgccggtcgcggaggaacaacgcccacacgttgacgagcctgggcataaggaggtcgctgctgcgagtgtgcctggaaaaaagcggttaaggccgcgaagctctcttctgtgggggcttgcggcgctgctgagctgtctggtgggcggttttgttgcgtggcacacagaattcgactcttatttgcaaacttatgtgcccattaatgctaaattttcgcaacaatgtcatttttttgccaataatgatgtggtagatcacgttcggcatatgacttttatcaatcgtagcaaatttgattgcgaaaaatattcgtggatttatttgacgctttatcctggggaagcccgcgtttcggtgattagctgtcagcaaaaatttagtcaatggcgtgataatcaatgcctcaccaaatattacattaaggaggtagtcaatgcgccggcgtga

SEQ ID NO: 183034 - DNA, 132 bp, Klebsiella oxytoca
atgctatttggacaatggataggtaaaagagatattcccgacccttaccgtaaaagtgaagaagcatttgcttcagtttacgacttaattgagcaggcgggtaagtgttgggctgagaagcttggcgcataa

SEQ ID NO: 183035 - DNA, 237 bp, Klebsiella oxytoca
atgactctctgctggatagttaaaaaatcttgcatgcctagctatgggattagcatccttgtgtggcaattgacgtccccatgcacatgccacattaggatcttcaaatgcactagttattttgtcaataaaaccggcttctggaatcgcatcctgagtcaaaaagataacaacatcataatcttctgcatgatcatttacagcaagattccttgtgccgccatgattaaaatctga

SEQ ID NO: 183036 - DNA, 276 bp, Klebsiella oxytoca
atgatgcaatcgcaagaccgcgatgccgtcgcactcagcgcccgtacgctgggggcgttgttctcttatgctccgggcagcgagcaggctgctccgctggttgccgccctgcgcgacggcagctggcaaagtcagtggccctggccggtcgcgaacggcctggcggcgcagttcgctctcgaagacgatgaaccgctggcggacgcctggcagcggctgttcatcggcccgtgggcgcttgcctgcgccgccgtggggctccgtctggctggataa

SEQ ID NO: 183037 - DNA, 858 bp, Klebsiella oxytoca
atgggaaatggatggcatgaatggccgctggtgctgtttacggtgctggggcaaagcgtcgcaggggcgattatcgtcagcgggctcggctggctttcgctgaataataactccgaagcccggcagcgcctggtgcgctgcatgttttttatctggctggtcatggggattggctttctggcgtcgattatccacctcggctcgccgctgcgggcatttaactctcttacccgggtcggcgcatcggcgttaagtaatgaaatcgccagcggcgcgctgtttttcgccgtcggaggagtctggtggctgctgacgtttctcggcaaaatgccggcaatcctggccaaggcctggcttctgctcaccatgctgctcggctgcctgttcgtcctcgagatgaccctggtctatcaaattaataccgtgccgacctggtataatgcctacaccaccgccgccttcttcctgacgatggtgctgtgcgggccgcttttcgccgccctgttgctgcgggtagccaacgtgccttttaacggcacggtcttcgcgtcgatgagcgtcctcgcgctgctggcaagcctggccgtggtcattttgcagaacagcgaactggcggagatccgcagttccgtgcagcaggccagcgccctgctgccaaactacggctggctacaaatcctgcgtttagcatttttgacgctgggccttggctgctggatctgcccgctggcaagaaagaaaaacccgcgcatcgccagcctgctgctcggactgatactggtattactcggcgagtttatcggtcgaggcctgttttatggcctacatatgaccgtcggtacggcgattgccggttaa

SEQ ID NO: 183038 - DNA, 831 bp, Klebsiella oxytoca
atggctcagattccagcattacttgaatcaggaattgttattggtggcgatttagaagaaaatcaatgggttgtcattccctacgatgaaatgaatgtttcagtgaaatgtaattttccaaaagttgttcataccggttataaaggattggtgtatggagatgttcttccaacctattgggaggcggttgcttatcctgatgagccctttatgcccgtagaggcgccgggagaatttgttacaacaggaaaggaatcgaaaatatgggcaggtaatggttcatccactgtggccatgggtgagcaatcgcgaattattatcggtatcgaatatagccctgaagatgaagaggaacacactattaatggttgtaaggcatttgctcttggtgattcctccagtgccagttttaaaaacccaccaggcagcgataacttattaatcaccgctggtatagatagttatatcgatcttggcgaagctaccaaatcggttggaatggtagctggtgataacagcactctttatgcccgcgacgccaatgataatgtcgcaatagccacgggatatcattgcgatgttaatgctgaaaatacaaataatacagtcatcatcaccggtgaaaattcgagctccgcagtaggcgaacatggtattatttttgcctcacgtattcttgagtctttcactatcggtaagggcggtgttgcctcggtggtgtggcacgatggtgagcgtaatcgtattaaagtgatttatgagggggaggagggtattgaggcgggaagatattacaaggttgatgagaatgggcaagtagttgaaatctaa

SEQ ID NO: 183039 - DNA, 387 bp, Klebsiella oxytoca
atgaaaaaattctttctcttactgctgctagtctcggctagcgttacggctcagacatctaacgaatccgtcttgcaaaaatctcttaaaccttggtggcccctctcgataaacgacaatggtggcatcatcactatggtcacgaacgaagaccgtgttacacctcaggtttacgaatccataattcttatgggggtttgcgtgccttttctatcacaaaatgcccatgtctggtatttaaagaataccagcgaagtgcgtgtgctgaatcgctttgggcacaatggatttgcattcgaatccccaaggaaatcatgtaaagaagtcgccaaatctaagggggatgatgcgggattggttatatcaacctacactcataatctttag

SEQ ID NO: 183040 - DNA, 249 bp, Klebsiella oxytoca
atgttcaagtgtcctatctgtggtgccgttgccaagacgcgcaccagtcgtccattgagtaacacaaccgttcggcattatcaccagtgccagaactttgagtgcagcatcacttttaccacgctaaacagtgttgaaaagctggtaacaaagcgtggtcatcgcgaaaagttgccacctggatttatccccacagatgcgtttcctgcctcgcattacggcaacgatcagcttacttttgctatatga

SEQ ID NO: 183041 - DNA, 1155 bp, Klebsiella oxytoca
atggcactgacgacaggcactatcgacaaagcaaaagcgctactggacgaaggggcgcagcgattccagaactatcagtccgaactgtcgcgcgtaccggccttcagcatcctgatgggtggtaaggcactgacgcagcttgatccgcgcatcatttcactggaactgaccgacaaccgcggctttgaggccgacgagctgaccattgctatcgacgacagcgacggcttgatcgaattacctccgcgcggggcggagctgtcagcgtcgctggggtggcagggcgagccgctggtttacaaaggggtttacacggttgacgaggtcgcccattcggggccgccggacaggctagagataaccgcccgcagtgcagatttcagggacgagtttaacgttaagcgcgaggtatcctggcacgatgtgacggtagaacgcatcgtgtcggccattgcccggcgttacaagctgacgccggtgatttcagagcaactgatgaatgccgagattgaccacgctgatcagacccaggaaagcgatatgtcatttctgacgaggatggccgacctgctgggggctattgccaccgttaaaaacggcagtctcctgtttatcctgccgggcggcggcgtcagcgcgaacggcaaagccttgcctgagtttgtgatcacccgctccagcggtgacaggcattcattccgcattgccgaccgtgacgcttacaccggcgtgcaggcgtactggctggatatggagtttggcaaaaagaaaaaagtgaccgtgaaaactcgcaagaagaagacccagaagaagccgcgcagtagcgccagggaaggggattatatcgcgggcgaagacggtaacgtttttgtattacggacaacgtacgccagcgaaactgctgctcaacgtgctgccgctgcaaaatggcaacaactcaaacgcggcgctgctgaatttaatatgacgctcgcccgtggccgtgcggatctgtacccggaaatgcatggcaccgtgtcaggctttaaagcagatattaatattcaggactggataattgcgaaggccacgcacacgatcgatgagggcggatttaaaacgcaactggagcttgaagcgaaaatacctgaatggattgcagaaacggagtcatag

SEQ ID NO: 183042 - DNA, 489 bp, Klebsiella oxytoca
atgatgatggtattcgggatgtttgtttttacgctgcgcactgtcccgtatcagcagcttcggcactcgcaggagtggcgacacgttaaaaatgaccgggttaatcagtcggcggcctggcagtatatcgggccgggtgacgatacgatcacccttgacggtgtgctatacccggaaatcaccggcgggcggtggtcgctgtcggcgctggaggcaatcggctttgccggtcgcccctggccgctgattgaaggtgacgggcagatttacgggatgtacgtaatgacgcggctggagcggggaaagacggagtttgatcgctacggcaacccaaaaaagattgagttcacgatcagcctgagtcgcgcggatgcagattttcgcgagaagctacagacgtcctcggtcagtgacgtgctggatgatctcaaaaccagcgcaaccaaagccgttaactcggtatcaaactccctcggcagcctgttttaa

SEQ ID NO: 183043 - DNA, 1164 bp, Klebsiella oxytoca
atgagcagagtatacaaaactgtactgacggccgccgggacagaacgccttgccgccgccgccgtatccggtatccgcgctgaatttacccagatgggggtgggagacggtggcggcgctcttcgtgctcccgatgcgcggcaggccgggctgattaacgaggtataccggtcagcgctgaacagcctgaccatcccggagggcacccgcaatgtgattcaggctgaacttgtcattccgccccagaatggcgggtttacgcttcgtgaggccgcactctatgacgatgaaggcgtgtgtctggcggtggctaacatgcccgagacctacaagccgctccctgttgagggggcgggtaaattcagcgttatcagaattaacatcaccgtcagcaatacggatgacgtcagcctgattgtggacccgggtattgtgctggcaacccttgaagacgtgcagcaggccggggacggcgcgaaagattatgccgatgaacagctgagcgaccacgccaggtcacggaatcacccggatgcaacgcttaacgccagagggttcacgcagctcagtaatgaaattgacagcgaagacgaggggaaagccgccacgccggcagccatcaaagcggcggtagcgtcagccattcgttcagcctgggagctggataacccggtgggtaccgtccggctgtttgctaaaaatgtgaaccctaatcagcgctggccgtggtcggaatgggtgtataccggggaaaataaagcgctccgcgtcggtaaggccgatggctcaaacgtgggacaaaccggcggcagcgataccgtcacgctccagcaggctaacctgcccgccgtgcagattgacgtcactggcgagaccagcgagcaggaagaaaagacgctgacaacaacggaaaacggagcgcataaccatcagggcggtgacggtgcaccgggtgaacaatggcgggaagggacacacggcacggataaccagaaggatgctaattttaacctgaccagtgatgcgccagcgcactcgcatgacgttgctatcccaccgcacaaacacacgacaagcggcaagaccgccagcctcggcgagggtaaatcgttcagcgtggtggaagcgcacactctgctgatgtgctgggcgcgggtggcgtga

SEQ ID NO: 183044 - DNA, 291 bp, Klebsiella oxytoca
atgagctttcagttaactaaaacaatttccgtgaatatcacggcagatgacggctccgtactggagacgcaggaaaaggaatttacggtcacttaccgcgtggatgacatttcagttaaccatgccggtacgggaacggcgtggctccaggcttacatcaacggcgtcacgtccggccagccggaggcgtattccattcgctacaccgccggcgacggtgatgtgttcacccaggcacaggcgcagctgatggcgctggataaatttgccgctgcgacagtcgcagactga

SEQ ID NO: 183045 - DNA, 2340 bp, Klebsiella oxytoca
atggccgcaattaacgagagcagagaatgggctgatgatatctatctgattgcccggcaggataaagtcctgggcggtgccggtggtatcgccaatattcaggcggcgcaactggcggcgcggacgctgtttttacgcgacagaacggacgagttaaacacccgcgccatgcgggttgtcggcagtttcgaaaacggggccactgtgaccagccgcaatcagctggttcagttcggccaggataacggcctgtactgctggaaggggtactatcccgaaggcgggaaggttgttcccgcaggctccacaccggccaacaccggcggcaccggctcacagggctgggatgcgtacgataacgacattctgcgcaatgaaatcgccccgtatatcaaggccatcggatattttatgcatgaggaaggcgcagatgtgaccgccgaccttcaggcctttatttactcacactatcgcaccgttatcccgcgccagagctaccggacgctgattaagagtaacgttgtcattccatccagccgggagctggtcattcataatgacgtcgagcagattaccgatgaagttgatacctggtcggtgaaccacgtcgccagcaaatacccgatgtttcgtattccgccgggcgcgaccgacaccattatccggggcaagggctggctctgggctgtctacgagggcgtactcgccgaagcggacgagaccagcgaaggggtcattacccgcccgcgcatagaaatcaatgtggccggtaagctgaaagatgcgtcactgaacaactattcctggttcggcgggattaccgcctataaagccaatgatattgatgtgaccggcagtaaggtctttcactgcggcatccggccgacatgggatgcggttaacctcaggcgcgtaggcggaggcgctaacgggatagggttctattcctgccggggcatgaaagggcatcgtgtctggacgtaccgcaatggcggcaacggtattttcaccaatgcctcattctcgccgaacttccagctgtgccagaacatttctaacggtctgtccggtattcagcacgggccgggcggaaacgctgatcaggggcaaatctgcaacaacaataattcactgaacgttgccgacgggattgatattcgctggacaggtacgggggtggcctcggtcaaactccagctgaacgggaactaccattaccgcaacggttattttgatgaggatatgacaaagccgacgcaggacggctccgggctggcaaccatcgcctatgtctccggcgtggatatgaacggcaactcgtcgatagagagtgcaggctcagggctttaccttcaggggtgcgcctctgtgaaagggacggggaataccgcctcggtttacaccaccaaagagggaatttatctggggggcggtacggtatctgatattcgtctcgatgtgctggatatctcgacacgtggaacggcgctcagttttggcgggtcgtcggcgttctacgatatcaacctgaaaggcaagtttaacagcacggaatcctacggtgccgtcaccggctcggcgtcggtttacagcaatgtgaatatcagcggtgatgtttacaccaaacgcgatatgtatctgctgggtggtaactggagcggaacagctttcttctcggagaatggcgcgaatatcaatatcggcaatatcgacattggtttccggtcggttaaattccgctctaaaaatggcagtctgattatcagcggcaacctgtccaatctggatgtttccgggctggacagccagtccgagaccgggcgggcgttacagctgcgcggctgcaccgggctgcatggttatgacgtcaaactgaaaaccgtttcgggcatcggcctcgactgtatcccctgggagggagtcgcctgtaataaggtgtccgtcagtggaaacctgtatgcctcggaagcggcgggcggtaaggcgtacagcatgacgaacgtcggggaagtcaccttccgcgacgtggtggacgtcgggccgaacaccgtcatcggcaacccaccgaggattaaagatgcgtatgcgctggaaggctccgggcagtgggcggcaacccggcttaaagcgggcagcgttaccagcgttgatattgctgtatccggtgcggtgatgggcgatatgacgatagcctctctcgaccaggtgacaggctcggcgaccctcagcgcaaaggttatcagcgctaataccgtgcgcgtgtcgctgacgaataataccgctgccgatattgatattgcggcgggtgtggttaaagcctctgtctggagacgaaaataa

SEQ ID NO: 183046 - DNA, 603 bp, Klebsiella oxytoca
atgagtaactccttgctgccgccatcatcccgcgactggctacgctataccgaggcgggtgcagcccggctttcagccattaccgtcgcgctgcgtacactgtggacgccgacagattgccctgccaatttgctgccgtatctggcctgggcattatcggttgaccgctgggataaaaactggccggcagagagaaaaattgctgccatacagcgatcatactggctgcaccggcgtaaaggcactcgcgcagccgtccgtcgcgtcattgaagatatgggattttcagcaacgtttgccgagtggtttgagaccggcggcgagccagggacattcagtcttgaggtggatgttaatgaaaccggacttacagccagaacaaacaaggagctggacaggctcatcagcgatgcaaaacccgtaagccgtcatatcagtaagttcagcctgtccacccgtaccgctggcatagctcacatcggctcggcccttgtcagcgccgatatcgtgacggtgtacccggaggattttaccccggaactgagcctgcgctacaacggcattattcattacgacggcaaccagcaattttcaggtgattaa

SEQ ID NO: 183047 - DNA, 900 bp, Klebsiella oxytoca
atgccaacgattgacctgtcacaactgccatccccgaccattatcgaggcgctggactttgaggccatcctcattgaggttaaagcggtcatggtggcagcatttccggaggatatgcagagtgctgtggcggctgcgatggagctggagtcggagccgctgaacatcgtcgcccaggcgatggcgtaccgtgaaatgttgctgcgccagcgtatcaatgaaggggcggcggcctgcatgctgagccatgcgaccggtgacgacctggataatatcgccgccaatctcgacacggagcgcctgattatcaccgaggcgactgacacgactgacgcggtaacggaaagcgacgaggcgcttcgcctgcgcgcgcaggcggcatttgaagggatgagcgttgccgggccatcggcggcttatgagtattttgcacgcagcgccagcggtaaggtggccgccgtccgcgcaaccagccccgcaccggcagaggtggttatcgctattctctccagcgacggcgatggcacagcatcagccgaattgattgcgacagttcagacggcggtaaatgatgaagatacgcgcccgctgggtgaccgcgtgacggtacagagtgcggagatcatagagtatgtgattgatgcaaccctttacctgtatccggggccggagtcagagccgatcattaacgccgcgatcgcatcactgaagacgtttcttgctgatgccgataaaaagattggccgtgacgttgtgcgctccgccatatcggcatcactgcacgttcagggcgttcagcgcgtggtgattaattcccccgggaacgatctgcagatcagcaacacgcaggtcgcgcgcaataccggatacagcgtggaaaatggcggaacggatgagtaa

SEQ ID NO: 183048 - DNA, 366 bp, Klebsiella oxytoca
atgacagaacgctatcgcggcatgaatgctgcaggcacaggcaccctgaccgacgaggatcatgtgtggcagtcggttaacgacattctgctgacgccggtcggcagtcgcctgatgcgtcgcaactacggctcgctgtgccctgatcttatcgacagccctcaaaatgacgtcacccgcctgcaactgatgagcgcggcggtgatagcgctggcggcatgggagccgcgtattgtgctggataatatcaatgtgacgtactccgccagtggtgccgtgacagccgagctgtccggcatgctgactgagaccatggaaaaaagcacccgtgcggtgacgttaaggagcgccaatgccaacgattga

SEQ ID NO: 183049 - DNA, 585 bp, Klebsiella oxytoca
atgggaattgccgaactgcttcgcctgctggagaacattgcccgcaccggcacggtgacggagattgacgagaaaaacgcgcgcgtgcgcgtgcagagcggtgggctggaaaccacctggctgcgctggaatgcacagcgggccggggcttttaaagtctgggtaccgccatccatcggcgagcaggtctggttcctgtgcctgggcggtaataccgacgttgcctttatcggcggcagtctctatagcgacgacaacccggcgccgggcgcatcgcgtaatgagatggtggtgaccgcaccggacggcgcggcgtttcgctacgacgcggaggcgggcgcattgcaggtaaaaggcattaaatctgccgtggttgaggcgtcagtcaaaatcacgctggataccccggaggtggagtgtaccgatctgctgaccaccaaaaatctgaacgtcaccgaaggcggtgagatgcgcggcgatatcacccacaccggtggggcgtttacgtccaacggcgtgcaggtggatagccacaatcatggcgctgttgagcgcggcggcagctggacggagggcacgcgatga

SEQ ID NO: 183050 - DNA, 642 bp, Klebsiella oxytoca
atgagtaatgatgatgcgctgttcagtcagcttgatgcggtatttgcggccattctgtcgggcatgtctccggcagggcgccagcgtaccgcacgcagtgtcggcacgatgttgcgccggagccagagccagcgcatcggcagacaggaagcaccggacggctcaaaattccccgcccgtcgccgtcgcgtattgcgttcacaggcagggatcggctttgtctggcagggtgaaaaccgccgcctgcgtaactggcgggccgttcgtggccgtcgcggtcgcatgctgaccggctttgatgaagagcgcggcgcagttcgctcgttctatcgcgaagacattgagcggtatctcgatatcaactttaacgagacgcgccgcaataccacgaaagccgatccaatgttccggcgtttacgtacggcgcgttttctgaaaacccgcgccactgctgacggtgcagaggtgggttattccggtgtggctgcgcgtatcgcccgcgtccatcagcttggattgcgcgacaaaatcaacgacagcggcgcaatggcaacctatccccgccgtgagctgctgggcctgagtaaggccgaccgcatggcgatagctcgccaggtaattgactcgctggggttacgctga

SEQ ID NO: 183051 - DNA, 462 bp, Klebsiella oxytoca
gtgaaaaaagctgaactgctgcgcgccgcgctgattgccggtaatacctggtgcaaagccaatccggaacaaatcacggtctgggtggagaaaggccatatccagatcgaggcgaccggcgaagcgtcgttcatgtaccattacaccatacaggtgctggcgatggattttcccggtcaggtggacgatctcatgctgccgctgctggcgtgggtctggcagcaacagcccgatctgttgctgaatcccgacaataaccgcaaggtggaatttgacgccgatatcgtcaatgacgacgtcgccgacattctgtttaaggtaccggtctgggagcgcgtcatagtgacaaaagacgcattcggtacaccgaaggcggaacatcttgccgagtcacgcccgcgtttcaacggtggcgagtgggagacggtctttgatccggagtccgggggatcgctggcatga

SEQ ID NO: 183052 - DNA, 396 bp, Klebsiella oxytoca
atgaaaggattgatagtcgcattcgtggtgcttctggtcttgtttattacggtctgcatcggatttaacggtgagacaaataaacgccaggcagccgaaaaagccctggctgataccacgcaaaagctgaaccaaaccggcgaggtgctggccgaggtcagagcgctacgccaggacgtcagccaggttgaagccggactcaaaacactaaatcagcagcgtaatacaacgggagagcaccgacgtgaaaacatcaaaactgcactggccgctaacgactgcgccgttgctcctgtacctgctgctggcgctgacagcctgtaccagcgcgccgaagaagtcagcgccgcagattattcaggagcctttaccggaaagcctgaccgcaaaaactga

SEQ ID NO: 183053 - DNA, 552 bp, Klebsiella oxytoca
atgaaaaaacgcattattgcctgctcagccgccgcgatcatttcgctggccgccacgctgtggccgcaggcgctgcgaaccagcccggaagcacagctaaagatggcgaagtatgaggactgtcgcaaaaccccgtattactgcccggcaggtgtactgactgttgggattggctccacctcacaggtcgagaaccgcgagtacaccgagagcgagattgccgggcgctggtttaacgatcttttgcgcgctgagaaatgcgttaaccgcgaatttaaaggggcttccgcgccgcagaaagtctttgagagcatgaccgatggcacacttaatgtcggttgcacagggctgggctggtacaccaacagcaagcgccagagggtgcgaaccaccctctggcgccatgcgcaggcgggtaactggaagggcgtctgcgagagactgacggactttgtgaactccgccgggaaacgctcgcagggactggttaaccgtcgggaagatttcaaagcctggtgtctgtctgatcccgccatcaggggggcgaaatga

SEQ ID NO: 183054 - DNA, 282 bp, Klebsiella oxytoca
atggagctgattaatcgtatctggaatggcgtgacgtactcctggtcaaccttgctgacgggcgtcggtgtcatgacgcaaaaggactggctgaccgctattggcatcctgattggtatcgctgccgccgcgctgggtgagttgcatcgccgccgcatggcgcgcattcacgaaaccaataatgcgttactgaacgaactgatcgacgcgattcgcgacgacaccgagaaccgccaggacgttaaagagctgatccgcaccatccgggaggcaccgcgatga

SEQ ID NO: 183055 - DNA, 201 bp, Klebsiella oxytoca
atgaaagtgcaggctttgcagggcgataccgtggatttgctgtgccagcgtcattacggcactactcagggcgtaaccgagaacgtgcttgctgctaacaaagcgctggccggtcagctcttccttgaggcagggcaggtggtggagttaccagaaatcagcgccacggcgacgaaggagaccgtacagctatggagctga

SEQ ID NO: 183056 - DNA, 498 bp, Klebsiella oxytoca
atgagccttgtagccggtcgcactgttaccccctcctcggaggatgtgccggacactgacgacggtggcgagaaagtcaccgccgggacgttctggccggaaatcaccctgagcgatgtgcgcatggagatgcgcatcaatggcgcggtgacgacttcgcgcctcaaacaagccgttatcgaaggtgtatcccacaccctcgatcaactggctgactggcagtccatccagctggcggcggggtatacccgactggctgatgtgccggcggtcgaggtgaacggagaaagtgtgaaggtgcaccgtttcaggcgggcggtattcagcattgctcgcgcgcacattctcggcacgaaccgggacgtggacaccaccggcgatgctggtgaaaaacgcgccgttgcgctggcgtcgcaagccgatgatatgtggcgcgatgcacgctgggcgatctccgatattcgcggcactgtgcgcaacactgcggaggcgttctga

SEQ ID NO: 183057 - DNA, 882 bp, Klebsiella oxytoca
atgctgacaccggcacaaaaacattttcagaaggtcatggccgaacgccatggcaaaaccgacgagctgacggatacagccagaacggcgcacgagcaaatcatgcaccggctgcgcatggatcagagtgcattgaagcgagtgcagtctgaccaggcgaaagcggcgatgaaacgccagttactcccgcattacgagggctggatcgagggtacgctcgacggcgacagcggcaggcaggatgaagtgattgtcaccctgatggtgtgggcgattgatgccggtgattacgccctggccgcccgtattggccgctacgttgtcacacatggcctgctgatgcctgaccgcttcaaccgtaccgccgcaaccgttctggtcgatgagatttgtgatccgattctggtgcaggtcaaggcagacgataccaccgacgtcacgccatatctggcggtgctcgatgaagtggcggagtttaccgccggcagtgatatgcccgacgtggttcgcgccaagctctgcaaggtgcgcgcctttgcgctgcgtaacggcacaactgaagagcaggcgaccgcgctggagttattgcgccaggcgctgacgcttgatgcgggcgccggggtgaaaaaagagatcgaccggctggctcgtgtggtgaaaaaagccgccgcacagacaggcgccgacggggctgatagcaccgatggttccgatggcactggtgatgctgacggagacagcacagcggacagtgcgggtgcaggcgaagctgcagcaccgtcagaaccggcggtggcggccagaaccacccgcaaaagcacaacccggaagccggcagcgcgcaaaacaacagcgaagaaaacgtctgccgccaaaaaataa

SEQ ID NO: 183058 - DNA, 1050 bp, Klebsiella oxytoca
atgagaaaccctacccgtaagctgtttgacagctacgttgcccggcaggcgcagcttaacggcgtcagcaccgccgccgttgcggcacagttcagcgttgacccgaccgtacagcagcgccttgaggcggctgcacagcaggatgatgcttttctgaagctgattaacgtctttggcgtggaagagcagatcggccagaaaatcctgatcggcagcaaaggcccgctggcgggtgtcaacaacagcacaacaaaccgccgcaatcccggcgctaacgaccagatggacgcgtacaactatctgtgccgcaaaaccaactacgactacgccgtcagctacgcgcaaatggatgcgtgggcgcatcagccgaacttccagccgctgattagttctgcgatggcccgtcagatgtcgctcgaccgcatcatgatcgggtttaacggtgccagctacgccgacccgtcagaccgggcagcgaatccgctgttgcaggattgcggtattggctggctgcaaaaaatccgcaacgaagcggcgcaccgtcgcattaccggtgtgacgatcacttcgcgcaaccagaacaacgccattgtcgccgagggcacctacggcaacgtagcggctgcggtctatgacgccaaaaacagtctcatggatgaatggcataagcgcaaccctgacaacgtggtgattttgtccggcgatctgctgacaaccagcaatttcccgaccatcaacgccatgagccagaccaacccgaacaccgaaatgctggccggtcaactgattgtggcgcaggaacgcgtaggcaatatgccgacctttatcgcgccttacatgccgggtaacgccatcctcatcacgccgcttaaaaacctctcgatctactaccagcgtggcggcctgcgccggacgatcaaagaggagccggaatacaaccgtgtggcaacgtatcagtcctctaacgatgacttcattgttgaggattatggcgcggtggcctttatcgacggcatcaccttcgctgaaaaagcagaaggcggcgagtaa

SEQ ID NO: 183059 - DNA, 834 bp, Klebsiella oxytoca
atggcaggcacagctaaaacccgtaagaagtttcgcgttgccgtctccgggaataccgtggatggccgcgaaatccagccgcaacacctccgcgatgcggcggcgaattacagccaggaggtgtacggcgcacgcgtcaacattgagcactatctctctatgtttccgggtagcgattttggcgcaatgggcgatgtagtggcgctcagcaccgaagatattaccgacggcccgttagccgggcgtacggcgctttatgctgagattgaaccatctgatcgcatggtgcagatgactgacaaaggccagaaagtctattccagcattgagctgcacccgcagttcgctctcaacggtaaagcctatgtcgtaggactggcaatgaccgataccccggctagcctgggtaccgatcgtctgaagtttgccgcacagcaacgcgcatcggtgatggcctttaacaatcagcagggtgaggcaccaatgtttaccgaagctctggaagccgaggtgatcgagctggccgcccagcgcagcgatgagggtaagcagtggtttaaccgggtgatgggtattctcggcaagggccagaaaaccgacgatcagcgcttcggtcaggtgcatcaggctgttgaggctgtggcgcagtctcaggttgatttgggcaagcagttcagtgctgccgagcaggagcgccagcaggacaaggccgccattcagaagctgaccaccgaccttgccgcactgaaccggcagcttgaagggacagacggcaatttcagccagcgccctgcggccggcggtggcaataacgcgcagcttgctgactactga

SEQ ID NO: 183060 - DNA, 1722 bp, Klebsiella oxytoca
atggcgactgaagaagcattcatcatgctgcgggcacggcagctctactggcaggggtaccccccggcggagatcgcgcgcctgatgggtatcaatcagaacacgatttactcatggaaaaaacgtgacgaatgggacaccacgccaccgatccagcgcgttacgacgtccattgatgcacgactgatccagctcaccagtaaggacacaaaaaccggtggcgacttcaaggaaattgacctgctgacgcgacagctcaagaagctggacaacggaacgccagcgacgcaaccgaagaagaagatccgcaagaaacagaacttcttctcagaggcgcagatctccgcgctgcgggccaacattatcgactcactgcactggcatcagaaaacctggtatgagaaccatcaccaccgcaaccgggccattctgaagagccgacaggtcggcgcaacatggtactttgcccgtgaggcgttgttgcgggcgctgtctgacgatgtgaagtacaagcatcagctcaaccagatatttctgtctgccagtcgccgtcaggcgtaccagttccgcagctttattcgtgccgctgctgctgaagttgatgttgagctgaaaggcggggatatgatccagttgttcaacggcgcggagctgcattttctcggcacgtcggctgcaacggcgcagtcatataccggcaatctgtactttgacgaatttttctgggtcgggcagtttgccaacctgaagaaagtggctggcgcaatggcgaccctgaaggggttgacgcgcacctacttctccacgccatcggctgaaagtcacgaggcgtaccccttctggtcgggtgaagccttcaacaaaggccgcagccatggtaagcgcgtggagttcgacacgtcctggaagacgcttaacagtggggtgatgtgcccggataaaatctggcgccagatcgtcacgttgcaggatgcggtcgataacggctgggatctgactgacattgacgaaattcgggaggaaaacagcccggaagagtacgacaacctctacgcctgcaccttcatcaagaacggtgaaacggcctttgactacaacatgttgctgagctgcggtgcggatggctatgacgagtggccggactggaagccgtacgccatgcgtccgatggccgatcgcccggtgtggattggctacgaccccaatgggtctagtggtaagggtgacagcggggccatctccgttaacgcggcgccactaatccccggcggtaagttccgcaccatcgagaccattcgcgtgcgcggcatggagttcgaggcgcagggcgccatgatcattaacatgctcacgcgctacaacgtgcagcacatcggtatcgacggcagcggcattggtgaggcggtgtaccagctcgtgaagaagcgtttccctgcggcggtgtgctaccagttctcgccagccagcaagcgcatgctggtactgaaaatgctgcaactgatccgcgccggccgctgggagtatgaccgtggagagtatgacctgatcactgccttctgtgctgtgcgcaaagtggtcacgcctggcggcgtcatcacttatgacaccgaccgtgcccgtggtgtgagtcacggcgatctcgcctgggcgaccatgcttgccactgttaacgagccgctgggtcaggaaggcggcaacactatgactgttatggagtactaa

SEQ ID NO: 183061 - DNA, 1053 bp, Klebsiella oxytoca
atgagcagacgaaaatccccgcgcggcaggcagtatgccagagagcaagccgacctcgccgaagcgctgaagtcagcccccggcctgagcgcttttacgtttgacggcccgtggcctgttaccggtgctcatgacctgctggataacatgtactgcgccaacaatggccggtactacgagacgccgatcagctggtacggactggcccgccagttcggttatgcgagctggcatcagtcggcgctgttctttaagcggaatgtgcttgcagggtgctttatcccgcacaagctgctgtcgcgccaggcgttcagtgcctttgcgcttgactggtttgtgttcggcaatgcgtatattgagatgcgccgcaatcgcctgcgtgggccaatgggctttcgtaactcgctggcaaagtacacccggcgcggttccgacctcgacacctactggtttattcagtccggccttgatgatcaccagttcgaaaccggttcggtgtgccatgtgatcaacccggatattcaccaggagatctacggcatgccggagtacttcgccggtctgctgtcggccaatctggcccactccgccgacaagttccgtaagctctactacgacaacgggtcgcatgctggctgtattgtctacgtcagcagcgcagtggctgacggggaaagcctggagaacctgaagaagacattgaccgacacacggcgaggcggggcatttaaaaacatcctgctgagtgcgcccggtgtcggcaaagatgccgtgcagatcctgccgttcagccagatatcggcaaaggatgagtttgtcggcgtgaagtcctccacgcgtgatgacatgctcgcggctcaccgcgttccaccgcagctgatgggcgctatcccggaaggtaacggatcattcggcgacgtcgagaaggcggcgagagtctttgcggtcaacgagctgacgccggtgatggaagcgatgaagcatgttaacgactggctcggcgaagaggtgatccgcttcaacccttacgccctgctggaaaccccgaagtag

SEQ ID NO: 183062 - DNA, 513 bp, Klebsiella oxytoca
atgcacaaatttgcacaatttttgacgagtcttttttgccccgcagtgccagcactggcggggtttggaaggttcgtgcaaagtgcacaaaaagagacatgtttagcgcgcaggcgaggcgggggagcaagcgcgcgcttcggggggagggaaggggtcggcatacctcgccaaaagccgcctgccgggcgcgcactttcgcggtgcatcaggctagcgcacaggataaagcccgccagaatggcgctggcagcgtctggttgggggtacggcgtcgaggttttgcaggctggccgacatggccgggaatggtggtgctgcaggtcggtaccacaccgccgggaatggcagtgcggtaccttcagactacttcggggtttccagcagggcgtaagggttgaagcggatcacctcttcgccgagccagtcgttaacatgcttcatcgcttccatcaccggcgtcagctcgttgaccgcaaagactctcgccgccttctcgacgtcgccgaatga

SEQ ID NO: 183063 - DNA, 717 bp, Klebsiella oxytoca
atgaagttgtcagtaaaaattcactatacaaagaaatctcgtaagtatattttgaaatataatagatatgatagatctaatcataatatttggaataacactaaaggcgtgatagctataatcagaaaacaaatacgacagcattatttgaaagaacaaggaaaacattgcgcatattgtaggatgcacaatcatacttcgcatggattatcttgggatattgatcacatactacctaaggataaattcccacaattcttatttcagcctttaaatttaattcttgcttgtagggaatgtaatatagccaagacaaatgatatttatctttcgggcagttgtaaggtatctaaatataaatatcctcataattcagatgattatgaaatcattcaccctcattttgatagctacgatgataatatattgcttgagaagactgggaaatattacacatatcacccaaaaacacataagggaagaatgacaattattgcttgtgacttgtcaagatattctcttattgagtcgtataataccgatgatgtagatgtgcttcgtgctatatctgagcaggtgttggataatgaacgatttttgaacgatcctgattttattccaatttcgccagaaagtgagagggaaatgcgacgacgccttgagaaaacaatacttacaataaagaaaacaactgagttttctgatatcacaaaataa

SEQ ID NO: 183064 - DNA, 1566 bp, Klebsiella oxytoca
atgcttattaaacacgtagaaactgataatatatcggttgaattaatcccccacgaggctcatttggaattggaggaaaactattactccgtcctcgttggggctaatggtcttgggaaaagtagaatcctcgaggctatcgcagcgtgtgggatgatgtttcagttggtcaatgaaaatcaagagggaagcaaatattcatttagtgaacatacaccaatgtgttacctcaggcattctaactttaaaaaaattaaaattacttttttttcgaatgatgaaagtaaaatgaatgctatcgcagcagagcgttatttttacaagtttgcaggatttgtccagcgaacggaggaagagccacaacctagtccgaatactctttttcacggtgattatgtaaaatatgatgagttagatagtatcatttgtatatcaaatggagcgtttgataaattccctagtttgtctgagccttggtttaggaaaagtgaactctccaaatattttaatttatcaaccttggaatatataaagaagtcaagaggggaagatatctctgcagttaagatgttgtcgaaggaaatattatctgctttctttacggatcaagattcatttgaaaaagggatggattttttatattcatttgggtttgctgatgaaatatctctttctttgcagattaatgatgacctctacggaattgggtataacggtattgatgacagggagggtttcctacattcatttcaagcaaaagggtcattacatgagaaagaaatagccccagagctagaagctatcattaatgaaacgttaaaagaacttaagaaagatatacctagagagtcaataagtctcattgaggatatgccatcttcattctggaataaggttgacaccaaagaatacaagtttgacaggcaatcaaatgttaatactcgattttataggaacataaaaatattatcggattatgacatacttcagcttaggaatatatctttctcaaagggagatggtcaactaacaaagttgaatggcatgagttctggtgagattaatattttactgactctgtttagaattaattcaaaaataaaagataatgctttgatattaatagatgaaccagaggtaagccttcacccagcatggcagagaaatgttatacctactatcgaacgatgcttctcaaattataagggttgtcattttattatagctacgcactcccctcaggtggtgagtagcatcccagaaagtaattcgagtgttattattcttggcgaaaaaagtaaaactttaccaggcttcatgttaaaaggtatgtcagcggattatttactattttctacgcttgactctccaggtgaacataatgaatatgcggtaagaatgctcacaacaatattagccaagctgaacctgcgaaaagagttgtcagtaaaagaggctctttttttagagagggcgatagaattatacccattggataataaagatgatgaatatgtatcaatcaaacaccttttgaaacaagttatcacattatatgctgcctga

SEQ ID NO: 183065 - DNA, 699 bp, Klebsiella oxytoca
atgagttatctgggaagcaaggcagcaagcggcgtttatcaaaaaatcattgccgaaatgccgccgcacgatacttacattgaaacgcatttgggcggcggagcggtgatgctgcgtaagccaccggcgaggcagaattgggggatcgatatcgacccgctgacggtcgaggctttttgccaggggaacccagaatttattgacgcggtaggcgacgatctgtttattgacgtcggaggggcggtttcgtttttagagtgctttgatttttcctctgccggccgcgtgcttgtctatgcagacccgccatatctccatgaaacccgcagcagcaaggcgcgctatcggcacgaatattccctcgaaaaccacagagagttactggcctgcctgcttgccctcccggataacgttaacgtgattttgtcgggatatccgtctgatatgtacgatgatgcgttatccggttggcgtagcagggagtttcaggcgatgacacgcggcggcgtgcgaacagagaaaatctggatgaactaccaggaaggtcgcgcatactcccacgcatttgcaggtaaagattacaatgatcgctaccgcattaaacgaaaggcgcagcggtggaaagacaagttttcggccctccctgctgctgagcgtatggcgataatgcaggcactttgcgaagctgatgctgattga

SEQ ID NO: 183066 - DNA, 216 bp, Klebsiella oxytoca
atgaaatcaagttatatcagctatttcgaagggtacgacgcagcagggcatctgatctataacgggaacggcgcggcaactgtagagcacggcagtggtgattgtatcgacccagtagagctcaaagatcagcactgtgactttctccttaaaaaagctaaagagaccaatagtcttgttacccggattgtcatcattaaccttatgaaattgtga

SEQ ID NO: 183067 - DNA, 2622 bp, Klebsiella oxytoca
atgtctgattccgctgctttggcatggagatggaatgctccacggcaggccattggccccgacgatgccgaagatagccctattgagtatctcaccccaaaaggcgagcgtaaggcgctcgcctatggtgatcttgttgacgtcgtttatcgggagccgctgcgcccgcgcgaaggcgaggcgcgagaggcgtttgatcgcacaaggcgatctcgccatctccgccgccgcatacaggctctccctgcttttatccgcaagcgattctctcagcgactggagtcactggagcggcaggatccaaaagccgctgtacgctggttgtttagcacatttgaacgtcatgtattgcgccgcgttgatgccgtaaacgcccaatacctgccacaaagcaacctccccgcaattttgttcccgctgcgtgatgattttcacttgctgccgtgggcagataaaaaacgcctgaaacgactggcttataagctcgctaacctgatcaaaagcgagtttatgcgcgagtttgatttccagtatgagaaaaccactgatgtagagttttccacgatctatgcgtatggcgcgattgccagcaaagcaacagcgctcaatatcgcgatcccatcatggggaaggtattgcgatgagaagctggaggctgaagaagcgctgcgcgccgtcgcacgccttcagtcggaaaagtggtggttaagtaaaatccgcaaaatacatgaccgctggcgtgagcacctcatgatcgccaccggctacgtcagcaaaatagcatcaccgtattgctccgatccctgcttcagagagtggatagcccagaaaaaggcaaactttgaatttcttcaggctatggagctggaagaccaggccaccggtgagcgcagctctttgctggacaaggtcatgggtagcacgtccaatcccaaaaacgcccgcgccgagctaatggtgcgcatgcgcgggtttgaggatatggcaaccgaaatgggtttggtcggcatgttctatacgctaaccgcgccgtctagttatcactccacgcacgtaaaatcgggcaagcgcaacgacaaatatcgcgacgcaggcccgcgccagacgcagaaatacctctgcaaagtctgggcgcgagtccgcgctaaatggggccgcgagggtattcgtactttcggctttcgtgtcgccgagccgcatcacgacgcaaccccacactggcacctgttgttattcctgcgcccggaagaggtggaatatgcaacggctattttccgaaaacatgcactgaaagaggacggcaacgagccgggggcgcaggagcaccgctttaccgttacgccgattgatgaagaatttggatcggcaacgggctatatcgcgaaatacatttcgaaaaatatcgacggttacggcatggatggcgagttagacgacgaatctggccagcctgttaaagagatggcaaagcgcgtgcgggcgtgggcgtcgcgctggaatatccgccagtttcaacagatcggcggcgcgcccgttactacctggcgagagctgcgccggttaggcaaccgcgagctggttttgcaccccgagctcgaagaggtaagagcagccgcagatgcggcggactggccggggtacaccaacgcccagggcggcccgttggtgcctcgtgactgcctgcgcgttcgtctcagttacgaatacaccgaagaaggcaatgattatggtgacacggtcgccaagataaccggcgtctattgccctcttaccatccgtgaatcggtcatttatacccgcacaacagattacaaaattgtaccgaagcgtaagccatcgccgatcgaggtcttgaccttagaaggccgcgcagcggcccctcggagttctgtcaataactgtacggggcgctccgcttcggatgaaaaaccaccgtcagaaacggcggtgccagctgataaaaccgcgcctgacgacagttcagggacagaacttccgctgaatatcgaagatttaaggcgatattcacgccagcaaaggcaggagatcaccagcaggctaagaaaatccgcccgggaaagctcagatcaagccttcacgcgtaccgcgcgcggcctgcgcacgtctattgatgatgaaaccgcgctgacatgggggccaaaagtcaccgccgcgaaagatatgagcctgacgccggaagaagcagaccagcgctggcgcgaacagctgcgcatcgaggctgagcggcgcgcgaacaattacgccgccgcggctgcggaataccagaagaaaaaggccgaggccgcattgcgccaggctcagcaaaaagaatcgacgcaaaagtacgacacctccgaagaaatgatcgccagcatcggcgcgcagctgcgcgactgccgaattttcgtcggtgatgaagttgtgcggtcaatcgccgacggtgcccgcgttcgccacggtggcgggatgctggcggctgaaaatggccggttgcgtgaggtgaaggtgtggcacgcaggcgagaaagctaaatcaacttccgaatacatggcagcgcatgacctggtcatgcgcctgaagaaggcggccagacaaaaggccaaaaccgaagttaaggggtaa

SEQ ID NO: 183068 - DNA, 957 bp, Klebsiella oxytoca
gtgattaagtcacccatcaaatgggcgggcggtaaaacccgcgccatgccggagctgctgaagcacctcccgaaagctgattgtttaatagagccattcgttggcagcggaaccgtgtttatgaatacggaataccgcagctatgtgctttgcgatagcaatctgaatctgatcaactttttccgtcaattaacaggccgaccagaggatacaatttctgcctgtcgccgggtatttagcggcgggaataatgccgaggagttttataagcggcgagcagagtttaattctctgacccaaaaagcggccttagatccggatgctgctttgcttcatgctgcgtattttttgtacctgaaccgccatacgtacaatggcctctatcgcgaaaatctgaagggggaatttaactcgccctttggcaaatataccgcgccttatttcccagaaaacgaaatgcgtttgttcgccgaaaaggccaatgacacaaaagccattttcatgcatagcgactttcgcctttcaatccgctctgtcgtatacgccagcgatgacgctgtcatttattgcgacccgccgtacatcccgtccagcgcaaccgccaatttcaccgcctatggcaagccatttaccctggacgatcatcgctccctggttacaaatctgctcaatgctcatcgccagttaggcacccgcgcggtgatatccaacagcgataccccggaaacccgcgagatttattccgctttcaaccttcacgccttcagcgtccgccgctctgtcagcgccaaaagccgcgacatggctgatgaggttattggcgtgctccgcgtgtgcgattgctgcagccgttctggtggtggctattgtccggactgcggcccggtgatggggaattccacttacggcgcaatggctgcggcgggcgcattcgatggggcggagggcttccgatga

SEQ ID NO: 183069 - DNA, 195 bp, Klebsiella oxytoca
atgaaatggtcacctgaatacgcccaaggcgcagtagctgcacttaatgaagccaaagtgatcaacctcgcaaacgcgacagcgatcggtgtacttgaggggccagcggccgcgaagaccttcattagcctgatggatctggcgattgacccgttaatcaacaaatacatcgcaatggaggtgaaaagtgattaa

SEQ ID NO: 183070 - DNA, 228 bp, Klebsiella oxytoca
atgtatccgcgtctctccgttgtttgcagcgcaccgctgccagtctgcgccagggcgcttgccgccctgaaatgcttttcgcacggtcagcacaatttctcccgtgttaaaccgcatgcctatctcgtgatccgcattggccgccgctggcgtctgctgagtaagaacggcggcaagcagtggcggcttatgactcacgaaacatacaaccaggagtaccgcaaatga

SEQ ID NO: 183071 - DNA, 546 bp, Klebsiella oxytoca
atgaataacgtcatgttagatattcgtgtattgggtaaatctcctgattcacccatttctgccatcgagtgcgctttctttgaaccatcaaccgggaagatcggccccggatactaccgcgctgttgatatcacaacagtcggcggtatttatcccgaagcggtcctgcagctcatgaagggggattctgcgcagcgggccgaggtcatcaacgcaacgtgcagcgcgatcgatgccgttataggggcctgtcgttttatcgcttcaacagcgtcaaggcacgagaagctattttgttgggttgcgggtgattcgattagtgttgcagcgctggcgcatgccgtttcccggtatgatttagggccatccttgccggcatttgaagttcgcaatctctcaacgctaatccacattgcaggcgtcaccggctacgtcccgcatccgcgccgatccaaaagccacgcgctaaccgatgccgtttatcgcgccgaacagacctgcgagatctggcagcgcctgacctctccgtactttgaatcgctgtga

SEQ ID NO: 183072 - DNA, 225 bp, Klebsiella oxytoca
atgggggttaagtcaatcaagctggaaagcggaataagcgatccggattttgtggaaataagcacaaacgcacggaaacacgaacgcgcgcacctgctcggcttactgcgtatttatgttggccagttgaaaaaggaaagcgccaccccggaagagatttatcaatcaatcgaacagtgggccgatgcccgcgaacgttcaatcagtgagggtaacaagcaatga

SEQ ID NO: 183073 - DNA, 279 bp, Klebsiella oxytoca
atgagtatcttcaccgaagagaaaacatcatgggaacaggagatgctgatccgtgaggcgatagaaaacgccgaacagggatttacggttcacctgagaaacggtgcgcgtattgccgttagccctgacagtccgtcaattgacttaattatttacggtctggagaaaacaattcgtggtaatcatgagcgcgcacgaatgacctttattgattatctgtatttttggcacgaaaggttattcaagctggctaaaagaaagccgcgctctaaccactaa

SEQ ID NO: 183074 - DNA, 231 bp, Klebsiella oxytoca
atgcagaaagggagcggaattacgcgagataacttgccgaaagtcacctggataaataagcacgccgggatttgttgtggcttcaccattcgcgtattaccgcgcagggtaggcaagaagcgttatcaaatcatgaaagacggtgattctttcgggattgattttgcgttatcggaagcacgtaaaacgataaaccgtattatcaccaatcaccgctttattaatcattag

SEQ ID NO: 183075 - DNA, 267 bp, Klebsiella oxytoca
atggcaagaaacgcaagaagagccaccacgccacctgaaatcagggatttgccgggggattacccattcggcgatcgtgtttctgagtccctggccgactatgcaaaacgtaccggtttgacgctgaaagcagttcagcaccgcgcagataatggtcgcttaccgatcatccaggcacgcccacgagcaaagcgggaagtaaacttgctcgccatctacatgaacgcccgctacaaagctgaacgctttgttgagtcaatgaactaa

SEQ ID NO: 183076 - DNA, 300 bp, Klebsiella oxytoca
atgtcaagcgagctaagcgagaaactaaagctgattagggaagctgaaaatttaagccaggcaaaatttgccgatttaacaggtatttccataagcacaattaagaaatatgaggttgggataatggagcctggtggggtaacactgagaaaaatcacaactcacgaggtcttcaaaaagtacaccttgtggctaatgagcgatgaaaccaatgaagcatccggtcagatagctccggctctctcccctgatgggcaaaacggaacattgagccgccgaagcgcgaagaaggttggctaa

SEQ ID NO: 183077 - DNA, 969 bp, Klebsiella oxytoca
gtgagcattaaatctcttaaagatggctacatggttgacatgcgcccgcagggtcgcgaaggccgtcgtatacgaaaaaaattcgccactaaatccgaagcccagcagtatgagcggtggatcttgtcttcgcagcataataagggctggctagacaaagctccggacaagcgcccattctccgaactcatcgagttatggtggcgcatcaaaggccagaccatgaaatcaggcgaaagcacacggcgtaagcttgagcgtgttaatgaggcgatgggctttcccgtcaccgacaaggtaaataaaaacacctgggctgattatcgcgctggccggtacgccgcaggcataaaggccaagacgcttaatcgcgaacaggaaacgctttcttctctgttcggtacgctcattgaaaccgggaattatcaccacgaaaacccctttaaaggcgtctcaccgctaaaagtacacgcgcatgaaatgggctacctgctgaagtcgcagattaaccagcttttgactaccctgcctgagccggaaaacctcgcggcgcgattaagtctggcgaccggtgcccgctggggtgaggtcgttaagctaagacgaacgcatcttgctcattctaaagcgatgtttattaacaccaagaacagcaaaaacagaaccgtgcccgtcagcaataagctgtttggtgagctgtgcgagcggggaacgggcgatatttttgcggacgtggattacgagttgctgcgtcggactatcaagcaggtagctccggatctgccggacggccaaggagttcacgttcttcggcataccttcgccagccatttcatgatgaacggcggcaatattctgaccctgcaaaaaatactgggtcattcgaacatacaacaaacaatggtttacgcgcatcttgcacctgattaccttcaggatgcagtgcggtttaatcctctggagaattaa

SEQ ID NO: 183078 - DNA, 474 bp, Klebsiella oxytoca
atggataacttagaaatacctgatgatgagctaaaaaaataccttaccaagctataccttgaggaaaatctcaataaaaaagctgatgaagattcacagaaaattgtgaagcagcaaacagaaaaattaagacaaattacgcctatgttgtttttccagtttctcgctgagaaaggtgtttcaggaaaatgcatatcatgtggctctgaaaagctatcagtcccgcaagcattctctctggaaggaattaaagctccagctatagaaaatgggaaaataaatgaagacttgttaaggtcgcctccctacgttcagtatgtttcttttgacgatgtagaccagccgaggggaatactaaatagctactatcagatgaattgcttaaattgcggtcatctcacactttaccgcgctagtgttgtccttaagtggtttgcacgtcaggaatcaaaagaggcggaaggcaatgagtaa

SEQ ID NO: 183079 - DNA, 453 bp, Klebsiella oxytoca
atgagtaacgtttcggaacttcccaaccgcagaggtactgatgatgtaatatggaagaaagatgggagtgggggtgatgatatgtctgacaatctcgaaaaacgcgtagaaaaactcgaagacggtatgtccgcagtcaaactcgaccttgtacggctgacggagcgttcggagcaatttgtcacaaagactgatttatcagagcttaagggtgatttgaagtccgaaattatcggtcttaagggtgatatcaaagcaagtgttgcagagataaacctaaataccttcaaagcgataaaagagtctcaagagtccacactcaaggtggtgcaggatcgtttcgataagcttgatgaaatcgctcgctggaaatggggcaacattatcatccctatagtgatgggtgtattcggtgctgtagttgcgtacctagtggcaaaagctggtgcctga

SEQ ID NO: 183080 - DNA, 1251 bp, Klebsiella oxytoca
atgtctcttaacgacacaaaaatccgcaacttaaaaccatccgctaaacccttcaaaatttccgattcccatggtctgtacctgttggttaatccaggcggttcacgtctctggtatctcaaatatcgtatcaatagaaaagaatctcgccttggcttaggcgcctaccctgacgtgtctttagctaatgctcgtcaacagcgtgatggtatccgtaaactcctcgcgcaaaatatcaatccagcacaacagcgctctgctgaaagaaccacttccacaccagaaaaaaccttcaaacatgtggcactggagtggcataacagcaaccgaacatggtctgagaaccacgcatcccgcctgcttgccagcatgaacaatcatatattccctgtgattggacacttgccggtagctgaactgaaacctcgtcactttatcgacctgctgaaaagcattgagaaaaaaggtctgctggaagtcgcagcacgtacccggcagcatatgtgcaacatcatgcgtcatgctgtgcatcaggagttgatagagcacaatcccgcggcaaatctggagggtatcatcgccccgccagttaaacgtcattaccccgcccttcagttggagcgactaccggaactgttgactcgcattgaggactacaagcaaggacgagagttaacccgcctggctgtctcactcacccttcacctattcatccgttccagcgaactgcgtttcgcccgttggtttgagatcgatttcaaaaatagaatctggaccattcctgccactcgcgagtccatccccggcgtccgctactctggccgtggtgcaaaaatgcgtactccacatatcgttccactctcctgtcagtctattgctattctgaaacagatacgggaaatatccggacatcaggaacttatattccccggcgatcataatccgtataaaccgatgtgcgaaaacacggtcaataaggcgctacgcctgatgggctatgacacaaaagatgaaatctgcggccacggatttcgggcaatggcatgtagtgccctgatggagtctggcctatgggcgcaggatgcggttgaacggcagatgagtcaccaggagcgtaacagcgttcgagcggcttacatccataaagcagaatatctcgatgcccgtaaagcgatgatgcaatggtggtcagattatttggacagatgcagagaggaattcgtgccaccctatgtcaggggccgccagtag

SEQ ID NO: 183081 - DNA, 1449 bp, Klebsiella oxytoca
atgaaacaggaccttgttgcgggtatagattcctccacccagtcttgtaccgtcatgctgcgtagtcttgaaaatggcaaggtgatcgcacaggctcgtaagttgcatccaccgaccacaccgccgtgtagcgagcaggatccgcaagcctggtgggatgcattagtctccgcgctcactgaattaaaacaatggtggccacgtattgcaggtctggctgtcggtggccaggggcacggcctcgtcatgcttgataatcacgatcgcccgctgcgtcctgcgaagctgtggaatgacacggagtctgcaccgcaagcgcgtgaattgtgcgagaagattgctccggaagaatgggcacgcctgacgggctccgttccggggccagcaatgaccatttctaaactggcctggacagaacaaaattatccggggctgctggaaaaagcccaccgcatcatgctgccgtttgattatctggtttaccgtctgagcggtagctttgtgtgcgagcgcggcggggcatccggtacgggttacttcaaccccttcaccaatagctgggaaccacagctggcagcggtggttaacagtcaaattgactggatttcccgctggcccactatcatcccgtcgcatcaacctgcaggcgtggtgaagttgatgcctgagctggaggaactggcgggtgcaatcgtgggtgtcgggaccggcgataacatgtctgccgcactgggtatgaacctgaaaaccggtgataccggtatctctatcgggaccagcggtacgttatatggcatcaccaggaaagggattaccgacagcaccggcaccatcaacggttatgccgatgcggccgatcgctttatccccatgattactacactgaactccgccaaagtcaccgatacatttcgcaaaatgctgcgcgttacccctgacgaattcgacgagctcgcgctgagttcgccacccggcgccaacggtcttcagcttgttccgtggctggacggcgagcgcacccccaaccttcctgacgccacgggacacatgcgcggattacgtaccaccacaacgatgcaggatatggctcgcgccaccgtggaaggcgtactgtgcggccttctggcgggcggtctggtactgaaacaacatggcttcactgacgacggtcgcattgttgtcaccggcggcggcgcaaagtcacgagcctatcgtcagattctggctgacctgacgggcaagcccgtttggatttctccggtgggtgaaacggcagccgcgggtgcagccattcaggctgctgctgccgtgctgggatgcacaaatattgaaatggccgatcgctggagtgtgccgctcgagaaagtggccgggccacaacaagatgcgcgccatgtcctggacgcttacgttacctatgccaatgcattatcaggagagctgcaatga

SEQ ID NO: 183082 - DNA, 1026 bp, Klebsiella oxytoca
atgagttcaataactacccctgcaaaaatcaaaccgcctaagcagccgctcaaagtccctgcagaagcgggtatcgccgtggttttcttactggtcatgctgggcgggtttatcgccacgcctaacttcctgactgtttcgaacatgatggtgttgcttctgaacggcgcggtcatcggcttcctttgcctgggacaatcctttgtcctgctgaccgggggtatcgacctttcctgcggctccatcgtggcgatgacctgcgtggttgcggcgttgctgatggagaaatttggcattccgtggcagcttgccgtacccatcgtgttggcggtgggtgcgctgagtgggctggtaaatggtctgataatcgaacgcaccggcgtgccgccattcattgtcacttttgcgatgatgggcgttgcggcatccataccacaaattatcaccggcgccgaatcgatacgcgtgacgcaaattggttacagcctcatcggtcagtcaaaaccgctgggtattccgttccctgtcatagcgctgctgctggccattgttattggtgtcatcttcctgcgccgcaccatcaccgggactcacatctatgcggtaggcggtaacgcagatgctgcacgcttatcggggatcagcattccacgcatcaccctgttggtgtatgcaatttccgggctttgtgcggcatgcggcggcctgatttatggatcgcgtctgatgacaggctatccgacggcgggccgtggtgacgaactgttcttctcaatagcgggtgcggtggtaggtggcgtcagtctgtttggcggcactggcagccttatcggcgcgatgattggcgccatgcttattgcctcaatatcgaatctgatgaacgtgctgaacgtcagtgcctactggcagccgctggtcatcggcctgatcatcctgttcggcgtcactttcgataccttacgtacctcgaaaaaaatcgtgatcccctggctcaaagtcaggaagtcacgcaaaacacaacaataa

SEQ ID NO: 183083 - DNA, 981 bp, Klebsiella oxytoca
atgaaactccgtaccacaatcaccgcaggtgcagcgatagtcgcactgtcctgcatgctcgccggctgtaaccgtgaggatactgaaagcaccgtgggtgccggcaaaaaaacattgggcgttacgctgccgaacctcaccaacccttattacgttgccatgaaaaaaagctttgaagacaatgcagcggcacagggcttgaacgtaaaaatttcgattgctgataatgacgacgccaagcaactttcgcaggtgcagaacttcattgaacagaaggtggatgcggtcgcagtgaactgcgtctcctcaggcccgtgcgtgtcgatcataaaccagcttaatcaggcaaaaattccggcgtttgccatcaacatccttccggataccgaggggatgaagcagcaaaacgtcacgctggttcaaggtgttcagaccgatcagcgtgaaggcggcaagctcattggccagcagctgttgaaagacattggtgaaaatggcactgcaacagtgggtatcgtgggagaaccaacatccattgccgcaaatgcacgtgatgaaggcttcaaggaagccgtggcatccaacaaaaacattaagttcgtcgcgctggtcaatggcaaagtagaagaaacaacctccctgaaagtcaccactgaaatgctgcagggcaggccagaaattaacgtcgtgtactcagacaccgaaccttccgcgctcgggtcactggcggcaatccagcaactgggggtcagtgacaaagtgaagctgtatgcgtttgtggataaagaaggcgtcaaagccgttcagaacaacagcatattgaaagccggtgcgattcaggagccggttaaactggctcagttgctggttgaaaatgccaggaagagtctgaacggtgaacaggttccagccatgatcaacaacccaccgctgctggtcaccaaagacaacgcagcatcggtaatgggttcagcatactga

SEQ ID NO: 183084 - DNA, 1512 bp, Klebsiella oxytoca
atgatgaattatgtggcgaagcaggtcaaaatcggtttttcgggtgtgcaggttctccacggtgtggatttcagcgtaaagcctggcgagatccacggcctctttggccataatggagcgggtaaatcaacgctactgaaaatcctggcgggcgttaacacgcaggatagtggagagctgatgatcggcgaaacgccggtgcaccttgcttcgccacgggatgcactcaacaaaggtattgcttgtgtgtatcaggaactccgtctcattcccggcatgagcgtctggcaaaacctttttctcggacgtgaatgtcgtaaaggcagtggctttatagatgatgcaagtatgatcgcgcataccgagaaagtactaaatgattaccatctgagtttcagcgctaccgcgctgatcaaaaatctgtcacatcctgaaaagcagatgctggaagtggtttctaaccttgatcgcgacgcccgttttcttttcctcgatgaaccgacgaccgcgctggaaggtgcgcaggcagaagaactgctacaggcagtacaacgtatcgcacgcgaaaagcagattggcgtagtactggtctctcataaattagacgaagtgttgggtgtttgtgatgaagcaaccgtaatgtgcggcggccgagtgatttataacgaaggcaaaaagacgctgagcaaaagcgccatcattgacgctattgtgggcgatgcaaatgcttatcaggcgccgtctaacagccgtagtctgatccgcggcgcgatgggcaaaccctggctctcggtcacaaacctgcagactgatcgcctgaaaggcatcaaccttgaggcatatcgcggggaaattttgggtatatacgggctggctggtgcaggccgaacgcgcttgtgccagacgctgtttgggttggaaaccgttaccggtggtgacatccggctgggtcacaaagaataccatccttcttcaccggcaaaagccattgataaggggattgcttacctgacagaagaacgtaaaaaagatggcttcattcctcagatgtcgagctatgccaacgccatgctgccggttctgaaaaaattccgttctggcggatttgtcagtcacagcgctgcgcggcaggccgccgctgagttgctgagcaagatgaatacgctgggaacgctgagcggaccgattaaatcgctttccggaggcaatcagcaaaaagttctgctcgccagggtcattgcgcaaaacgccaatctggtattgctggatgagccgaccaaaggcgtcgacattggggcaaaagcggatatttatcgcatcatccatcagttggcagataaaggctgctgcgtcatcgtggtatcgagtgaggaagaggaattgctggacgtggcagataccattacggtgttccgacagggtaaatgcgatggtgtgatcattcctgcacgcgaccttaaacccgcagatcttcgcaaagccgcatgggagcatgctgaagcccaggcttag

SEQ ID NO: 183085 - DNA, 285 bp, Klebsiella oxytoca
atggcagacttttacatctcgggtatacgcagagacaatgcagggcaacacattcagtacgttaaaatcatcaaagccggtaatggggagaaggacgtatcaattaactcgcgtcagtttgtcgctgagttgataaatgccggtaagacaagctttcaaacaattacctacgtgaatgacaagtgggtttatggggcaatggttcatgttattgatgggatttatctcacgactgatcctaatgataccaaacgcgataacttgggtaatttgctcactttttaa

SEQ ID NO: 183086 - DNA, 561 bp, Klebsiella oxytoca
atgggtgttcaagaaaatactgtcagtattctcagggaactagaacaaaacgcgctcaatatcgacaatgatcaggcacagcattttatcgggaagatccgtaatgcgaagcatattttcctgcaaggtgcagggcgcagcggtattgccatccgcgcgttcgctaaccgtttattgcatttaggcttttcggtcagcgtagtcggggaaatttcatcacctcatacgaaagcgggtgatttgttaattattggttcaggcagtggcgaaacaggcagtctcaagagccttgcgcagaaagccgttgagtgtggtgtcgacgtggcgctggtcaccatgaagaaagactctgcgattggccagttggccaactgcgtgctggtattaccgggaacggtcaaaactgaaaacgatcgcactccgggccagttttcgcagccaatgggttcctctttcgagcaactctgctttatcacctacgatgccatcgtgctggaactcatggaccaactgcgtgaaaccagtgaaaccatgtttaaacgacacgctgattttgagtaa

SEQ ID NO: 183087 - DNA, 753 bp, Klebsiella oxytoca
atgagtcattttgaaggtaaagttgcgctaattaccggtggtgcgcatgggattggtaaaggaattgcaaaacaattcgccgaacgcggtgcgcataccgtcattgtcgattataacgaggctaatggcatcaaaactgcggaagaactgacctttggcaatgttaaatcgctctttgtcaaaacggacgtctctgatccgcaggcactggctgaagtgcgcagaaaagttatcgaaacttatggccgtatcgacattctggttttgaacgcaggtgtcgcttttgccaataaagtcaaagacattactttcgaagagtggaacaaaacactctcaatcaacctgacgggtttattcaatacggtcaaagcattttacgatgacttcttaactaaccagggttcaatcgtttacatctcctccggttctgcgctgtcaggtaccggcgggggggtgagctatccagccagtaaagcggggggggaaggccttattcgtggtctggcaaaggagctgggtccaaaaggtgttaacgtcaacgctatcgcgccgcgtcttatcgacaccggcgaaatgatgcgtgttaattacccgacgcaggcagatttagacgcagtactggagaaaattccggtccgtcgtctgggcacaatcgatgatgtcgcaaacctggccatcttccttgctgataagtcaaattcttacatccagggacagacgatcctcatggatggtggccgtacaattgcctga

SEQ ID NO: 183088 - DNA, 645 bp, Klebsiella oxytoca
atggcacagattttaccatcaatttttggcgcgaatatcttaagtctgcaagatgaactcagttttttagaagaagagaacactgaaatattgcatgttgatttaatggatggaaccttcgtaaataatattgcctttgggccgaatcaaatttctgcaatgaaaaaagccagcaaaatgactttcgacgtacacatgatgctggctaatcctgaaagacatattgatgatgttattaataccggcgcagaaatgatctcagtgcattatgaatcaacgccgcatgtgcattttattttacagaaaataaaaaaggccgggcgaaaagccggtgtggtcatcaatccgggtacgcctgaaagtgttctggaatatttgttggacgatattgattacatcctgattatgaccattaacccggggcaacccgggcagactttcatcgagaaaagcctcgagaaaattaagaaaaccagagaaatgattgctggccggcacattcaaattgaagtcgacggtggcgttaatctggaaatagcgaaaaaagtacaggaggcgggtgctgatttaattgttgtcggtggcgcattatttaatgacaaccctaaagcaagctatcaggcattaaagtctgtcatgcattaa

SEQ ID NO: 183089 - DNA, 1254 bp, Klebsiella oxytoca
atggacatgttaaaaaacataatgctaacgataacaagcatgggggcaacggcaatcctaccacttgtcatcttcattttgggtttggttttccgcatgaaagtcggtgctgccattaagtctggtatcaccgtgggtatcggttttattggtttaggtttggttgttaatctgttgagtacatccctgcagccggcaattgcctactattcaaaactgggaagcggattcactgtggctgatatcggatggcctgcggtgggcgcggctgcatgggtggcaccctttgccgctttagttgttccagtgggtattattcttaatttgctacttgttcgtcttaaattaaccaaaacgctgaacgttgatatctggaattatatgcacttcctggttcccggcgcgctggcctatttcgtgtttgacagcttctttatcggttttggcgtggcagtcgcacttagcgttatcgctctgtttattggcgatttaattgctccccgttggcagaaatattatggcctggaagggacgacctgtaccaccatgatccatataggctggacattaccttttgcactgctggtcaataaaattatcgacctgatccccggcctgaacaagctcgacgttgatttggagagcgtacagaaacgtctgggtgtgtttggtgaacccgctatcatcggtgtcattgtaggttgtctgcttggactgctgacgaaacagcctgtgaccactattgtcccgatggcaatgggggtggctgcggtaatggtgctcctgcctaaagtggtgggtgtcctgatggaaggactgtctccaattgggaaaagtgccaaagagattatgcaaaagcagatgggtaaagacgccgaactgaacatcggtatggactgtgccctggcactgggcgacccagcgaccgtcaccgtcaccgttatcaccattccgttgaccatgctttgcgcactgattttaccggggatcatgattttccccatcggcgttctgatgtcaatcatctatatgacaaccatgaccgtaatggccagcaacggaaacgtcatccgctcaattatttcaaccttactgttcagtattgtcgtgatgtatttaggagggtatgtggctccgggtgcaacccaattcctgcatggcgcaggtgtcggcttgcaggggcagggtactgactttgtactgactggcccgtgggaagtattgacgtattggttgagcactgtattccattga

SEQ ID NO: 183090 - DNA, 294 bp, Klebsiella oxytoca; identical to SEQ ID NO: 126540

SEQ ID NO: 183091 - DNA, 450 bp, Klebsiella oxytoca
gtgagtacagtcactattaatgttgcagatggtgcagcattcaaaaattacgatgaggtgctgcagcacatccatgaaaagctgtattcagaagggatagtgaaaaagacctatctggcagcactgcgcgaacgcgaagccatgtatccaacaggtattttgcttgatggttattctgtggcgatcccacattgcgacagcaaccaggccaacagcccgtcgatttatattattcgcttacctgaaccggttcaggttgatcaggctgatggcgacgataaattgtgggtcaaactcattatcaatttggtcgttaccgatccggctaatcagctgcaactgctgaaggccctttttagtaatcttcaaatggaagacttttatcaaaatttacttgagcttccttccgagaaagcgcaggcactttttatttccaccgtcatgcaataa

SEQ ID NO: 183092 - DNA, 969 bp, Klebsiella oxytoca
atgcctaaacgtataaaaaacagccgctggtcaggttacgatccccgctatatctattctctcgtcgtccgacgttactttgttgagatgaagaccaaaactgagattgctgaagaactcgagatttcgagatttaaagcggcgcgtcttatcgatgaggcaataaaggaagagtatgtgaagtttctctttccaaagcagcaactgcttgacgaagagatcgcacttaatctctgcggaaagtatggtctgcagaaggcaatcgtgctttccgtgtcagaatcctggtccaatcaggaagaactgaatgagaagctggggggtatcactgcaagttatctcaacaataatctcgctgagggaatgaaggttggtattgcctggggacgcgttttatccagcacagtgagtcaactcaccagcttgccggcattagatgttgttcagctatctggcgttcatccgggcattgaatttagccagggcccgatcgaccttatccacagactgtcgactatctctcagggcaaggcacatcctatgtatgtgccgatgtgggtggatgatgaaagcctggcccaaaaactggccagtgatccggctgtggtggatacccaacaatattattctcagctggatgttgtcatcaccggtattggcgcctggaaaacgggctcatccagtttgtgtgatatttttcccgagtcgtggcaaaaaaatctgtttgagaaagatatcgctgcggatgtctgcattactctcgttaacagtaaaggcgagatccttgatagcccgatgagccgtcttgggtttggtatttcaaccgaacaattgcgtaacacgaaaaccgtgattggtgtggcggggggagaacagaagtatgaaggcatcgtcgcttcactgaagtcaggccttttagatgtgttaatcactgacttcgatactgcggtgaagcttgtcaattcctga

SEQ ID NO: 183093 - DNA, 762 bp, Klebsiella oxytoca
atgaacaaatacatcctcgcgttatctgctgcacttatcggctcgcaggttcaggcagcaacgcccgcagcgcttcccgcaccggtcaagcagttggaaaaacaaggtatagaaataatcaaacccttcacggctccaggcggggtccagggctggttgggaaaatatcagggaacgggggtgacaatttatctgacccccgataaaaaacatgccatatcaggttatatgtacgatgagaatggaagtaacctcagcgaacaggtcataaaagaggagatttacatccctgctggccgcgagatgtggaaaacactgtccaaagctgccggtatcacggaaggcagtaataatgcaaattgccagattgtcgtgtttgccgatcccttctgtccttactgtacaaaattcagacaggacgtgcagccctatattaaggacaataaaatcgctttgaaaacgcagttagtgggtgtcatgcagcccgacagtggccgttacgcggctgcgatattgtcttctgaaaaccccgcgaaggtctggcaggatttcgagttgtcgggtggcaaaaacaagcctgcacttttggagaaaacgccgcagccgattttctcgcagatccaatacaaccagaaattgatggaagatgtgggggcaagcggtacgccagcaatttattatcttaaccacgccaacatgcttcaacagatcgtcggtctgccggaccaggaacagatggccaatcttatagcgtgtaaatag

SEQ ID NO: 183094 - DNA, 1353 bp, Klebsiella oxytoca
atgacgaaacactatgactatatcgcgattggtggtggtagcggtggtatcgcctcaatcaaccgtgcggcgatgtatgggcagaaatgcgctttgatagaagcgcgggagttgggcgggacttgcgtcaatgtggggtgtgtaccgaaaaaaataatgtggcacgctgcgcaaatcgcagaggccattcatctttatggcccagactatggcttcgataccacattaaaccgcctcgactggactaacttgctaaaaaaccgcagtgcctatatcgatcgtattcatacttcatacgaaaatgtgttaggtaaaaacaaggtagatgtcatcaaaggttttgcccggtttgtggacggacatacggtggaggtcaacggggaaacgattaccgctgaccatatattgatagccaccggtggtcgccctagccatccctctattccgggggcggaatacggaattgattcagatggtttttttgcgcttgaggcgctaccggagcgcactgcagttgttggtgcaggctacattgctgttgaactggcaggtgttctcaatgcattggggtcaaaaacccatttgttcgtacgtaagcatgcgcctttgcgcagttttgacccgttgctcacagaaacactggttgaagtcatgaacgtcgaaggcccaacgttgcacacccaagcgatccccactgcagtggtcaaaaaccaggacggcagcctgacactgaagctggaagatggtcgtgaacaaacggttgactgtttgatctgggcgattggccgtgagccagccaatgacaagttgaacgttgagatggcgggtgttgaactcgatgaaaaagggtacgtcaaagttgataaatatcagaataccaacgtgccgggtgtttacgcggtgggtgataataccggtgcggttgagttaacaccggcagctgttgctgcgggccgtcgcctttcagaacgcttgtttaacaacaagccggatgagtatctggattacaacaatatccccacagtcgtctttagccacccaacaataggtaccgttggcctgactgaaccccaggcgcgtgaggaatatggtgatgatcaggtgaaagtttatcagtcatcttttaccgccatgtacaccggcgtgacgcgtcatcgccagccatcccgcatgaagctggtatgtgtggggttggaagagaaaatcgtcggtatccacggtatcggtttaggcatggatgaaatactgcaaggctttgctgttgcgctgaaaatgggagcaacgaagagagacttcgacaataccgtggcaattcacccaactgcggcagaagaatttgtcacgatgagataa

SEQ ID NO: 183095 - DNA, 1224 bp, Klebsiella oxytoca
atgaaatacgattttgatgaagcagtggacagagcagggacagacagcttaaccgtcgacggctggcgtgaatatatgtttggtgcccatgaaggccccgcgccggaagtaccggcgaatggttttataaacctctgggtagcagatatggctttttccacacccgagccggtgcttgaagccatacgttcccggttagataaaaaaattcttggctacacccgcgtttatgacagggactactatgagatttttggggcctggtgtgaaaggcattacggataccggtttcaggaagaaagcattgttttctcccccggtattatccctgcgcttaaccgattggtgccgttactcacccacgaagaagatagcatcctcatcctgaccccttcttacgcaccgtttaaaaaagccggggactatagcggtcgtcgcgtcgtcgattgcccgcttagaaataacgaaggccactgggcggtagattttgaggcaatggaacaagccctgagcgatgaccagcagcgaattaaagccttctttctctgtaacccgcataatcccaccgggagagtttggcgacgtgatgagttgcagaaaatgatagcgttatgccttaaacatgatgtgtgggttatttctgatgaaatccactgtgatttatcccgctcgggcgtcacgcatatccccgccgcgtcaatttttcctgaaaatcataaaattatcacctgcatgtcgaccagcaaaacgttcaacctggcgggtaacctgcttgcaaacatcatgatccctgatgcctcagtgagagccgaatggcttcgcctgcatgatgattttatctctccgctgagcctggtggctaacaaggccgcctggtccgagtgcgatgagtggttgactcaggtcaggcactacattgacgagaacttccgttttctgcaggactacctggggacatatcatccgctggcccgttttatcattccggaagggacttatcttgcctggattgatatctctcgtctggtagatgacagtaatcaggaagaagtaaccctcttttttgccagacatgcgggtgtattgcttgaaggggggcaaatgtttgtcagtaacggcgacgggcacatccgccttaatctggcttgtccacgcgctatgcttgctgaggggctcaaccgtataagcaaggaattgagtgcgagttctggcgatgctacctga

SEQ ID NO: 183096 - DNA, 849 bp, Klebsiella oxytoca
atggggcggtctgttggattcaagatagtgatagcaatgatggcattcgcagccaattctgtgctctgtcggattgcgttgaaaggcgaacatattgacccggtgacgttcagtgaccttcgcctgatgagcggggcggtggtcttgttaccactgttgttgagacgtgaggggaaaaagcagggcgtctggagcttgaaaagcgggttctttcttatggcctacgccctgtgtttctcccttgcctatatccatttggatacaggaacaggtgctttgctcttgtttggcgttgtgcaactggcgatggtggctcatggccttttccatggggaaaggctgtctttttacagagcaacggggcttgggctggctgtagccggcatggctgctcttctcttacctggtgccaaagcgccccccttgggcagcgctgttctgatggcgctttcaggccttgcctgggcggcttataccctttgcggaaagcgctctcccagcgcagcgcaggccactgcggcaaatttcatccttgctgtaccttttgccctggtgttgtcgccgttcattagccagggagcgcacttcgacggtatcggaattgtcctggcaatactctctggtgccggtgcttctgccggagcctatgtactctggtattcacttttacctcgtcttgagtctgttgcagccagtacggttcagttgagtgtgccctgtctggcgatgctgggaggcgtaacatttttgggcgagtcactgagcctcagaatggcattttcaacgctggcagtccttgcgggcattctgttggtgatcaaggcaccgggtcagaaaatacgacactga

SEQ ID NO: 183097 - DNA, 495 bp, Klebsiella oxytoca
atgcaagatttcaacgtactgctcgaagcagcatcagattataacgaatttgttggcagcggagcagaagaagaccgcaacgcattgcggcattttgaggggcttgccaacgaggcattacctgacgatgtcattagtaagctctcgcaacttccgggttcgtacagcattctggtagctgctgaaatgtggtgccccgactgccataaaaacttgcctgtaatccatgccattgccgcgtcagcgccagcaatacgtctgggtattatcacccgcgacaaggctgaagccgtctttaaggcacactttggtgtcgataaagtcaaaattccgtttgccgtggtactggatgagaacgcgactccgctggggcagtttattgaacgacctgaaaatgctaccggcaagaatggagaagtgagcgagaggtacaaaaacggtgagcttcttgtcgataccgcccgcgaagtgacttcaatttttccaagaaaataa

SEQ ID NO: 183098 - DNA, 867 bp, Klebsiella oxytoca
atgccggtatcatggccgttcgcagataagctcgtcgtaacctatcagccgccccatgatggggcggctgataggtatcttgcttgtaattcaaccattctgaaagttaacataatgaaaaaattgaaatttaccttcaaaaatgcagaaggtgaggaacttgccgggttgcttgaattgccagaaaatccaaaagcctttgccctgttggcgcactgctttacctgcgggaaggatctgaaaggtgctgcacgcattgccaggaaactgacagaaaattcaattgcggtgcttcgctttgatttcaccgggttaggcaacagcgaaggcgatttttccaataccaatttttcctcgaatatttctgacctgctgtgcgcggtcgattatcttcgtcgggaatacgaggctccttcgctgctgattggtcacagccttggcggttcggcaatcctctctattgcagccaaagtgcctgaagccagagcggtcgtaaccatcggttcgccaggcgaattgacgcatgtacagcggttgttcaaagacaatatcgaagatatcaggaaccatggcgctttcccggtagagcttgcaggccgggtattcacgctcaaaaagcaaatgctggataacattcaggagcataaaatagcggagaaggtatttaccatgaataagccgctgctgatttttcatgctcccaatgatgataccgtgctgattgaacaggcagagaaaatttttaaagccgccagacaccccaaaagctttatctcactgggtgaagcagatcatcttctgacgcatcctcaggatgcggaatatgttgccgggattatcgttgcctggagttctgcttacatttaa

SEQ ID NO: 183099 - DNA, 816 bp, Klebsiella oxytoca
atgactgccggcaaatctaccctgcaaataacggagttcaaaatgagcgattactttaaaggcaaaaaaatgcttgtcgtgggtggcaccagcggcatgggtctggaaacggcgcgtatggtgctgaaagccggtggcagcgtggtactgacgggcaataaaaaagacaaggcagaagcggttcagaaagagctgagcccactgggttccgtgtccgtgattgcggcaaacctgatgaccgaagagggcatgaacgccattcgtcaggagattaatgctaatcatcgcgatattagcctgatggtcaatgcggccgggatcttcatgccgaaaggctttaccgagcatttggaagccgattacgacatgtacctgatgttgaaccgggcaaccttcttcatcacgcaggacgtggtgaagaacatgctggccgacggccgtgaaggggcgattgtgaacgtgggctccattggcgcgcaagccgcactcggcgactcaccggcttccgcgtactccatggccaaagccggtctccacgccttgacacgcaacctggccattgagctggccagtgcgggtatccgcgtgaacgcggtctcgccagggatcgtgcataccccgatttatgaaggcttcatggcgaaagaagacattgccggcgcaatgcaatcgctgaacgctttccatccgctggggcgtgtcggcacgccggaagatgtggccaataccatcttcttcctgttgtccgacaaagcctcttgggtgactggcgccatctgggatgtcgatgccggtatcatggccgttcgcagataa

SEQ ID NO: 183100 - DNA, 702 bp, Klebsiella oxytoca
atgcaaacccttaagccgattattacgatagatatctggtcagatctggtctgcccctggtgttggattgccaaaaagcgtttcgaacagggccttgccgcctttgaacacaaggaacaggtcgtggtccgccaccacagtttccgtatttccggcgaccggcctgccgtgccgttccgcaaagccctttacaagaagtttggcggggaacatggggcggaactgatgatgaatcaggtgggcacggccgggaaggcagaagggctccagtataactttgacaccatgctctttggcgataccgaagatgcccatacgctgctcgcggctgcacgtcacgccaatatgggcgacgccatggcagaacggttttatcgggccagtgtgactgaggggcgttccattttcgatccgcaggagctcattgcgttagctacagaagtgggcatgtccagagccgacgctgaaagtgcccttgccaatgaggccttccgtgcatcggtggctgaagatgaagcccatgccaggtcgatcggggtcagcggtgtcccgctgttcctgctcaatgaaaaatatgccatcagcggcgcgcaatctgcggacaacttcctgaacgcgttgaagcaagtctgggaagaaaaagcggctgaattggcaaaaaccgacggccagacctgcggcgctgacggttgcagcatctga

SEQ ID NO: 183101 - DNA, 1107 bp, Klebsiella oxytoca
atgagtaagttgttcaccccctacaatctgtcaggcatgcagttaaaaaaccgcgtggtcatggccccgatgacccgcacccgcacaatgaacgacgtgccggatgacgtcgttgcactttactacgcccagcgcgcctctgcggggctgcttatcaccgaaggcatgcctgtttctgaagaagggcgcggctatctgtataccccggggatctacaacgctgcacacgttcagggctggcgcaaagtgaccgatgcggtacatgcgaagggcggtcgtatttttgctcagttgtggcatgtggggcggatgtctcatacctctattcagccgggcaacatcgcgccagtttccgccggtaccgtacaagcggttaacaccaccgtctttgcactgaccgattctggcgaaccggggcctgtcgttccaagccagccgcgtgcgctggaaaccgcagaagttcgacgcgttaccgctgactttgtccattcagcgcgtctggcaatggaggccgggtttgacggcgtggaaatcatggcggcgaacggcttcattttcgaccagttcctcagcagtgaactgaaccctcgcacagatgaatacggtggctctgtggaaaaccgtcagcggttcctgctggaaacggttgatgccatctctgcggctattggtagcaataaggtgggcttgcgcatttcaccgttcgggcggatttacgacctggcgccttatgaaggtgaagaagagatttgggccagtatcgctgcggccctcggccaacgtgagctggcttatgtgcacctctattatcaacctgtttatacccaggcaccggtacctgccggtttcaaagccgcgttccgtaaaactctggggggcaccgttattgccgccggcggcttcacccgcgagattgccgaaaccgcacttgaggcagacgaactggatcttgttgcgtttggcgtgccgtacatcgccaaccctgatttggtcgaaagaatgcagaacggctggccgctggctgaaagcgatcgcacgacgtattacggcgtgacggggtcgccggaaaaaggctacaccgattatcccgcctgggaagccaactaa

SEQ ID NO: 183102 - DNA, 564 bp, Klebsiella oxytoca
atgtccaaacttcaccttactgttatcagtacattatgcttggcgttgtcgagccaggtcgctttttcagccagttttacgctgacaagtcatgagcttgaaaaaaaccgtttccccgcagctcagaccctgagttcaccttatggatttgggtgcagcggtggaaaccttgccccctcttttaactggagtggcgcgccggcaggaactcaaagcttcgctctcaaaatttatgatagggatgcgccgacaggcctcggttggatccactggcaggtggtgaatattccctcatctcttcactcgttaccggctgggataacggcggataacaaaaatctcccgcaaggggctcttcagacccggactgatttcggtatcccgggttatggcggcccttgcccgccgaagggtgaaacgcaccgttatgagatcacgctgacggcacttcgtgtcgacaaacttccgggaataacggcggactcgacgcccgccctggtcggctttatggcaaaagcgaactcactgggcgaagcgcatcttcagattacgcagggccgctaa

SEQ ID NO: 183103 - DNA, 843 bp, Klebsiella oxytoca
atggaaagaacattatccagtcgtattaatgtggggagtacagcgcatgtactgcatacgcagcccctgatgatgcgccatatcactatagatgaacccacaatcatcctggtccgccatggcaggaaaataatccgctgggcgcaagaggagataacgctggaagcgggggacgcggtggtcatcggggaggggcactcttttgatatcatcaatacaccatcacctttaacgggtacgtacgaagcatcatggctgagtttttgtgccgatttcgtccaaaactactgcttcatgcatgccccacgtatgagcatgcacgaagcaaataaaatggcggagccaggcaacagttttcgccgggccttttatcacaccgcggaggccattacagatactgaaaacatacctgaaagtatcgtggccaggcgtatggaagagatgctgagttggctggatgaataccgcattttcttcgcgctgaaacaacataccggactggcgataaaaatccgcaaactcgttgcagcagacatatcacaagactggaatactgcgcaggtagcggctgaattgggtatgtcggccaccaccctgagacgccatctgcatgccgaaaatacgtcatttacccatctggtgactgacattcgcatgtgccgcgccctgacacttttgcaggtgaccgatctttcagtcacccgcatatccctggaagtcggctatgaaaatccgtctaagttcgccgccagatttcgaactcgcttcggattcagccccagcctggtccgggtttccggccaggctatcggcaacctggctgcggttagcggccctgcgtaa

SEQ ID NO: 183104 - DNA, 330 bp, Klebsiella oxytoca
atgcgtgaattaaccctttacaatgaagataattttagagaaatcgagaggcatgaaggagttgctgtggtgcgcttctctgccccctggtgcccaccttgccagatgagtgaagacatttttaaccattttgccgagcagattgaaagcgacgtcaaagtcggcaaagtgaatgtggatctggcaccggtgctgaccaccaaatatgaaatttggggcctgccgtccgtactgatgttcaaggatgggcagttggtccagcgtataccgggtgttaaatcggcagggttttatcagcaagcattgtcagagctgaaaaaagggcagtaa

SEQ ID NO: 183105 - DNA, 1320 bp, Klebsiella oxytoca
atgaagggtcttaagttagtggttattggagcgggttcaagctacacacctgaactgatggaaggcattatcaagcgtcaaaatgaatttccgatccgcgagttatggctggttgatattgaggatggccgtgaaaaaatggcgatcattgctggcctcacccgacggatgctggaaaaaaatgggctggatataccggtttatgaaacccttgaccgcacagaagcactgctcggtgccgattttgtttgttctcagttcagggccggctgcctggaagcacggatcagcgacgaaaggatatcgctgaaatacgacatgatcggtcaggaaaccaatgggctgggtgggtttgccaatgcatgccgcactatcccgattgcattggctatagcgaaagaaatggaacaactgtgcccggatgcctggttgctgaactttaccaacccgtcgggaatggtcactgaagcgatactgaaatacagcaaagtcaaaaccgtagggctgtgcaatgtgcctgttatcatgcaaaaaggtattgccagtgctttaggtgtcagtgacatcaatgaatttatcatgcaggtcgcgggacttaatcacttcatttttgcgcgccatatttttcatgaaggtaaggataagctgcctcaggttattgagctgatttcagaggggaatgatcctttggtgcctaaaaatattcctcctttcaaatggccggatcggttgttggcgaatatgggaatgataccttgcccctacctgcgttattactacatgagcgacgacatgtaccgtcaggagcttggcgaagcacaaggggaagggactcgtggtgagatcgtaaaggagctcgaaagagaactattcgaaatttatcgaaacccggaactcgccgagaaaccgaaagcgctggaaggtcggggagggcagtactattcggatgcggcatgtgaattgatgagcgcaatatataacgacaaacgcatcatcatgcatgtcaatacgcgaaacgatggtgcgattgcgggcctgccggatgactgtgcggttgaggtcagttcaatgatcacccgttcaggacctataccactgaatgtcgaacctttcccggaagatgtacttcgtctgattcaactgatgaaaagctttgagcaattgaccattgaggcagccatcagtggtaatcggtatacggcatggcgtgccttggttattaatcccctggtcaaaagcggtcaactgcttgaaaatgcattggatgaagtgatcgaacataacaaagcgttgatgccggccttccaacgcaataaataa

SEQ ID NO: 183106 - DNA, 903 bp, Klebsiella oxytoca
atgctcgctcaacagaacatactggcactattgcatacgtttgaaacggcagcactgcatatgagctttactaaggcggcgactaccctcaatctgacgcaaggggccgttagccaacgcattcgttctcttgaatccatgctcggattcagactatttatcagaatgaccagaaagcttcagttgaccgatgaaggggagcgtttacttggcgtactcgcgttttcacttaaacgcatcagtgatgaaatagaagatattcgcgtgcaggggctgagaggaaccttgtctgtcggccttccacctaccttcgcttttctctggctgatgccgcgcttaccggtatttaccgaacggtggccggggctgaatatcaatttcagagtgagagccggtctggtagattttaatcttgaacgggtagatgtcgctatctactacagtaatctgaaataccccgatctctactgcgaacggttatctgaagagacgctggttcccgtctgtattccatctcttgcaaaaaaaatcaggcaagcaaaccattggttagctgaagtcccattcattcatacgtctgaatccgttgactcccagaatgttttttccgaatggcgagaatggtgcagggagtctggcaaaaacctgcctgttgaagataattttttgagcttcaacaattgtcagatgtctattgaagcggcactcaatggcggcggtatcatcatgggcagaaaacgactcattcgacattacctcgatgagggccgactgattgccccttttgaaatagaaatacccgccgggcgaggatatgacctcattatgccacgagaaaaccttaaccgaccgggcgttcaggctttggccgaatgggtaagaaatgtgtttaacgaggaataa

SEQ ID NO: 183107 - DNA, 342 bp, Klebsiella oxytoca; identical to SEQ ID NO: 126524

SEQ ID NO: 183108 - DNA, 570 bp, Klebsiella oxytoca
atgtcagtcatgacacgagaaaggcttctgaatgaagcggaccatctgatgcgcgaacggggttactctgcattcagctatgctgatttgtcaaagagcattggtatcaccaaggccagtattcatcaccacttcccaacaaaagacgttttgggcgaacaagtggtgattcaggcccataccgataccaaaaaccgatttgaacagattgaagcgacggagaatacggttgcgcagatgcttaccgcctatgtagagcttttcatcgaaagctatcgcacgtcgcgtatgccgctgtgctgtgctttgtcttcggaaatggccaatctgccaccgaatatcagagtacaggcgaccgaatatttcgatatgcagattgcctggttgaccaagattgtcagccgtggtgttgatgcaggggagctgactgctgacctgctgccatcaaaaatggctctgcttattttgaatttatgcgagggcgctagcgttgtttcccgggcgattaataagcctgagcttttcaacgatacgcttgaacagatcctaatgattgttaaaagaaaataa

SEQ ID NO: 183109 - DNA, 558 bp, Klebsiella oxytoca
atgactaattcaaaaaaaccttttgctgacgctaatgttattcgcggtacacgagaagctattcgccagcagccagagctgggcaatctcacctttaacatgaagagtaaatccaacggtggggtatccgtccgtgtggaaactcatgcgactatccagaacggccaggttgataccagtcgctccggaaaatttgctaatgttggcgatgaacctgctgatttatcgggtactgatagcggtatgggcccagctgagtacattttgcaggcacttgccggctgttataccgcgactctgactgtgatggcggcagaaaagggcattgagcttgatggtattgaacttgacctgaacttcgacattaatctgaacggtttcctgggtcttgacgaaaaagttcgcaacggggcgaaagcgatccgtgttggcgttaagctctccagtccgaccgccagccgtgaacagcttgaagaaatggttcgtgcactgccagaaagctcgccgatccacgatacgttggcgaacccggtcagtattgatactcggttggtgtag

SEQ ID NO: 183110 - DNA, 720 bp, Klebsiella oxytoca
atggaaatccacaaccggactccaaatgtatatgacttgcttgaaataaacaaaattctactttcaacttcaaataatggtgagtcatttgagaaagacttacatctcaatggattcatagaaaaaccatggggatatgagtatagagtttattgtgattctatttttgatgtatggcgccttcatatatcaaagaatcaatccacgtcaatgcattgtcatatactcaaagacaccgtccttatatgcctacatggtgatggcgagaccagatttcttgatggtacacatcaggcgttaaaatctggggacagcatatatattgcaaaaggtgtattccatcagactatttcgggaaaatcaggcatcgaattaatcgaagttgaaaatccaagaaacaaattcgacttactcagacttaaagataattatggccggcaaaatatggcatatgaaaagaaatcacaggaacatgatcttttacctcctttgcaacagatagctgcaggcacattgatcagagaacatgacctacacaaattagcatacttttccgtcaaaaatcttgatagaaaaatgttgaatgacgaggatgattttatttttatttcattagatgtaaaaagccatctaatgggaaagatccatatcctacgagctaaagatgccatctcagaaatgtactgtggtcagaatgtatttttaattaacgtcccgtaa

SEQ ID NO: 183111 - DNA, 576 bp, Klebsiella oxytoca
atgtctaatccgacacgagtagtgataatcactggtccaggttttcaggatcacgatgtagtttatacttactatcgttctaaagaggaaggatacgatatatctattgcaacaaaggatggaagtgcagtgacagggaaatatggcatcactgttcctatggataaaagatccaaagacaatattaattttgatcaactcaacgccactgattttgatgctgttattctcactggcggtcatgaagcgcctgatagagttcgccaagatcagagagttaaagattttctaatgcagatggtaatacaggggaaagttgtggctgggctctgccatggtccctggattatgatttctgccggtattctaagagacaaactcacctgcgcttatgttggtctgaaagacgatatggttaattccggcgccaatgtaattgaagcagatgtagttgtcgacgggaatatcataacttgctcctattatgctgaatgtggaaaatttatgcgtcagacattcgatgcaatagatagatggaagcgcggcgaaactcttaaagaaccgctggtggtataa

SEQ ID NO: 183112 - DNA, 678 bp, Klebsiella oxytoca
atgctaattacatggaatgtattacatgacagacctctcagtgattttaaccaagatgtacttcaaaacatcccacgcctgatggctaaacgattcaggaaattaaggaattttgtacgccatgacggtcactttattgcctcattcactgaatttggtaatgaagctatagataatgacagattcactgctatatatgaatcaattccaactgaagataagaaaatattcagggataagttcatccattataggaagctggcaagaagtctctaccctgatttttgggctgaactacaccgtccgctattggatgtttcaaatttatttgaaacagctaatgatatctatattgtatcaggaaaggatgaagagtctatattatacattctaagtaaatatggtttaaacatacccgcgaataaaatatatgggaggatgactgaaaaaaacaagactcttaccttgctaaaatcaatagccttcgataaaaacgaggatattctatttattgatgacaatatccaaaatgttattgatgcattagatcatggcattcaatcattttgggctaattggggatacaacatccctgagcataaattaatggcacttcaaaaaggaattaatgaattagataccgaggatctcttgaaattagtcaagaaaccctcttaa

SEQ ID NO: 183113 - DNA, 882 bp, Klebsiella oxytoca
atggcgaaagaaatactatgtggttttggagtgggtgtagatgccgttgcaggctggctatcttcttatgggggagaagattctccaagcgatatatctcgcggtatgttcgctggcgaagtaggtactccacgtcttctgaatctatttgaccagtttaatatccccaccacctggtttatgcctggtcattccatcgaaacctttcctcggcaaatggaagcagttgtcaatgctggacatgaggtaggggttcataattacagtcatgaaaacccaatatctatgtcgcctgaccaagaaagagaagtccttctaaaaggcattgacatggtcacgaaattaacagggaagagacctactgggtatgtcgctccatggtgggaattttctcctgtaaccacagatcttctattagaaaatggcatcaaatatgaccattcactaatgcatcatgatcatcagccttattatgtcaggaaaggtgattcctggaccaagatagattattccaagacaccgaccgaatggatgaaaccgctggtacgcggagaagagacggaccttattgaattacccgccagttggacaatcgacgatattcctcctttcatgttcatgaaaacaaaacccaacagccaaggtttcatgaatcccagggacatcgaacagttgtggagagatcaattcgattgggtctaccgtgagcatgaatatgcgatctttacttttacgattcacccggacgtatctggacgcccgcacgtgttaatgatgctcgaacgcctcttaactcatatgcttggtcatccaggggtgaaattcctaaaattgaatgacattgcagatgactttgccaagcgatctccacggataaaataa

SEQ ID NO: 183114 - DNA, 903 bp, Klebsiella oxytoca
atgagctatctggttcagttacgaagttttgttgaagtatacaaagctggttcgatttcaaaagcggcaatgcggttgggcataagccagcctgcaatgtctgcccacattcattcacttgaggcttttaccgggtgtgttctctttactcgtcgttcacatggtgtggtggctacagtggatggggaggaattggcgagattggtggcttcagatttagaaacgattgaactgaagttgtcgatgcttagatcacgtacaagaaagtcctcggggacagtatctttcatcgggccagcagaattaatgtggtcaaaattaccgtacttggtgaaaatattattcaatgaaggtattaaatttaaagttttgacaggaaataggaagcgcatatacagctgtcttctggacggaagttgtcaactaggtttcacaacttctatgccggataaacaaaaatttggatatgctgaaattggaatggaaaagttaatagttgtggtagcgtcactcatagcagacaacttcaaagaaaatgaggacgtgattgatacgctgtcgaagcttcctctaatagcttacgatgaacagttacccttgataagggaagttttccaggattcttcgcgattttttgcactgcttcgtccgtctattactgtaccggatttgcggattttagaaagaatgatccgagaaaatattggttggactgtgatgcctgagtatttatgcgcccaaagcatagcaggaggtcagatcgttgaagtgaatgtccatgagagactccctataaattcaatctatttggtatggattgatagctcattacgtaacccactcgtttcaggaataagagacagaattctcgaactatcaaaaaatagcggatttatggtttga

SEQ ID NO: 183115 - DNA, 975 bp, Klebsiella oxytoca
gtggaacaatctatttatcctttaaatagacctaaacggacaaacacttaccccaaaatgaacaaaataaacttgagaaatgacgaccttgaagtgtttttacacgtcgtcgacagaaacaatttctctgccgcagcacgagacctacagatactccccaagatggtgagcaagcagatagccaggctggaaactgcacttggcactacactttttgaaagaaacacccgtaatctacgtattacagacgagggcagagctatagctgagagggctcgcgtagcgttggccgttctggatgagatgaaggaactttcccgaggggatagtgaggagttaagcggaaatattcgtttgactgcgcccgcaccgtttggccgaaaatatgttgctcctgcgatcgctgcattctgccaagtacatccgagggtgggctttgatttaaggttatctgaccaaatccaggatctttacagtggtgatttcgatctggctattcgtatgggggatctggctgattctcgccttctggccagaaaaatagcaaataatagacgtattctcatcgcatcgtccgaatatctgaagaatcatccacccattgagcgaccagaagatcttttaaatcacaactgcttagtattcgcttacccgggttttttacacaattcatggacgttacgtaaagccggtcatgaaagaagcatcagcgttactggcaaccttatcagtgacaacggagacgtattgcatgcctggagtttggcggggcttggcatatctcttcgagaaacttgggatattcatgatgaattgagagctgggaaactttgccgagttctgcctgattgggaagcaaacacatctcagatcagtgttgtccgggcgcggcgagaaccaataccccgtaggctaagtgtatttattgatttcatgactgaaaaatggaaacgggcaccatgggatgatgattaa

SEQ ID NO: 183116 - DNA, 192 bp, Klebsiella oxytoca
atgcccaaacgtatcctgtttgtattgaccagccatgaccgtaaaggtcaagccgagagtaaagatgccgcacccagtggtttctatctttctgaggtgtctcacccctacgatgtactcacaaaagaaggatatgaaattgatttcgtgagtcccaagggaggcaagacacatgttgacggtttagactga

SEQ ID NO: 183117 - DNA, 1329 bp, Klebsiella oxytoca
atgcacattggacaggctcttgatctggtatcccgttacgattctctgcgtaaccctctggcttctctgggcgattatcttgacccggaactgatttcccgctgccttgaagagtccggcactgtcacgttacgcaaacggcgccttcctctggaaatgatggtctggtgcattgtcggtatggcacttgagcgcaaggagccgcttcatcagatcgttaaccggctggatatcatgttacccggcaatcgtccgttcgttgcgcccagcgccgtgatccaggcccgccagcggctgggaagcgaggccgtacgccgcgtgttcacgcaaacagcgcagctctggcataacgccacgccgcatccgcactggtgcggtctgaccctgctggccattgatggtgttttctggcgaacaccggacacgccagaaaatgataaagctttcccccgccagacgcatggcggaaacccggcactttatcctcaggtaaaaatggtctgtcagatggagctgaccagccatctgctgacggcagcggccttcggcacgatgaaaaacagcgaaaatgagctcgcggagcaactgatagagcagaccggcgataacaccctgacgttaatggataaaggttattactccctggggctgctgcatgcatggagccaggcgggagagcaccgtcactggatgatcccgctcagaaagggtgcgcagtacgaagaggtcagaaagctgggtaagggcgaccatctggtgaagctgaaaaccagtccacaggcacgaaaaaaatggccgggtctgggagatgagatgacagcccggctgttgaatgtgacgcgcaaaggtaaagtctgccacctgctgacgtcaatgacggatgccatgcgttaccccggaggggaaatggcagacctgtacagccatcgctgggaaattgaactgggataccgggagataaaacagacgatgcaactgagcaggctgacgctaagaagtaaaaagccggaacttgtggagcaggaactgtggggtgtcttactggcttataatctggtgagatatcagatgattaaaatggccgggcatctgaaaggatactggccgaatcagctgagcttctcagaatcatgtggcatggtcatgagaatgttgatgactcttcagggcgcttcaccagggcgtatcccggagctgatgcgcgatcttgaaagcatggggcaactggtaaaattaccgacaagaagggaaagggccttcccgcgagtggtaaaggagaggccctggagataccccacagcccctaaaaagggccagtcagttgcttaa

SEQ ID NO: 183118 - DNA, 1260 bp, Klebsiella oxytoca
atgaatcttaagctgcagctcaaagtactgtcgttcctgcagttctgcctctggggaagctggctgaccacgctcggctcgtatatgttcgtcaccctcaagttcgacggtgcggccatcggagcggtctatagctcactcggtatcgccgcggtgtttatgccgacgctgctcggtatcgttgccgataaatggatcagcgccaagtgggtttatgccatttgccatctggtcggcgcgctgacgctgtggctcgccgcccaggtcaccacgccgggcgaaatgttcctcgtcatcctgctcaactcgctggcctatatgccaacgctggggctgattaacaccatttcgtactaccgcctgcagtctgcggatatggatatcgtgaccgatttcccgccgattcgtatctggggcaccattggttttatcctcgccatgtggggcgtcagcttctccggctttgaactgagccatatgcagctctatatcggcgcggcgctctccttgctgctggtgctcttcaccctgacgctgccgcatattccggtggccaatcagcagaaaaaccagagctggaccgccatgctgggccttgatgccttcgcgctgtttaaaaacaaacgtatggcgatcttctttattttctcgatgatgctgggcgccgaactgcaaatcaccaatatgttcggcaacaccttcctgcacagctttgataaagatccgctgttcgccagcagctttatcgtgcagcacgcctcggtgatgatgtcgatttcgcagatctcggaaaccctgttcatcctgaccatcccgttcttcctcagccgctacggcatcaaaaacgtgatgctgattagtatcgtggcgtggatgctgcgcttcggcctgttcgcttacggcgacccgaccccgttcggcaccgtgctactggtgctgtcgatgatcgtttatggctgcgccttcgacttcttcaacatctcgggttcggtgtttgtggaaaaagaggttcgcccggaaatccgtgccagcgcgcaggggatgttcctgatgatgaccaacggcttcggctgcatacttggcgggatggtaagcggcaaagtggtggagcacttcaccctcgaagggattaccgactggcaaaccgtgtggctgatttcgccggctattcgctggttctggcttttgcctttgtggcgctgtttaagtacaagcacgtccgcgtaccaaccggggcgcagaccgtcgcacattaaataa

SEQ ID NO: 183119 - DNA, 984 bp, Klebsiella oxytoca
atggccacactaaaagatatcgcgaccgaagcaggcgtttcactggcgacggtttcccgcgttttaaacgacgaccccactctcaacgtgaaagaagagacaaaacatcgcattcttgaggtggcggaaaagctggaatataaaagtaccagctcgcgtaaggctcaggttcacaccgtcggccaccaccatattctggccatctacagctaccagcaggatctggaaatcaacgatccttactatctggcgatccgccacggcatcgaaacgcaatgcgaaaagctcggtatcgagttgaccaactgctactttaacaacgcgctacccgagctgaaaaaagtgaccggcgttctgattgtcggccagccttcgcgggcgattcgcgacgccgccacggcgttaaccgacaacgtctgctttattgatttccatgaacccggcagcagctatgacgccgtcgacatcgatctggtgcgcatcgccaaagaagttatcgacttttttatcgcccagggcgcgcggcacatcggctttattggtggccaggatgagccgggtaaagccgacatccgcgaagtggccttcgtcgaatatggccgcctgaagggagtggtttcggaagaagatatctggcgcggcgggttttccagctcctccggctatgagctggcaaaaacgatgctggcaaaggcggatttccccaccgcgctgttcgtcgcgtcagactctatcgccatcggcgtgctgcgcgccattcatgaacgcggtctttcgatcccggaagatatttcgctcattagcgttaacgatatccccaccgcgcgttttacctttccgccgctctccacggtgcgcattcattcagaaatgatgggcagccagggcgtcaacctgctggttgagaaagcccgcgatggccgtgcgctgccgctaaacgtctttgtccccagcgtgctgaagctgcgcggcaccacccgctaa

SEQ ID NO: 183120 - DNA, 2499 bp, Klebsiella oxytoca
atgagcgagataaaatccctgctgttcagccacagccaccatctgttaacggtgcgcggctgcagcgcccttctggacgcgctgagctttgaaggtgaggaggccctgagcgaaccgttcagatacgtgattgagttcaccagcgccgacaaaaccatcacgccgcagcagatgctgatgcaggacgcgaccttcaccctgcaggcgccggcggaccagggtttcgggattaacattcagcagccggtgcgcacgattcagggcgtggtgacggcgtttgagcgcctttccgcatcccgcgacgaaacgcactattccctgaccctgcagccccgtctggcgctgctctcccggagccaccagaaccggatttaccaggatatgtcggtgccggatatcgtggagcatatcctgcgtacccgccacgccatgcgcggggaggactttgttttcaccctggcacaggcgtatccgcgtcgcgagcaggtgatgcagtacggcgaggacgacctgcgctttatcacccgcctgctgggcgaggtcggtatctggttccgcttcaccgccgacacccggctgaacattgacgtggtggagttttacgatgaccagcggcactacgagcaggggctggttctgccgtcggtgccgccctccggccagcacgacagcggtaccgagtcggtgtgggcgctgaaaagccagcataacgtggtgcagcagtcggtgttcacccgggactacaactaccgcaacgcgccggaggagatgagccagagcgcggacgtgacgtccggcgacgtcaccacctacggtgaggcgtatcactgggcggataactaccaggcgccgggcagtgacggccagcgcaacccggagccggagagcggggcgttttatgcccgtctgcgccacgagcgctacctgaacgaccagacccggctgagcggcagaaccagcagcgcggcgctggcgccgggccgggagctgaaggtcaccggaggcgctgaggtgacggaggttttccgccagggcgtggtgattaccggcatccacagccgcgcccgtcgcgaccgcagctatgaggtggcgtttacggccatcccgttctcggaaaattacggcttccgtccgcaaccgggcgacaggccggtcatggccggcacgctgccggcgcgggtgaccagcacgaaaaccaacgatatctacggccatatcgaccgcgacggccgttataaggtcaacctgctgttcgaccgcgaccactggtcgccgggggaagagagtctgtgggtacgtcaggcgcgcccctatgccggggacacatacggcctgcacctgccgctgctggcggggacggaagtggccatcgcttttgagcagggagacccggaccgtccgtatattgccggtgtcctgcacgactcaacgcacccggaccctgtcaccatccggaactataagcgcaacgtcctgcggaccccggcgaacaacaaaatccgcctcgacgacgcgcgtggcaaagagcacatcaaggtcagcacggagtacggcggcaagagtcagctgaacctggggcatctggtggacagcgaaaaacagcctcgcggggaggggtttgagctgcggacggacagctacggagcgatacgggccggaaaggggatcatgctcaccaccgaatcgcagccgcgtgtgcagggcaaacaactggatatgactgcggcgatcgtggaactggaaaaggcgttgtcgctggcgaaaacattacagcaatgtgccgccactgccggagtcagtaaggtggacacagggcaacagcaacgactcagccagacactgaaacaactaaaaggggcggggcttctgacgtatgccggtgaggggcaggcacatatcacacctgcaagcctgcaactttccacaggcgaggatttagttgcaacggcgggtaacgatgccagcatcaacgtggtaaaaaaattctcactggctgttggtgaaaagctggccctgtttgcccgaaaacttggcatccagatgattgccggtgcgggagatattacaactcaggcacagcgcggtgccatgcatatgctttcacagcaggatttcacattgaccagcaccgacagcaagctgaatatcagcgcaaaacagggaatacaactggcctgcggaggtggaggcatccgcattaacgcggatggatcggttgaaatattctcacccacaggcgttgatattaaagcgccaaactttgcctataaaggccctgaaagtgtgcagatacagatgccaaattttgataaaggggcgtttaaacaccgttatcggcttcatgcttccgatgatccagaacaaattctgaccagacaaaaattccgcgtcaaaagctctgcgggcgacatcgtcgaaggtgagacagacggcgaaggatgttcgcccctgcttgatgcgaccgatcttgatacctggacactggagttatgctcatga

SEQ ID NO: 183121 - DNA, 3423 bp, Klebsiella oxytoca
gtgaaacgtattttacagggaataaaaaacgcaacatttcagttgtggtttatcttgtttgttcttttatgcttgggaattgcagcatgccttatcctcaggagtgaaccgactatactggggatttctccagactctatctggtttgagcggctatttatattagctctggtactaacgggtggattactgctctttattatcattttttttattacgacatatttgtttggtaaaaacgcttaccgccaggctaaattcctctcatctggaaataaaaccgattttatacagcatcgaagtgaggcagaatcctcgaccgttgccagcattcggcatttgaaagcccacctccgccgtcgctacaaccttttctggcgcagtcaggtccgcctgctgctggtctgtggcgaacccgcgcacatcgccgccatcgcccccggtctggcggaaaaacagtggctcgaaggccgccgcacggtgctgatttacggcggcagcctgtcatcggcgccggacaccgggcgcctgaccgccctgcgtaagctgcgccgcagccgtccgctggacggcatcgtgctggcgctggatgagagacagaccaccgccggtacgctggacaaccatcttcgcaccctggagcaggtcggggaggcgctgcgctggcagccgccggtgtacctgtggcaggtgactgacagcgactggtcgcaggatgcgcgcgtcacccagacggtaggggcgcttttcccggcccgcgccacgccggcgggggtggagcgccagctccgcgctatcctgccatccctgcgcgaaaggggaatgcagcagctgtgcgccgggccgtcgcacgatttcctgttacgtttcggccggcagctggagaaacagggaatatcccactggaaaacgctgctgacgccgtggctgacggagcacctgaagcgtgttccgctgcgcggcctgatgttcggcccgtcgctggcccctgaggatagtgccgcgggccatgaacaccgctggtccgctccggcggtctggcagggcgtgacggcggactgcgctcaggcgcggggcgtgcgggcagggataccgtggcagcgaacgccgggcgtcaccctgctgacgctgattgccctgtggggggcgggcagcgtggtctcctttgccgttaaccgccaccatatcgtcagcgcggcggcgcgggcgcagcagctggtgaatcatcccgcggttaacgacccgcagctgatggcgctgcaggctctgcgtaacgatatcgggcgcctgcagacgcaacaggcgaatggcgctccctggtaccagcgcttcgggctggaccacaatgcgccgctttcagccgccctgatgccctggtacggccaggccagtaaccgtctgatacgcgatgcggccatgcaggcgctgacgcagaaactgaccgtcctggcgaacctgccgccgcgcagcccgcagcgcgccacgttagctaaggcgggctacgaccagctgaaagcatacctgatgatggcgcgcccggacaaagccgacgctgccctgtacgcgcaggtgatgacaaccaccgcgccatcccggccgggactctccccggcgctgtggcagagtatcgccccggaccttcacgccttttacatgcagagcctgccgtcgcagcctgcctggaaaatcacgccggacaggcagctggtcacccgggtacgtcaggtgctgctggagcagattggccggcgcaacgcggaaagtacgctgtatgagaacatgctcacccgggtgcgccgcagctacgcggacatgacgctggaggacatgacgccgcagaccgacgccggtcgcctgttcagcacgccggagtcggtgccggggatgttcacccgccaggcgtgggagggcggggttcaggaagccattgataacgccgtggcgtcgcggcgcgatgaaatcgactgggtgctgagcgatagccgtaaaacgctgtccggcgacgtctccccggaggcgctgaagcagcgcctgacggcgcgctacttcaccgattttgccggtgcctggctgaacttcctcaacagtatccggctgaacccggcgcacaatattgccgacgtcaccgaccagttaacgctggccggggacgtgcgccagtcgccgctgattgccctgatgaacaccctggcttaccaggggcagaccgggcagcagaaagaggccatttccgcatcgctggtgaaatcggcgaaaaacctgctgggcggtgatgaccggccggtgattgaccagcaggccgccggaccggcggggccgctggacagcaccttcgggccgctgctgcagcttatgggtaaaaacagcgcgcagagcgtgatggcggcggacagttcgctcagtttacagacttacctgacgcgcctgacccgcgtgcgcctcaggctccagcaggtggcaaacgccgccgacccgcaggcgatgatgcagcagctggcgcagacggtcttccagggcaagagcgttgacctgaccgacacgcaggagtacggcagcctggtggcggcaagcctcggtgaagagtggagcggtttcgggcagacgatgtttgttcagccgctgacccaggcctgggagacggtgcttcagccgtcggcggccagcctgaacgaagcgtggcagcgctcagttgtcgcgaactggaattcagcgtttaaagggcgttatccctttgctgccgcgaagagcgacgcctcgctgccgatgctggcggcgttcatccgccgcgataccggacgtattgaccgtttcctcagcacgcagctgggcggcgttctgcaccgggagggcagcacctgggtggcggacagaacccgcagtcaggggctgacgttcagcccggccttcctgaacgcggtgaaccagctcagccagctgtccgacatcctgtttaccgacggcagccagggtatcagctttgaactgcagggggtggcaatgccggaagtggtggaaacacagctgacgcttgacgggcagaaactccactattttaaccaggttgccgactggcagagcttccgctggccgggggtaatcaataaaccgggggcgatgctgacctggacgtcgacggcggcgggaacccgtctgtatacaaaccacagtggtccgtggggcgttatccggatgctggagcagatgcagcggcagaaagcgggggacgggctgtaccggctgagcgtcaccgcgccggacaggcgacagcttcagtggctgctgcgtacggaactgggcgacggaccgctggcgctgctgaagctgcgaaacttcagtctgccgtcgcagatattcagcgtcggtgtcccggcgccaggccgcacggatgaatatgagtctgacgttgtggaagggagtgaataa

SEQ ID NO: 183122 - DNA, 534 bp, Klebsiella oxytoca
atgaaacattattcctatctgatttttctatttttcctcaatggatgtttctataagcgcgtacctgtccctgatactatttcattagtgaattatcccacgcagttaaaggatgctaatgaccaaaataaaaaagagtatgccgccgcatgggaggattttattttagctagtaaccgatgccggttgattcataataattatgaaataggatataaaaatgctgagcaggctaagttaattctcggtggacttggtggcgtagctggtctgactggagcggttcttgcgacttcaggaagtgcagttgttgttggagccattgccgctggagtttcagggttagcaagtatgacattaggaaatgcagaaaaaggcccattgggtacaagctattatttatctcaaaaggaaggtattgcgaggcaaatacagcaagcgtcagtagaagcgctgaattcagaagatcctaagaaaatttatggcatagcatcaaggttggctgcatcttgtttatcatctgaaataaaataa

SEQ ID NO: 183123 - DNA, 846 bp, Klebsiella oxytoca
atgagtgtattaacggcacgacatgtgacagtttatgtttttatcttgttatctttaagtagtatatcatttttattaagcgcgaatagtgaattaacttcgaaaaaaaatcctatgacgtttgaacctataaacgataaggatagccgttatctgtttgatttgccgccgcctacaaattcacagattgaaggtactatacgtgttgcggccacgcgttactacgaccaaatcgtaccacctagcattgcagaagatagtattccatatcgtgatatgaaaggtaaccctgtaagtgatcgcgtgagtccttattactggtgtctcggtgcaattgaaggatctatttctacaacttttaatggtaaacctgtgattcttaattaccatgatttcaaacgtgagagtaagtatcatgttcggtgcacagattacattgtaaatggaagtagagatatagatggggatacgaggtataaaattacgaatgctaagtacggaaaaggtgtgaacgactggttcttagttccttacaggacaattgccactgacccattatatattaagcatggggaggttatttacatagagaaagccaggggccagaatattactttgccctctggtaaggtggtaaagcacgatggatatttcttcgctggtgatcgaggagctagagacgtagtaaaagggaagctgatagatgtattctgtgggtttgattctaaatgtttgagcaaacaagtaacgattagtacgaaagacgatttgcgtttaattgatgcgaaggtgattaatgatcaaagcataaagaatagatttaaacaataccatttaaaagagtga

SEQ ID NO: 183124 - DNA, 123 bp, Klebsiella oxytoca
atgggctggatggcagataacaataccatttttagctgtaaggaaggcgatagtggtgaatatgaagtatgcatccccaataaaatggtacctacaacaattatagttgagaagtctctatga

SEQ ID NO: 183125 - DNA, 282 bp, Klebsiella oxytoca
ttggttctgaaccggacctatgcgaaccgcagtaatgcggagcgcgcagcaaaaatgaactgggagcggctgcagtgtggtgtggcgtcatttttactgcagctggcagaaggccgcgcggatctctatacggaaatgcccgtgaaagtcaccggctttaaacaacccattgatgatgccagctggaccatcacaacgttaacgtacacggtaaacccggatagcggatttacaaccagcatcgagctggaagtgaaaattgatgatttagtaatggactga

SEQ ID NO: 183126 - DNA, 153 bp, Klebsiella oxytoca
atgatcgaggctgacacgacccgtattaacagcaacgtgatcctgaatggcgacgtcacacgcggcggcggagcgatgacgtcaaacggtattgtggccgataagcataaacaccttggcgacagtggcggaacaacgggagatccaatttga

SEQ ID NO: 183127 - DNA, 1800 bp, Klebsiella oxytoca
atgcatgtaaaaaaagtagaacttaaaaaattcaaaaaatacaaagatacatccatatcattaaataatgagttaagtttattagttggtggcaataattctggcaagtcatctttacttcaagcgatggccacttggcaattctgtaaaacacttttagaaattgagaaaggacgcaaaagttggacctcagcagcaactaatcaaggcttaggtcttagcatcgttgatttcacacccatgtttatcccaacattaagccatttatggactaacttaaaatctcaaaagcaaacagaggttgatggatacactcttaaaataaaattatattgggataatcagtctggcatcgagaagtttttagaaataggtttatctttagcaaacgatcgacttttcattaaaaatacatcaagcaacttgatactagatgatatagttaatcaagatggtttccctgatgacactaatatacctcaaattgcctacctcccaccatttgcgggaattactgaccgtgaagtgcgaatgagtccagcaatgcgaaatcgattgattggacaaggcctttctggaggtgtaatccgaaattcattatatgatatccatttagagaaccaaagaaaacgaatcttattaaaagatggaaaaacaaaaatctcttcaagagacctgacagttttacgatctaatgatgcatgggaaatattacaaaaaacattatttgacttattttccattaaaattgaagtcacaccttttaacgaacagtaccatagttatttgagagtagactgtgttgccggtagcgttaatggatatcaattcactaaatatccgaatttcaatgctcgtgatatcatggtagaaggaagtggttttcttcagtggttgagtgtttacactttagctttgtctgaagaatttaatgtaatccttcttgatgagccagatgcgcatctgcacacacaactacagaaaaaccttacagaacgattagaagatattaccatacagaagggtaagcaggttcttcttgccactcattcgacagaattgatccgagcttatgaaccttcaaaaatattagcactggcaaactcgcgaggaaaatacctcagttccgatgacgataaaataggattattaagtggcatcgggacaatgtacagtcccaaaatacacaaattaactgaaggtaaaagattattgatagttgaaggtgtcagtgatgagagattcctaaaaaaaatatttacaaagcttgaattaacatggccttcaaatatcgtaacatggtattggaccggaaaatcttccgagcgatatcaactatacagacaactgaaaaatcatattcaagacttgaaagcgataagcatcagggatcgtgacgatgattgcaatgcatctgtagatgaaaatcttaaagataaaagcacatcatatgctgacacaaatttccaagcgttaaaatggagaagacgtcacattgaaaattacttccttgataaatctgcaatttctttagcagcaggtgtagatgaagaaaccgtacatcgtttttttgctgaacaacacggactagcattacctgagtcaattgttgcctctgataccctgccagttattaaagatgctcatggtaaggaaattttcactgccactaataattccattaagcacgaatattcagttaccagagaccatgtattagaacaaatgagtatcgaaaatatatgcgatgacataaagtatttttgtcaaagattatcagagtttgcgatattagagtaa

SEQ ID NO: 183128 - DNA, 246 bp, Klebsiella oxytoca
atgaaaaagacccgctataccgaagaacagatagcatttgcgctgaaacaggccgaaaccggcacccgtgtcggggaagtctgccgaaagatggggatttctgaagccactttttataactggaagaagaaattcgccggtctgggcgtgaccgaactgcggcgtctgcggcaaccggcagctcgaaaccatatgttgcgacagatggcgcaggtgttgcgccggtcgcaacagcaaaacatctga

SEQ ID NO: 183129 - DNA, 753 bp, Klebsiella oxytoca
atggctgaatacgataatcacccatgttttcctcaacctagttcagatgatatttccctatggaaatatatggattttactaaattcatggcattagtcacatatcaaaaaatttttctatgtcgatctgatctctttgatgatccttatgaaggaacgttcccaagaaaaattatagaatatgtgcataatatgaatgaaagcgacattgatgaaagtacctctgagtacattaagcagatgtataatttcaacaagaatgtaagaaaacatacttatataagttgttggcatgcaaatgattttgagtcagcagcgatgtgggatctctatagtaagaatgatgcttccgttgcaatcgaaaccacttatgtagatataaaaaatctattaccgccggaagctatgattggcttggttaagtacattgattatgataaggatgtattcccgcttaataatacattttatccttttactcataaaagaaaatcattcgagcatgagagagaagtaaggtttttaattcaaaacttacctattaatgctgagggtactagtttggattttaataatgctatagcgccaaatgttattccgatcgatgttgatgttagttcatttgttaaaaaaatccatctgtctccgcgcgcacctgaatggatgctgaatttgttaaaagacattgtgattaagtattcaataaatattgaggttaggcgttctaatttatacatttccccaatttactaa

SEQ ID NO: 183130 - DNA, 552 bp, Klebsiella oxytoca
atgctgattggctacgcgcgggtgtctaccggcgatcaaaacctcgatttacagaaacacgcacttgttcgcgcagaatgtgaactaattttcgaagacaccgccagcgggaaaaatgcgaagcggcccggattaaggaaagctattcgccgtcttcgacctggtgattcgctggtggtctggaaactggatcgcctcggtcgcagtgttcgtgacctcatcactctggtatctgaactgcaggagcggggaattcattttcgcagcctgaccgacagcattgataccagtacgccagcaggacgttttttcttccacgtcatgagcgctctggcggagatggagagggaattgatagtggagagaacgcgcgcaggattagcagcggcgagagagcagggccgcatcggtggccgccgtcggataatgacctccgaagttgtggaacgctgccggcgcatgctggaaaacggagctacacgccagcaggtggccgacgtgatcggcgtaggggttaagacggtttacaaatattttccggtaggcgagtga

SEQ ID NO: 183131 - DNA, 1695 bp, Klebsiella oxytoca
atgcactcagatgagaagacagtcgaatggcatattgatgatttaaacaggaacaaactgtcgttttacgacgacacggcatccggattactggcttttctggaatacgccgcagcatctggccgcgagtgtgttatagatgttgatattaatttaacatccattttaaattttgatgctgctggcaaggtaatcaatttacgctttgacgcatcaatcaatagcgatgatcaactgctctggctcatgcatctggggcacggctcggtcattaaaaatccttggtttaaaaatataaccactccatgggttatcagtcgatttgattcatcaggtaacgcgttaactcctggcgctgccattctggccacattacaacaaactaacgatgaaatcggttatcagcctaccgcaagtgattcagatatctattccagtctttctgatgatgtaaaaaatcagcagatttgtgcggggatgattattgcctattctgacggtgtggatgttgtcgagccgcgtgggcgttacatggcgctggagttcattcaatgtaataactgtcgcgttatctccccgtcatttatggcaggaaagcatcaatatggaagcattcttttttctaacaccctgacttcagcctggggatatggtaactgcgttatcggcggagaggtgagatacggctctgtgtctggagcagtatttatgcgtcaacgtggagcatctggcggtatatggggtggatttaaagcataccgttgtggtgaatccggagtgaaaacataccaaaataacgtagatggccggtcagctcgctgctatcagttgacgtttgacggcataacagcgcatcagtgtggttacgacggggttgatgtatttgctgattacggagtccaggaggagcgcgttgacgattacactctgacagaatatgcatggggtatgctcccgacagcacataaggtcagtaatattattgcaactgactgcggagtgacaggcactggcacagggatgacagctgacggccagttcaacacttacagcaacataataatcgaaaagtctcgtagttccggtattttccatagcgggaaaaataattacctgatgaatattttcgtgaaaaacggaaatatgaatagtgcggctgcgggcgctcagattcgcatgctcggcgttagctcaatcagtggtgcgactattatcactgacgaatcagtagtaactgcaggttatggattatttactaccgatgccggtactagcctaaataatataaatctggatggtaccgcgttaaattcacaaccaagatacccggcaaaacaaaacctgagacttggcaggaccagcagtactgacacgcagtgcagtatttttgctaaccctcaacctacgatacttgctaactattgtggtgctattcattttgataatacgtatgcgctttcaggtagcgagagaggaaatgtatcgataaacccggtctatggcggggtggaggttaaaggaataagggtcaggggagaatatggcgggttcgctgttcacgcggttagctcacagagtaatgccgcatatcttaataatggtgaggtcatgttttacgagtcttcagggactttaaaacttcagtttaaaggatcctccggagcggtgataacatacacattaacagccggttaa

SEQ ID NO: 183132 - DNA, 249 bp, Klebsiella oxytoca
atgtctttgattattgatacagtatttaaaggtatttccgttaaaagcgcaaaagtaactgtcggtgatatctatatcggtgaagaccatgaggctttgtccattactgccaactggtcagccccgggttcttcagagttcttcagacaaacaacctataactgcccgtacgatatcactggcgcagacccggtaactcaggcctacacctggctgaaaacactggacgagttcagcgctgctgattga

SEQ ID NO: 183133 - DNA, 279 bp, Klebsiella oxytoca
atggcatttaaaatcacgaaagaggttcaggtgagcctggtatcaaacggcgttgtgattggctctcaggcccagagcgcggagctcatcatgactgttaccagcgtatcggttttcccggacggaacggggaccgcatacctggaaaccacagtgaatgggtcatctaacggcgatgtgcgctcattcccgataacctggctgaatggagatattttcagccaggcgcaagcgcaaattatggggctggatgagttttccggggcggtagtagtgtga

SEQ ID NO: 183134 - DNA, 2448 bp, Klebsiella oxytoca
atgcccgcgactcctcaagaccgtctttatggactgaccacgagtgttgctgtaaagccaccggtctatatttcagctgattatgatatcacccgttttggcgagcagaccattacgtccaaaacgccaacggatgagcggacgatcactaccacagaagggatgcgtgttctgcttttagggcaggataaccccgtcgaaaacggtatctgggttgcgcgccgttcgttctgggtcagggcgactgattttaacggcccccgggatgcggttaacggtacgttggttttttcgattaatggcgactgctggcaggtagaggctgatgatcccgtcgtcataggtaagtcggttattcacttccggccaacttacccgtttgaagcaaatctggacatattccagcgtacgttacgagtccctgaagcctcggtaaatgttttgccttcagcagaggagcgggcatggaaggggttgggctttgatggtgccgggcagccaaaactgcaggatcctgcgggaactggcttatgggggtatgttccggcaattggctcgtttgaaaaaggttcgctactcactcaacgctttgaggttcttctgtgggaatccacggatgaatactggcgctgggatggggcaatgccgaagatcgttttaccaggtagcacaccggatacggctggcggacggggtaaaggaaagtggctggatgtcaccgatgcgactcttcgctcaaacctgggttcaagcgacggctcgaaactcatcggcggtctgccttttgtaactcctgagatgttcggctcaagccggggtgatataacccacgatgaagcttttcggctgatgcttgctgcggccgccgtgcacccaacgagaacggcgtgggtccctggtgattatgaactgtttgatacccatcttccgccgcagggggtaacgctcatcattgatggcgttattaagcataatcctgtcggtgatttcacgtggtctgaaagcaaccgtcgctctccttattcattatttctggttacagtaagtgatgtagccattaaaggttccgggagaattgaaaataaatatgaggctgtttccgtagatgcagggggagacaacttcaaatttgaaggggtaacgatttctaatcctgaccgttcgaaatcggttgggttatcaatttacaacgtatttaacgtcagtgtgttgaattgcctcattgcaaataacggcagcaaagggacttatgtaaatagctctagcacggggattaccgggcgctacggtaatggcattgatagcggaggcatccgggggctgaccgttcgcgggctttcactgattgataacggcggaaacgggttctggtgttacggtgtcggggatttaaccttcacgactaactggtgcctcaggaatggggtatccgggatgcagtatggcccacatcctgattatgatggcgtgaacatttcatacaacatctgccgtgaaaatgctgcggacggtattgatattaactacaccggcgcttcgccagtcccgatagcaggcgtttttaacggtaatatttgtcgacgtaacggattttttaattctgatacgactaaaccaacagctgatggttccggcgtcaccctgcgtaatgtgaccgattatatctgcgcagacaatatgatacgggataataatggcgtaggaatttattgtacatttgcggcagattcccatgttcatgataacgtcattatcaacagaataacgttgtctgccggtatgtatcagggcttcgtgtcaacggatgtaaacatccacgataaccggattattaccaaagggactgcctatcaggaaggcgggtctatgcctgtctcacgaatgtcattccacagtaacaagttatttagttctcaggcccagtcggtatccattccgagcaatacacagacggacaggacctggaaagacaaccatcacgttacgcctaacgtcattaacttctggttctcagttaaagatgacactgtgcgctatacgggaagcacaggcagggcggtttacattaacgccaactacggcaaatttcgcgacgttaccgttaacggcgcaacgtcagacgacctggtttatgttgatggcggtcttaaaaacattttctccggatttacggccaataataccggaacaggcagggccgtatataccaacaatagttcacgtctcaagttcgcggattcgtttatccagtgcgctgcgggtacggctttattctgctatgccggtacaaccgttgatctggatagctgcgatgtcatcggcgctaccgccataagtgcgccgctgcctacatccggaagtgctgcggagataaagaaagctggtacgaactttataagtggcacggtaagtacagctaccccggttaaacaagtcccgtattcataa

SEQ ID NO: 183135 - DNA, 2547 bp, Klebsiella oxytoca
atggctaatgaatttttgacgcagtgcgaaatgaccgttaacacagctgccgggagaaagctctcagaagatgagatgtcatccctggttcgcgacatgaacgacgtgacaaatcgcatcctggccggtaatgaggctctatcgctcgaagaggcggcaatgcgggcagctgaagaactcagcaaccgagatcaactggcaaaagttatcgaggcacgcaataaagcgatcaacacacgcatcgcagcacagcgtctcggcgagttacgaacaacctggaaggaccgtccggacattggtctggaagcaatgcttgtaggccgaaatgatgcccgcaccggttcccgccgttctgttgcctcagaagtcgcacagttgcggggtaaatataattccggcatcaactatgatttcgatcaagcaggacttgtaaaattcatcagcagcggcagcaatgatcgggagatcgctgacgctatgtggcgcattggccgcgggcagaaactggacggcatgacctggcagtcagtagaagcggcgaaaattatatcgaagtggcaggaatctgcgcgtgcggacgagaatcgagccggggcatgggttggtaaagtgcccgggtatatcgtccgccaatcacacgacatcctgaaaattcgtgctgccgggtatgagtcctggcgtaacgccatcctaccgcgcctggatgatgcgacctttgacggcataaccgatcgggaacaattcctgaaaaatgtctatgacggccttgcgtcaggggttcatctgtccgccgataaaccagactggatgaacggttttaaaggttcgcagaacgctgctaagcgcgccagccaggagcgtgtattgcacttcaaagacggtgtttcttggcatgagtacaatcagcagttcggcactggtagcctgcgtgaagctctattcggcgggctcaacaatgcagctcgcactacaggtatgatgcgtgtcctgggcaccaatccacagaacatgttcaagtacctggttgataccatatcggaagacttgcgaggtaccgcatcaccagcggcgcaagcggattttgcatctaaagttaagcgccttatccggaccaccatgccgcaaattgacggatcgctgaacattcccggcagtgttggaatggctaacgcatctgctggtattcgcggctggctgcgaatgtcgcagcttggcggtgcagtgatttcatcgtttaacgacgtgcccatttccgccaccgaaatgcggtaccagggccagaattttatgcaggccgttctgggtgcgatgaagggccgatttacccggtacaataacgcagagcaaaaggagatcctctcatccattggggtttattctgatgccatgacgcaggagatcatacgtcgtatctcaggagacgatacgctaaacggaaaaatggggcgggcgcagcaacttttcttcaaatacaacctgatgaatttctggactgagagcgggcgcaacagcaacgctatgatgattaccaactggttggcgaagaacgcagaccatacatactcgcagttgccggaagacctgcgtcgcgtgctggatattcatggcatcggtgatgcagagtggaatatctatcgcaacatggatatggccgatagtgagggcagaaaattcatgaccagcagcggcattcgtggcgtgccggatgaggtgattgcctcctatgtcgaggggaaaggcatgaaagtcaccgaacgttctgttgctgatgcccgcgatacgctggaagggcagttgcgaggctacgttctcgatcgccttaacatcgcaatgtcagagccgggtgagcgaactcaggcgtttatgaagatggggaccattccaggcaccgtcgcgggggaagcaattcgctttgccgggcagtacaagtcgtttactgcctcatttatgcagaacgtgcttggtcgtgaggtgtttggtcgcggctacacacctgcaggcctcggtgaatcaaagactgcgtccctgacgaatgcgttattccgcaatggaaagggcgctttcatgggggcggcaaacctatttgtatgggcaacgctattcggctacgtttcgatgcaaacgaaactcatgctgaaagggcagaccccacgcccgccagatgccaaaaccttcatggcagcagcagcccagggtggcggtcttggtatcttgggcgatttcatgttcggtgaagttaaccgcatgggggctggtcctgtaacttcattgatgggtcctgcggcatcaaatgcagatagcatcataacattgttgcagcaaactacccgcggtgatgctgatcttggcgattggtaccgaacatcccttgataataccccttttctcaatgtgttctggctgcgcacagcaatgaatggtctgatattgaaccggatacaagatgcattagatccgggatctctggaaagataccagcggagggttgaaagagagcaggggaatacctttatgcttccgccatctcagtttatgctgggtaggtaa

SEQ ID NO: 183136 - DNA, 1713 bp, Klebsiella oxytoca
atgccaatttatacagacgatcctgggcagggcattaaccagcctattggcaacgcgctatcagggctcggcgagtctctgctttcatctcttaatcaggggtttgaagaggggccggtcatctccggctaccgtttcgcccaagccgaccagttggcgaacgacctaaattcagcgatcgtcagcaaatcagatgccgatgctcgcctgaaagaatatggcgtcaagagcatcaatgtaccagacagcggcgttacacagtctttccttgatcacgttattgatgagcgcaagcagtctctggcaaagcagcagatcgctatgtctgcgccttcaggttgggtgtccacgccgctaaactttgcggctaacctcgccggttcaatggctgaccctggtaacgtggcgctggctctggtcccttttgctggtgaggcaaaagccgcatctatgatagggcgatttggtgagaggttagtcaccggagccaggttaggtgcggtgcaggcagtggccacagtgccattcaccgcccaggctgcggcggcagagggtggtgatttcacctatggcaatgcgctagagagcactttctttaacacactggcaggcggcttgatgcatgcaggcggtggagtgatttctgatttagtgcgtgcgaggcgcgctggcgtatcgtcagaaccttctgccagatcatctactgatgtccagcctgtcgccgatacacagccgacaccggtgattacgccggataatatcccatcaggtgtcaatctcccggaacgtggcacaaatgccgatctggcggaagcgatagccagtgatgctgacaactacgcatacagccgggcatatgatgatgttgttcctgactatctggcacgccagcaggaattgcaaaccggtcggataaataacgtggctgaactgcgcacagaactgaccacgaaccagcgccagtcagattcacttgatgcaactctacagcagcgcaccgctgaatatcaggcgcagcgcatgaagtttaaagaggctcgcagccaggcacagaaagatatcgacgcagagaaagcgcagatttccgcccgcaacgaagagattaaccagacgctggtacgcaatgcatcagcagagcgtgcgcgcggaaggcaatctcaggttgggcgtggtgaaatacctgatgaactggcaggcatcattgagcaacgcgcgcagcagattcgcagtggcatgcagatgtcgcctgtcgccggtgcagtgcgcactgcatcagcagcagttcgcgaggctgactggagtgtaaaccagcaggcttaccgggctgcgctggcgcacatgatggatggccgatctcctgatattgaaccattttatgatctgcacaaaccagcgttgcgggaacgtgccatccaacgcattcagaacccggaaaggcagcctgatgacagtggtcgcgtagtcagtgaaagcgcagatcgcgtttggcaggatacgcagaagactgaccatgagttgacatcggcaacggctgatttggaaaatgaattcaacatcagtgacgcactgcttaacgacatcaccacgactaatcctgaaatggctgcctcgatgcgcgaaaaccttgccgctatccgggctgaggcaaacgatacgtcacttggaaaggccttccgcgctttcgccgcctgtatgattaaccgaggtctgtaa

SEQ ID NO: 183137 - DNA, 2712 bp, Klebsiella oxytoca
atgccacgcttacctaccgctcgcgatctgggcaatgttgccctgcgcccttcaactggtgtcacttctgtcgatacaaacgtgctttctgctcccgctcgtgccacggcgcagctcgggcaggtagtcgccggcgcgcttacgcaggaataccaggaccagcagcgtctgggctttggcaaggcccaaactgcctggctgcagggccaggcagaagcatatgccgcgcttgaaagagattacgactacgcaaccatgcaggaccgctatggccagcagatgcagaaggttactgaaagttcagcttcaggcattactagcggtcgcatgcgccaggagttcgataactgggtaaaccagcagaacatccgcggcggtgaacaaatccgctctctggcatgggcaaaggaaaaagactcaaatattgccggccttaatcagtcgctggagaccagccggtctacttatctgacatcgaccgacccggcaacccgtcagcaaattcttgatgccacgaacaatatgattcagggcgccgccagtaaggggtatatagaccagacgcaagcccagcaacttgggcagcggtggatcaccgatgctgctaccggttccctgaaaatgatgcagccagagcagcgtctttccgcattacagaatccgaccggcattgtgtcttttcttccgccagatcagcgacaggcaatgattaaggatgcttcctatgagtcattgaatacccgcctgagccagcagcaactgcaaatttatactggtgatgctggcatgaatgttttagctgtgccgcaggagactcttctgcaggccgtgtaccagcaggaaagcggcaatcggcatcgtaatgctgacggtagcctggtgacgtcacccaaaggagctcagggggcggggcaaataatgccgctcactggcaaagatccggggttcggcgtaaagccactacaggatgacagcgaagaggagaatcgccgtttcgccggggattatctaagcgcaatgctcaagcgttataatggcaaccaggttcttgctcttgccgcctacaatgcgggtccaggacaggtcgatggatggctagagaaagttggcgacccgcgtacaggtcaggtaagcaacgaacaatttgcggcatctattccattcaatgagacgcgtaactatgtttactccgtttcggcgaacgcccagcgtatgggaaatgtccgttccgtcatagattcgcaggaattcaaaaatctggacgggcagcagcaggctcagatagcgtcacgcacagtacaaatccaggatcaggttgattcagcatatcgcgtcaatattcagcagcgcataactgacgatgctgcgcgcgcgcaatcaggactcaatattgaaagccctgtgactgaggctgagttcatccgttcgattccttcttctgcaacaccgggagagcgtgcacagttttatcagcaatggaaccgttacaaagatacgctggcgcttcagccggtaaataactttgtgatgcagaattctgccgccgatgggctggcagctgttcaggcgctgaaacctgccgataacgcagctgattttcagtttcagaaccagcaatatgcgcaggctcagcagaattaccaacgtattatcaaggctcgcgagtccgatcccggtcaatggctgtctcaatattccgatgtggttcaatccgcctggaatctgtatcaaaatgatccaactaaaggcgcagattatgccaatgccgttattgccgagaagcaaaggctgggcataaaaagtaaggacatcatcccagatgccatagcggcctcgatattccagcaggtcgacaacaataaggaaagctcagttgctgatattcaatcaattgggcaacagtttggacagtacgcccctcaggtgatggcgcaactacagaaaaaatcatctccagtactgcaggtagttatggctacgaataacccgcgcgcagctaacgccttatggcagaaccgtggagttacaaccgcggaactgcgaagtggctttgctaaaaatgattctgacagcgcagattctgaatggaataaccaggctaagggctttgccggaaccattgttgtgcaacctggcgggacagcggtatggaataattttaatgagcaaggtaagcgcctgacatacatcaatatgcagcgaggcatgtcacctgttaatgcatcgaagcaggcctaccaggatattctcggcgatcaatatcagatcaatggaacgtggcgtatgcctaattcgtctgggcaagacatcagtgatgtaaacgatggtgcgaacgagtatctgaaatcgctcaagcccgatcagattatgccacttattggggaccctagattgtctgatagtgttaaccgcgagcagagtatcagccgcattcgcgataacgctcagtgggtgacaaatagcgatgagacaggtctaacgttggtgatgaatggtctgctggttaatggtgataacgggaaccccattaccgtatcgtttggcgatctagctaaactaggtgcgggtaatcgctcgacatggaacagcatcaccaaaacctttgatactccagtgaaatacactcctggacagtcaaagaactacagtgcggaaagtcagcgcgacaacctgattaacattttccagaacggccagcaatcaggacgataa

SEQ ID NO: 183138 - DNA, 873 bp, Klebsiella oxytoca
atgtcaaagcaggcgtcagccatatgggcaggggcatgggactcgataaagtctccgatgaatgtactgaaggatttaggtaaaggcgattttagtggggcatggaaggacctcaagcatatccctggcaatcaggagcgcgcgaactcaaaaacacttaactcgtttggaattcgtggctgggttggcgatcaccccggcgaaaccgctgcggcgatagccggaagcattttagggggctctgcattgatgggtggtggtgctgctgcaggatcgggcgccgcaggggcctctggctcgaccgctgccccaataaccgcagcagtcggcacaccagtaacgcagacgggaacggcgggcgctacaggaacagctggtacagctgctgcatcaggaacggggtctggaatcatgggaacaatgcaaaactgggcgggttacgcccagatgggcagctctctgctcaacgcttcatcatcggtaaaatcaggcaatcagactgctagcgtctataaccagcaggcaaagcagctgagacagcaagcgaataacgttgatgccgcatatcaacagcaggcccgtgaacaaactactcaagcccgccaggcagaatcaacatctctggcgaacgctgcggcatccggtgcaaacgccaatagcgtgtcagctattaataaccgcgctgatatcgcgcagcagggtgagctgaataacctgatgacattgtggaatggcacccagcaatcaaaccaaatgaggaatcaggcaagcgttcttaaagcccaggcgaagtctgctaaatcggccggtggtcttggtgggttgacctccatccttcaggggggagcgtctttgtatagcctgtataaataa

SEQ ID NO: 183139 - DNA, 2685 bp, Klebsiella oxytoca
atgccacgtaataacgttccgcttctcgcttttaaccgtgggattatctcgcctctggcgctggcccgcaccgacattgagcggctggcgctgtcggcggaggtccagactaactggatgcctcgactgcttggctccatgatgctccgaccaggactgggatatatcgggcagaccctcgacaataagcgatcccggtttattccgtttgtgttcgcgactgatgatacggctctcattgaacttactgacggcaaaatgcgtgtgtgggttgatgatgttctggtttcccgcagcgctgtctcttcagtcattacgaatggaggttttgaatctgacctttctggatggacggatgctgatgaatccgactccacctctgaatggactgatgcaggcatgcagttaaccggcaacagttccacatcagcaattcgttggcagcaggtcagtgtgtccgcctccgatcaggatgtgcagcatgctattcgcgtcagcgtagctcgcgggccggtaactataatgatcggctcaagccagggtgaggatgactatatcgctgaaactactctgctggagggcgtcagctcattgtcgttcactcccgccggcgacttttacattcagtttgaaagtgctgagacgttcccggtgatagttggttctgtggcagttgaaagcggtggtgttctggttctggataccccgtggagagatagcgatctgtatttagtccaggtagcacaaagcgccgatgtgttgtttgttgcgtgtagtggcatacagcagaggcgtattgagcggcgtgataacggttcgtggtctgtcgttaagtattattctaacgatggtccgtacaatgtgatgaacgtttctcccacgacgctcacgcccggcgccagaacgggattgattactcttacggcgtccgccagcctgtttcgttcaggacatgttggtgcactattccgtttgacctcaagcggacaaactgtatcgtcagcaatcaacggtgagtctcagtttaccgggtatgtgaaggtgaccgggattgatgactcgcgcaagtttacggtcagcattgctaacgtcgatcccgcgacgccgtggtccgggaccgtgacgcttcaacgttctgtaagtgagccgggtgcctggactgatgttaagacgtgggccggtgaaacgtcagaaacctacgacgacgggctgaacaataatactatctactatcggatcggtgtcgcggcgggcgactgggaaaccagttccggctccgtgcaggtctcgcttgagtattctggcggcagcctgacgggaacagtgcggataacagctgttaattccaggacgtcggcaaccgggattgtcctttctgacctgggcggaacatctgcgactgctgactggtatgaaggggccttctctgagaaaaacggattccccggcgcggtggccatctttgaggggcggttgtggtgggctggtggtgaccgtatctatggcagttactctgatgcctatgattcatttgacgatggtaataattcagaagataaagtcgccggcgatgcgagcgcgattaattacagtatcggttcgggtcccgtcgataaggtcaactggctgttgccgctgctccgcttaattgcaggcactcagggcagtgaggcatcaattcagtcgtcctcttatggtgaagtggtaacgcctgataacttccatatcaagtatccttccacgcggggaagtacgcatgccggtgctgtagtcctggataaccgcggcatcttcatccaccgcagcggacgccgggtgtatgaactcaactacaccagtgattactacgactacgccagtacagaccttaccgacctgtggccggaatgtggtaattcccccattgtccgcatcgcggcgcaacgccttcctgatgatcgcatccactgtgtgcgggaaaacggcactgttgctgtccttgtccgcgacccggctgaagacctcaaagcgtgggttgttgtggaaaccgatggcactgttgaggatgttgtcacattgccaggcgacgaagaggaccgggtttactacgtcgtttacaggaacggtattcggtgcctggagcggtgggctaaagagtccgagtgtatcggcgggagcatgaataaacaggctgattcattcatctccagaaccggaagtaccagcgacactctttccgggcttaaccacatcgagggcaaagcggtagtggtatgggccgacggcaaagatattggtacgcgaacggtaagcagtggtgctatatcgctgggggcttcatacagaaatgttatcgcgggattgggttataccgcgaagtacaaaagctcaaagcttgcatacgctgctgggatgggcaccgcactggcgcagcgtaaacgcgtggaccatcttgcgttaatcatgaggaacacccactaccgcgggatgacgtatgggcctgacttcgacattcaggacgatttgcctgccgaagagtttgctaatcccaccgcaagtaacacggtgtgggaatcgtatgaccgggattcctttgagtttgatggctcgtgggataccgattcccggatttgtcttgtcgccgccgccccgcggcctgttaccgttctggcggcaatagtgagtctgacaacgcatgataagtaa

SEQ ID NO: 183140 - DNA, 624 bp, Klebsiella oxytoca
atggccgttgacccgaacattcggctggcaatctacaatgatgcgctgatcctgtcgggtgagcggatactcttctctctggatgaaaatcgggaacctcgccgccttctcgatattgtatgggatacggcgctgcgatattgccttgagcaagggcagtggaattttgccgtcagagcggagcgcctggattactccccgtcagtagaaccgccgtttggttacatcagggcatttgataagcctgaagactggatcaggacgtgctctgttgcttctgacccttatttcaataacaccatactcgactatacagacgaggcggcattctggttctgtaactatgacgagatctacatccgctacgtttcggatagtgagttctatggtaataacggttcagcctggccggaaacgtaccgaatgtttattgcggcgcatctggcgaaactcgtttcacgtcgcctgaaaaatggctccgatgctcagactattgagtacgagtataaaaccagaaaacgcgatgctctaaccaaggatgccctacaggatccgactaagcgcgttcctgccggcgcatttgttacttcccgcagggggcagcgcagccggttttcccgatag

SEQ ID NO: 183141 - DNA, 426 bp, Klebsiella oxytoca
atggctcaccatattatcccttcccggctaaaacttgccgagcatgcccgcaatacgtttcgcattgttgccgaagaaggacagaatattgacctgttcagacaaccagccgcctgggcgcatatcgcttaccagctaaaagctggcgacaaaatagaagtcttcgcagtcgatcgcacctggtacgccgaaggtgttgtgacatcagtgaagcaactcgcagcaaaagttgaattcttcattcatcagcaattcggcgagattgagcccgaaactaaagaggacggaaaaccgtattttgtgaagttccgcggacaggctaagtggtctgtaatccgtagggaagacggagaagtgatggaaggtaacatccagaccaaggaagaagccgcatccaaaatggaactacttattaaagaggtgtaa

SEQ ID NO: 183142 - DNA, 267 bp, Klebsiella oxytoca
atggcttacacaacaaccaacccaccggctttacttcaggaccgcatcggcggcggtggtgctgcctggtcttactcttcagttgacccgatcgctacagtaaccgcggcatcctatatcaccaacggtcaggcgctagggctgaaagttggtgactccgttgtggtttacgatacggaaacgccgatgtcgtatatcgcgtttgtatcggcagtctccgctgctggagccacactggccctcgcaacagcgaccgcgtcagcataa

SEQ ID NO: 183143 - DNA, 852 bp, Klebsiella oxytoca
atgtctgataccgcttttcaaaaacagtaccggcaggagttcatcgccggtttcgagttcggccagtccatgctgcgcagcacggttgtaaccgaatccgtggttaaaggtaacgaagcaacattccttgttgctgataccggtggcgcggaagcagttacccgtggcgttaacgggatgatccctgcacgtgctgacaacctgacgcagaaacctgcaattctgaccgaatggcacgataaaccccgccgcacccgattcaatatttttggctctcagggcgacggccgccgcatcatgcagcagggcaccattaaggtgatgaaccgcaagattgacgacgtcattctggcgaacctgaacactgcgacccagaccattaacgtgactggttccgcagctgattcacgcatggttgcagtaaccaaagcgatcgcggtgctcggcaataacgatgtggatgtcgaagaagaaagcaacatgttcggtgttatgtctccggcatttcgcgctttcctttaccagaacaaccagttcaccagcgccgattacgtggatgtgaagccatttaacggccctgtgcgcaaaatgctgcgctgggctggtgttaactgggtagtgcattcgcgtgttcctggcgttggcactgccaacgaacaccttttcgtctaccaccgcaactccattggtcacgctgtcaacagcggggatatggacgtaaaagccggttataacgaagaagatgattactactgggcgcgtacttccatgttcatgggcggttcgctactccagccaaatggcgttgtggtgctgaatcatgacggttcttcaatggttgctgatgcataa

SEQ ID NO: 183144 - DNA, 966 bp, Klebsiella oxytoca
atgctattccgcaacatgttcttaaaatactacgccccagatgatggaaacggtgaccccggcgctcccgctggtggtagtccggatggggaggaaccgcctgaaagtggtcagcaaggcgaacagggtaagcctaaccccaaccctaatccgctaaatacggatgatccacagccgccagcagcaccacaaaagtttcctgataactggcgcgatcagcttgccggcgatgatgcgaagtatcgtaaacagctggaacgctacgcttcacctgaagcgctggcaaaagctcatcgcgaactacaatccaagatgagctctggtgaattccgcgctgctaagttgccggaaaatccgaccaatgaagagctggcgcaatggcgcaaagataacggtgtgccagagaaggccgatgattacctggctgatttgccgtcaggcatagttctgggagatgaagataaagagcgtgtatcgtccttcctcgaagcgatgcacggcaagaacgtttccaaagaacatgtgcaggccgccattgagtggaaccagcagatggtcgagcaggagatgcaggcccgctatgagcgcaatgtcgaagcccaacagaagacggaagatgcattgcgccaggagtgggggccggaataccgccgaaatatcaacctgattaacggcatgctggatggtctgtcgaaggatgcgaaggatttgttccttggcgcacagaccggagacggagtcagcattttcaataatcctgacgtggcgaaatggctggttgatgtcgcccgcgcggtaaacccggtggcaacagtggttccgggtgccagcaatccacaggcgatcaccgacgaaattgcaactctcgaaaaacgcatgcgtgacgattatgagggttggttcaaagatgaagcatctcagacccgcctgcgtcaactttacgaagctcaggaacgcctgggctaa

SEQ ID NO: 183145 - DNA, 294 bp, Klebsiella oxytoca
atgagcataaaagcacctgaaccttatttgccgtatccgtggggtgacaatatccccttcgtttatgcgataaaggcgctaaacaaaggcgaggccacgccagagcaacaaaagttaattctgcatgagcttatgaatctgaccggctattacgacctgagttacaggccagatagcgatcgcgacacggcatttgctgagggtaaacgattcgtcggggctcaagtggtgaagatgaataatctttcgtcgaaggaagttgaagaggcgaaagccaaacggaaacaaaaataa

SEQ ID NO: 183146 - DNA, 1617 bp, Klebsiella oxytoca
atgatggacagcagagcacagcaactgataaagaacggcgatcacttgttcagcaagaaatcctctctgctgtcgctctggcaggaaatcgccgataacttttatcctgagcgggctgacttcactatctgccgttcgctgggtaatgagttcgcggatcatctaatgaccagctaccccgtactggcgcgtcgtgacctgggagattcctttggctcaatgctgaggcgtgataagtggttcaatctgaatattcagggcagtgaacccgaccaccaggcaaaagtctggctgcaatgggccagagatgttcagtatcgggcaatgtatgcgagaggaactcaactggtcagggccaccaaagagggcgatcacgacttctcagcattcggccagtgtgcgatcagcgttgaacttaacagacatgctaatggcctgctgtatcgctgctggcatctccgggacgtggcgtgggcagaaaacgcggacggcgagatcgacaccattcaccggaagtggaagcctacagcgacccagttgaagcagcttttcggcaataaaatcagtcagcaggtcaaaaatcatctggagaaagacccgtacaaagaggtcaattgccgacatattgttgttccgtctgaacaatacgagatggggaaaagccgtgcgccgtacacatcggtttatattgatgttgataatcagcatgtgatggaagaaacgccggtaatgaaccggatttactgtatccctcgatggcaaacggtatctggttctcagtatgcttactctccggccactatcgtggctttgccggatgcgcgcctgattcagtcaatcactcgtgtccttctcgaagctggcgaaaaggctgttgacccgccgctggtggcgaacaagtctgtatttcgcgatgactttaacctgatggcaggtggtatcacctgggcagaccttgaggcggatcaggacatcaggcaagttatcggcgagtttacgaagtcaacgcaactccctgccggcatgaacatccgcaatgatgtccaggtaatgattcatcaggcgttttatctcaacactctgacattgccgcagatgtctggcatgacggcgtatgaggtcagccagcgggtgcaagagtacattcgtcaggcactgccgctgttctctccggtagagcaggagtacaacggcgagctctgcgatatgacgtttaacctgctgatgcaatccggtgcgttcggttcccgctatgacattcccgaatcccttcaggggcaggatgtgcagttctccttcgagagcccgctccagtctgctatcgggcaggagaagcaaggcaaactgcaggtaaccgccgagatgcttgggattgcgagaaacattgatccttctgtcgatgctgacgttgatattcgtacagcgtttagggacgcaatggatggttcaggtgtaccggctaagtggctgcgtagcgaagatgatgcgaatcaaattctccagcaacaggctcagcagcagcaaggcgccgcagagatgcagcaagtggcgcagggagcccaaacgctgcaaaatgtggctgatgccgctcagtccttcagggaggcagccgcatga

SEQ ID NO: 183147 - DNA, 222 bp, Klebsiella oxytoca
atgagtaaagcaacagacgctatcggtagtgttgtcggtagtattttaggaaccaagagcggcggcgtaacggttgaaagtgaagaccagacagcggcgccgactgaagataccgacgccgtaaaggctgcgcgacgtcgcagcatgattcagagtcagcagcgcagcggtcgaagtagcacaattctcaccggcagcagcaataacaaactgggtggatga

SEQ ID NO: 183148 - DNA, 1509 bp, Klebsiella oxytoca
atggccgcgacaaaagatatgctctgggtgccgaatcctggccctcagactgacgcttattactgtgatgccgatgaactgttttacggcggacaggcgggcggtggtaaatctgcgctgataaacggcctggctgtcacaagccacgagcgatcactcatcttgcgacgtatccgcgaagatgccaagaaactggccgagtctgaacttatcggtaagttgttcgacggcggtcgtgatgggtggaatggttcggatctggtctggaggaatggcaaaaagctaatccagtacggcggctgtgagcaggaagaggacaagcagcgctataaaggtgatcctcacgatttaatttgtttcgatgaggtgactgacttcctcgaaactcagtacgagttcatcacgatctggaaccgttccacgactccggggcaaaaatgccgggttgtggctactggtaacccaccgaccagcgctacagggctatgggttattcggcggtggggggcatggcttgatccatcgcatcctaaccccgcgaaacccggcgaacttcgctggtatcttcgaaatgaagtcggcgaagaaatggaggttgaaggccgggggccgcacttgatcggtggtttcatggttgaggctaagtcgagaacattcatcccggcaaagttaagcgacaatcccgatctggctgctgatggcgaatatgcccgtatccttaacaaccttccaaaagaattacgggatgcataccgcgatgggcagttccgggcatcgcttcaggatgaacccaaccaatgcatccccacagcctgggtgcaggcggcaatgtctcgctggacggcgcaacctcccgcgggcgttccaatgtgtgccattggcgtggacgttgcgcagggtggttctgacaacacggtgatatctccccgccatgacggctggtttgctgaattgctcacagttccggggaaagagactcccggaggaactgatgttgctggtctggttatctccaagcgccgtgatggcgccaaatgcattgttgatattggcggcggctggggtggtgacgcctatgcgcacttgcgtgaaaacggcgttgatgctgtttcgtacatggggatcaaggattccgtcagacgtacacatgatggcctgctgaagttcagaaatattcgaaccgaggcttactggaaactacgtgaggcattgaatcctgaccagccaggcggctcaacaatctgcctcccaaacgatccaacattactctctgaccttaccgcaccaacctatgaggttaagcgtggcgggaatggcggcggcgtcattcatcttgagtcgaaagaaaatctcgttaagcgccttggacgttctcctgaccggggcgacgccgtggttatgagttggtttgatggtgaaaggcaggcgaatgttcgcggcggctaccgggcacggaatgcgccgccgaaagttaatctcggacactccaaccagaaaaggagacgataa

SEQ ID NO: 183149 - DNA, 993 bp, Klebsiella oxytoca
atggcaaaaccggactggggcgagcttcagcaacggttcctgtccgatcatgccgcaaccggcgtatcaccgaaggattggtgtgaagcgcagggactgaattacgcaaccgcccgtcgatatatcaagaaacccactgcgcaaactgcgcaaaaaactgcgcagaagaaattgcgcactgcgcaaaaggaacagtgcgcagaagagttggtggatgatgacggccttactgttcaacagcgtttatttgtcgcggagtacctgaaggataacaacgccacacaggccgccatccgtgccgggtacagcaaaaagactgcttactcaattggtcaacgtctgttgaagaaagttgagattgcgcaggcaattacgcagcagcagaaagcatccattgtgcgcacactcggcagcgctgacgaagtgcttgagcagatgtggcgactggccaccttcgacgccaaccagatatcgcaacatcgccgcggttgttgccgtcactgctggggcttcggtcaccagtaccaatggcgtgatgccgttgagtacgaagagaagaggcttgaagcgcttgagcgcaaacgtcgcgagcctgttgatgttggcggttatggctataaccatacactcgatcctaatccagattgcccgcgctgtaatggcgaaggagtgagccgcgtagtgctgcaagactcgacaaaattggatgatgcggccgcgctggcttattccggtgtgaaggtcggcaaggccggtatcgaaataacctcaatcagccgtgaacggatgtttgaggctgtcgctaagcgtctgggcctggctgatgcggagaatgcgcagcgcatccagcaggtggagattgagcgccgccaactggaagtagacaaaatccgcaaacaacttgaacctcctgagaaaaaagagggggaggttgtcgatctcaacgtgcttgcgcgtcgcctggcgtttgccctgactaaagcgatgaaatga

SEQ ID NO: 183150 - DNA, 372 bp, Klebsiella oxytoca
atggcgaaaacaaaatggcctaagttgccacggttttttgtgccgttgtttcactctgcaaatgtatatctttgccgaagcaaagaggagtgggatgccgcctgcgtccaccttggcgttgaaactggcggtaatgatatgtttattggctgctgtcagcattaccagaacgtagacaataacgagaacatctacctaatcggcgtattcaacggcgaggcagcaacgcttgtccatgagtgcgcacacgcaactttctactgctgccgtgatgttggggtagctatcgacacatcggcggcgaacgaaacctactgctacctcctggacagaatgtttagtgcatttctgccgcatatcaaacaggattaa

SEQ ID NO: 183151 - DNA, 201 bp, Klebsiella oxytoca
atgttaacagtaaaagtgatgtcgcctagtggcggcgaagaaattcattgtggactgagcgttggtttcaaccccaaccagcagagtattgccgtatcgggaatggaccagaacgtattcctgaagcagggagaagtggcctacgtgatgaacgcaaacggcaagaccatttcccgttacgaacaccgggcccaacagtag

SEQ ID NO: 183152 - DNA, 282 bp, Klebsiella oxytoca
atggtaacaagtgatccgagcgcaatcatcaatgcggtgatatgcgctgtaattgttgttgcgttgatgttctaccggcgcgacgggtcaagacaccgccccatgatatcgctgatggcttacttcactgtgctggtttacgccagcatccctttccgtttcctgtttggcctgtacgagtcatcccactggctggtggtgctggcgaacattcttatctgcggcgcggttctctggttcagggggaatgtggcgcgtctggttgatgcactgaggcactga

SEQ ID NO: 183153 - DNA, 579 bp, Klebsiella oxytoca
atgattaacccttctgaggttggtaaatcaggtgaaatggttcgcctccgcactctggaaagcatctggatacagggaaagctgcgtatgtggggccgctggtcgtatataggcggtggtagcggcggcaatatgtttaatcaattgctggcatccgggaagataacgaaaacagctatcaacgatgcactacgccggatgaagaaatcaggcatttccaagcctgagcttgaagcgttctttcaggagattcttaacggcaaaaataaaagtggactggcgttctgcactgatgaagaggcgctgaccatcaattcagttctcggagaaatactggttcgctcagggcataagagtctgtatgcgctcatagaagacagatatatcaagcgtctgagtaaaaaagcaatggctcgcgaccttaacaaaaaacacccagaatggtgtctgcgcacatgtgaaagcagaatcgacgtttggctaaatcttgcagaatcgatgctttatgcaccaatgtgtgatgctttcggcacgaatagcgacaagttttacttgaactcttgcgcagaaaatgcttga

SEQ ID NO: 183154 - DNA, 660 bp, Klebsiella oxytoca
atgactaatccttactgcgaatccctcacagccctacgcaacgcaccatcacattatttaaaagaggttggcgaccagtggcgaacgccggatcctcttttctggggtatcaacgcaatgtttggtccgttgatgctggatctgttcgctgatgacagcaatgcaaaatgccctgtctggtacaccgcagaagataacgcgctgacacaggactggtcggaaatactttcctcaatcggtggtgctgcatttggtaacccgccttacagccgctctcagtaccacgaaaagcaagccatcactggcatgactcacatcatgaactacgcagctgcgcaaagagagaagggcggccggtatgttttcctggtgaaatccgcaacgagcgaaacgtggtggccggaagacgcggatcatgtctgctttatccgcgggcggattggtttcgatctgcctgtctggtttaaacccgccaacgacaaacaaaggccgaccagcgcgttttttgctggtgccatagctgtgtttgataagacctggcgaggggaaaaattcagttatatcaaccgcaccgaactggaagctaaaggccaggcatttatggcgctggtgcagtttgccgccgagcaaccgaaaatcaaaaatgaggtgaataaatga

SEQ ID NO: 183155 - DNA, 594 bp, Klebsiella oxytoca
atgagagaccctcgtcgcagatgtaaagctcccggctgcggagcctggtttaaccttacctaccccaatgtttactggtgttgcgaagagcataaggcccagtaccttgcgcagcagcgcgagaaacaaaaggttaaggcacaaaacaggataaaaaataaacccgttcaccatatccgccctcaaccaacgacggctggaaaacctctcagccactggctggaagttacggaaagggtagtaaataccctttgccgtgaaactgcccttgctgatggggaggggtgtatttcctgcggtactcacgacgccaaagtctggcatgccggccactacagaaccgttgctaaagcctcccacctgcggtttacccgcatcaatatcaacctgcagtgtgatgactgcaacgtcggcaagtccgggaatatcaaagcttaccgggtcgggctggtggaaaaaatcggtgaagccgcagttcaggggcttgataacgacaaccggattcaccgctggaccatcgaagagctggaagccatccgcctgcaggcttacgccgacttacgcgcactgaaaaaaaggctggaggccgcatga

SEQ ID NO: 183156 - DNA, 267 bp, Klebsiella oxytoca
atgacattcactaaaaagcagttaatagagcacatcactgacaaggcggcgagaataaagccggatatacagattaacgacaagtaccgcattgaggctcttatgaatcagcacattttaaaaattgcactgactgcactaaccgcgcctgattatgtgcctcgcctggtaatggatggaatctgcgatatgagcgacggcggcgttgatgcgcaagggatatgggagctgtgtaaggcagaaatcaccgggagattgattaaatga

SEQ ID NO: 183157 - DNA, 249 bp, Klebsiella oxytoca
atggcaagactaacgaagaaagaacaagcctgggtggatgaggtaaacgcagttctggcccgttgcccgtcgccagaaaaaatcggcttttttactattggcgatccggtaatcggtctgtacgacctgcgaagggataaagagatttccgactctgatgatgacttagtacgcgtggcgcagcaaaacggctggctatttgacgagcgtctggaatttccatcagcagttaacggcgtgtgcgggtaa

SEQ ID NO: 183158 - DNA, 990 bp, Klebsiella oxytoca
atgaacatctcaacagtaaacgagctcattcagtcgctggagagtgcgggcgagctgtcaatcaaagagcagaagtatctggacattatgcgctgggcggtgggtgttgctggcgagcgtgatgcggcgcttaatgcagagcgtgtatgggaaaagaccatgatggaagcttgcggcgaggatggccctgcgtcggtagccagcgaaattcgagcgctgcaggttctccgggatacgagaattcaggcgcttaattctcaggttgagcagctggctgcggagaatgcacgatattcgatgtctgcaggtcatgccgaccagaggatggctgaatctcgcgctgtgcgctctgctctcggctttaagccagatgcagacgatgtttccccatccgatctggtggaggcaataaaccaaatcgtggcggagttatgcgtcattcgtactgctcaccctcaacctcttggaccagcaatggacgctgcgatcgatgcatttaatgcggaggaaatgccagagactgggatgctcaacgcttacttcatcctccgtgaaagcatccgcatcaaaactcccgccaccgatcgcatcgtagccgggattaaggctgatgaggcgaaattcatttcccaaagcattcttgataatcctgccgtaaccgaccttggctctcttgtcgactggctggagcagcacgccaatgatagcgccgcagcagtgcgggctatgcgcgaggggggccgacaaatgagcatcagaacagagcatggatacgggccattaacggttactgttggctggcttgataactgcccaaactgcaacaacgacaaagctagtgtgactggatggtctgtgtctccggatactctttggtctggcgacgaagccgtatgcacgaaatgcggacacaaaggcgaaattgatgcagacggtgaaaacgcctgggttgaatgggatagcgtgaaggaggcacaacatgacaactga

SEQ ID NO: 183159 - DNA, 129 bp, Klebsiella oxytoca
atgaattctggaaactatcatggccgacctatccgtaaggcattaatccttaacttcatcgtgctgatcgctgttgtagcgctctcggcgattggcatctggcttataaatcagtgggtgacggcatga

SEQ ID NO: 183160 - DNA, 426 bp, Klebsiella oxytoca
atgaaaatcaggcatgagcgcattcgcgaggccatgaatgcctgggcgctttatccaggcggccgtaaaacgcctgtatcggcgattgtcgacgcttacttctccatgggtatgactgcgccagagttgtacgacgacagccaccctgacgcacttagccgcaatatccagaagatttaccgctgggttgaaagtgattcacctgcatcaatcgaaaaaattgcgctgcttctccccgcgattgaacgtgctatgccgccgttactactggcgcgggtgcgtagttactactctgaaactttccgcgaacttcttcaccgcaaacaacgggtggacgacgaaatggaagcgctgttcggcgcaatgattgctatctctgaccggattgctgatggcggctcttccggtaacacgctgattcactaa

SEQ ID NO: 183161 - DNA, 147 bp, Klebsiella oxytoca
atgccgaaaaactccattgctatagctgcggaggctcctttgcacgcgaagagttgcaatatcgcccttctggccgaggagcttatcgcaaagtggcatattactgccctatctgtaacgaaaaggaaaaaaagaaagaccaattaa

SEQ ID NO: 183162 - DNA, 1902 bp, Klebsiella oxytoca
atggaagccaacacgcgtaagctagaaagaatttttgatcaaaccatcacctatcaagtgccactattccagcgtccttatgtgtggacgtgtgagaaaaattgggagcccttgtgggaggacatccagacacttcttgataaacaacttaatggtggtagagctcacccccattttttaggggctgtagtattggagcaggtcgcgaacccgacgggatccatcgaaagtcgtcaggtgatcgatggtcaacaacgattcactacgctccagttgttcctgatggcggcgcgtgaccatgcggtagcgtatgaacagactaaatatgtcgaacgcttttcagatctcgtgaccaaccgacgtagcaagatcgatcacgatgacgaagtgttcaaagtatggcctaccaatagcaatcgagaagctttcaaagtagttcatgaggctgggtcacctgatgctgttgataagcaaattacactacggcctgatcttcgtgatggtgttaataacattattgacggttacaaattcttttatgcgcagatagggcagtggataaacggttcgtttgatgataaggaagatatccaggcattaagtgaaaagtctcttgatgatcgttttgattctctctggcaggttgttaaggactgtcttcagattgttgtgatcgatttggaccagaatgatgagactcaagtcatctttgagacgctgaatgcaagaggggaggaccttcttcctgcagacctgatcaagaattacttgttcaggctcgcggaagccaggggggataatgttgaacagctttatgcaaataactggaaatcattcgagactgattggtggagagaggaagtcagacagggacgaatcacccgcccccgagtggatgttttcatcaacaactatttagcgatgatgacgcgtgaggaggtcaagtcttcacatatttttaatgcatttaaggcatttgtcaggcagtctgaatcgagttcggatccggtttctggccctaaaacagcggcagagcacattgctcaactttcacgttacgctgaggttttcaaaagattttatcagtcagatagtcatccccgcttagcgacatttatgcgccgcttagatgctgtagatacaaccacagttattccgtttttgttgtatgcatacgctgaattagtccccggcaatgttacggagtttgatgcaattcttgagttgcttgaagcgtatttggtacgtcgcatgatctgtggaatgactagtaaaaactacaatcgctactttgttgagcttattaaagcattggacaagaaagggatcataacggcagaaaatgtagctggccagatgaataaaagtgctggagatagtactcgattccctgacgatagtgtactggctgcggccattacagatttgcccctttatggccggctggctcaatataaagtgcgaaccatacttgaagcacttgacgcttatgcgtttaacaaaaaaagtgaagcagaaccattaccaggtgggttgacgattgagcatgtaatgccgcaaaagtgggcagataattggccgcttagccccgatgataaaactgatccactgattgagcagaaggctattcaaaggagagataagctattaaatactataggtaatttaacgcttattactcatagtctgaatcccgcattgtcgaattctgcgtggaccttgaaacgccctgaactgctaaagtttagcaagctcaatttgacgcaatactttcatggcgatcatgctgtgcagtggggggagaaagaaattgaaacccgtactttttatctgactgagcatctcaaaaagatatggccaatgccagcagtttctgaagatgagaaaggcacaatggattaa

SEQ ID NO: 183163 - DNA, 1152 bp, Klebsiella oxytoca
atgtggcttatgaagacattactaacatcgtggtgtattaatcaacggggagcaggtcaagatgattttaataagcggacgaggaatgatttggcactacgtgccagttatctctgttcgttatgtaaatgctcaacggttggacctagcgatgaagggaaaaatgccgtcactatgactggtgtcgctgctcatatttgtgctgctgcacccggacctggagctcgtcgttacgatccaaatatgtcctctgaagagcgctctcatatcaacaatggaatatggctctgtgtgtcgtgtagtgtcctgattgaccgggatgaaaagcgttttactgtagataaattacatcaaatcaaatatgaacacgaaagttctcgccgaataggtgctttagaggattgtgacgaaaacaacattgtcgccattggtcctgacataattgcgttgggctacataattcgttctgctcctgaagggttacggattcgactttctcattttgtaagcggctccgtacgagatctttgggctttgcagcagaactttagcaaatggtctccggaaagacgttatgtgctgtgcaacgagcttggttttggtggattgctcaacgaacctcccatgattgaacgagtcaataattcctacgaaattcaattagcacttcaaaaacaaattatacgacagaatgcctgtgctgaaatatcaaccatgtgccgcaacacgttaaaacgaatttccggatttgatgcttttattcagatctttgaaaatgttctcggtatggcacaagggacttcgttcacgaatcttagcctcggaagtgatatgtctgacctttactggcgttataggggttctccatggttcaaaagtatggctatgatggaaatgattcgcttatcttcaatccctcgattgaataaaagccagcaaaccccaactacaccatttttggtcgtcaatcgagttaataatgtggaaataccgtcatttgaattgataaatcagaaaattgagatctcagttaacttcgacctcgagggcataggggaatgggaaaatacactatcagtttttatctggacacctgagcaacttgttgaagggcgcgagaaagcacgacaaattaatcatgaattgtattaa

SEQ ID NO: 183164 - DNA, 486 bp, Klebsiella oxytoca
atggacgcactggtcaacggtcgcaggatcaagtgcctgacctgtgtggatgatttcacgaaggagtgtctgacgatcaccgctgctttcggtatttcaggcgttcaggtcacgcgtattctggacagcatcgcgttgtttcggggctatccggcgacaataagaaccgatcagggcccggaatttacctgccgcgcgctcgatcaatgggcctttgagcatggtgtggaactacggcttatccagccaggtaagccaacgcagaacggatttattgagagttttaacggacgctttcgcgatgagtgtctgaacgaacactggttcagcgatatcgttcacgccaggaaaaccattaacgactggaggcaggattataacgagtgtcgtccacattcggcactgaattatctgacgccatcagagtttgcagcacggtggcgaaatggaaaatgtgaaggtaaacaaaccgacattactaactga

SEQ ID NO: 183165 - DNA, 1059 bp, Klebsiella oxytoca
atgaaaaagaataacttgatttacggggcgcttgccgccctggccttctgcacacctgccgtagcggctgaggttgctcacccggcggaacatgatgacatgaaaacgcctcaactgagcgccacttcctatcgtttttacggtgaactgggggtcggcggatatatggatttagaaggcgaggataaacataaatatagcgatggcacctatattgaaggcgggctggaaataaagcacggcagctggtttggcttaatttatggcgaaggctggacggttcaggccgatcgtcaggggaatgcctgggtaccggaccacggctggggcggatttgaaggtggaataaaccgcctctacggcggatataaaaccgatagcagcaccgagattatgctcagcctgcgccaggattcatcgctcgacgatctgcagtggtggggcgatttcacacccgacctcggctacgtgatccccaatacgcgcgatattatgtacgcgctcaaggtgcagaacctggcgggagattttcgctacagcgtgaccgccacgcccgccgggcaccacgatgaaagcaaagcgtggctccatttcggcaaatacgaccgctacgacgataaatatacctacccggcgatgatcaacggctacgtccagtacgatattgccgaaaaggtcacctggatgaacggtcttgagctgaccgacggtaccggtcagctcttgttaaccggtattctcacccccaacctcgccgcccgcgcctggcaccataccgggcgcgccagggggcaaaacgtgccgggaacggagaccggctttatggccagcgccatgtatgaagcgctcaagggtgtgtatctctctaccgcctatagctacgccaaacaccgcccggatcgcgccgccgaggaaaccacctcgtttatgcagttcggcatctggtacgaatatggcggcggacggttcgcgaccgccgcggacagccgcttctacatgaaaaacgcctccggagacccgagcgaccaggttttcctgatgcaatatttctattggtaa

SEQ ID NO: 183166 - DNA, 1158 bp, Klebsiella oxytoca
atggctacaggcttttgggttgtgaaaggcgataaaacaacatgcgggggatcggtactgaccggacacccgaaagggaagcagattggcccgaatctaaacagacaggcaacagtgggctgccaggtatcctgcggtaaacacccaggtatttacagcgtggcaggtggatatcctggagagtatattcatggtcagttagccgccagtacgctctacagccgctctacctgtccgtgtaagtcatttttcatcgccacccatacttttatgcgacacggcccttatcaggctccagtgcgggcaacatccacaccagcggcagcgaaagccacacctgattcagtacaagaaccagatcagcatgcccaagtagcgaagaagcaaaacagttttgctgacacctgcaagccagaagataaccaacttctgaacggcgtttacatctggactgaaaccaccgacgcaggacatgcttatgtttctgtacacgagaataattcgatctatgtttacacatacgggcgctttggtcggaaaggcccggccacattaacaggtgatgggattcttaacttcctgactggcgatgatgcacgcctttactatcgtgaagaactgtacaaataccaagcgagagtttttcagatcgacgatgttactacggaggaaacccgcagaatttttgaatctctatggaactccggtaaaacacccgttttcacggaggcgatgggagaccgtactaagcggcgcggaaaggtgatagacgtttacgatttaaccggcagcaactgcacaactcacacggtacaagtgatcagagaagcagggactaaaatctttgacaccagttacacatcgacaacaacgcagcttcgtatcgacaatgaagaagatttcactatccctgtatctttacagcgttacctgacggaaaagagcggcgatctgtcttcaatgaacgttatggaagtcaccagctcattcagagaacagtatccgaacatcgaacaattcaagcctaactctgaaagcctcacaggacgagtggaggaagggcttactaacagtgcgtcaacggttggatcatcttcgggctattctggtggcacgattggcggcgttttaggtggttcgtatgacattgacgaatag

SEQ ID NO: 183167 - DNA, 486 bp, Klebsiella oxytoca
atgaagcaatacaccaacgaagtcacgccatcagtactcgcatcattcaatcatccattcagcgcagagcaactggcaaacgcagacgaagagcagcgccagattttcaaatcccatattgaagaaatgaaagatcgttctttaatggcaatttggcgttttgctacgactggagcgctcacccgaaacggtggaaagattgagaaagccagcgccaacgacacttttattcttgaggatgggagcgaggttactcgggcaatggttggggatgacgttgtttatcctgacggaacacgcgcgaaaatcatcaacggatcggggtcagtcaataccaacggcaacggcgtttcttatgctctcgtaggaagccagcttgataacggtgatgtgattgttagcaccccacaagattatgccctcctctgccagttagacaacagcccagcaatgccagccgattttctcgctccatcggcgctctaa

SEQ ID NO: 183168 - DNA, 897 bp, Klebsiella oxytoca
atgtttaaaaaacgccgtcttacttctcgctcctgtgcgtcattgtgtggaatcttgccgctggctgcgctctgttccgttgatgtacaagccaaagagataacgtttgataccgagatgattcagtcacgcggattgaatgtcaatctcaaccgttattttgcgcgagctccgcgctttctccccggtacgcattccgtgcaggtgaagattaacggtaaggataaaggaaccgtcgcggcgcgttttggcgaggatggtacgctgtgcgttgatcgtgattttattgagttttccgggttaatgccggtccccctgaaaaagaatgaagagtgccatgacatcgtcaatgactacgcgcaggcggtagtgaaagccctgccaggccaggaaatggtcgaactgtatctcccgccggaggcgctgaacgggatgaatggtgatatcaaaaactttcagcacggcggaatagctggattgctcaactatgacctgttcagtacccgcagcgaatatggcggcagcgataccaatctctattctcaggccagtctggaagggggcataaacatcagcgactggtcgttgcgtagccgctatatccttaccgacgataatggcgataagaatgctgaaagtgtttacacctttgccgagcacgtttttgacgcgttgaagatgactgcgcaggtcggggagatcaatgccagctcatatgtcctgagcggagccccgatcgttggcgtacagctgatgcctacccgtgctttgcagggcagcggaagcggcgtcagcgttgcaggaatggcgcataatgctcaggcccgtggaggtacgtcagagcggacgacttatctacagcacgctggttccggccggaccgttcacgctcgatga

SEQ ID NO: 183169 - DNA, 705 bp, Klebsiella oxytoca
atgaatgaaaccataacattacgccccgaaagcagggcatcgatatcgacaaagggtgtggtcgtggatgacatgctggcgtcgctcaacgagctcgagcaactgcatccggcgctgaatctgctggcgcatccatcaatcggtcaggggagtcatgatttctttttccagtgttatgacgctggcgtacagcatgcgcaagcgggagtcgctgaaacggtatcagcgctgcctgattcgctgtcacatgagcagcaaagatgcgcgctgctgtgtgccgcagcgggtcgcctgaatgccctgggccagccgctgacgcacaatcgtctatgcgatctggccggtcagtattgcgccagcgtggcggatgctgatgccgaaacccgcagcggtttttataccgtacgcagcatatcgctgccggtttaccggcggctgctgcgggataagcatccttctggcatctgtctgcagcaggcgctgctgcacctgctggcctggaagagcgattccccctgggcccggcagcaggctcaacggttgctctggcagggcggcgttctgggggataaaggcgagtttgcgctcatgacgctggatgacgagctgcgggagcgccagtttgcgtggcctgacctgcggtcgctgctggccataaccgggtttctggcgacattcccggccgggccgctatttgctgattga

SEQ ID NO: 183170 - DNA, 723 bp, Klebsiella oxytoca
gtgattcacattcataatttacacaagcgcttcggcgacagccacgttctgcgcggcatcagctgcgacattaagccgcaggaagtcgtgtgtattatcggcccgtccggttccgggaaaagcacttttctgcgctgcatgaacgcgctggaaaccgtcagcgaaggcgaggttgaggtaaacggcttcgctgcccacgatcgcgccaccgatctgaataagatgcgggaaagcgtcggcatggtctttcagcgcttcaatctgttcccgcacaaaacggtgctggaaaatctgattatggccccgatgagcctgcgcggcacggcgcgcgcggaggcggtgcgtctggcggaagagctgctggcgaaggtcgggctgagcgacaagcgcgacgcctggccctccagcctctccggcgggcagcagcagcgggtggccatcgcgcgcgcgctggcgatgaagccgtcgattatgctgtttgatgagcccacttcggcgctcgatcctgagctggtgggcgacgtgctggaggtgatgaaaaacctcgccagcgaagggatgaccatggtaatcgtaacccacgagatgggctttgctcgcgaagtggccgaccgggttatctttatcgaccagggcattattcaggaagaggggaaaccggcgcagatctttagcgcgccgactaacccgcgcaccgccgcgtttttgagtaaagtgctgtaa

SEQ ID NO: 183171 - DNA, 240 bp, Klebsiella oxytoca
atgttgcagcgaactttagggagtggatggggcgtggtgctccccggcgtactgattgccgcgcttgggtttgccgatttgtcggttgatgcctggcgcgcattggtggcgctgggaatgcttatgtcagcgatgatgatttggcaccgtcagctgcgacatttcgttttgctgccgtcatgcgtggcgttagtcagtggaatgatgctgattataatgaatgtcaagctgatgggataa

SEQ ID NO: 183172 - DNA, 222 bp, Klebsiella oxytoca
ttgacgcttgtcgtctttttagcgttattgattagcaggcgatggttttttgttttttattacgccaataacggtttattaagtgaggtttttagcgccttcaccgcaatcaatgaaggcgctggcggagcttacatgctggagaagacgttcataatgatgccgccggagatgatcagcaccatggcgaggatggccgggatatccggtttttgcttatag

SEQ ID NO: 183173 - DNA, 1008 bp, Klebsiella oxytoca
atgagcaccagccaaactattctgaccggcgaccgtcctaccggccagctgcacctcggacactacgtcggttccctgcgccagcgcgtgcagctccagcatgaccaccagcagtttatcctcgtcgcggatctccagggactgaccgacaacggcagcaatccgcaaaaaatcagcagcaatatccttgaggtgatggccgattatctcgccgtcggcatcgatccgcagaagaccaccatttgcctgcaatccgccctgccggcgctggccgaactcagcgcgctgtatatgaatatcgtcaccgtcgcccgggttgaacgtaatccgacggtaaaaaatgaaatcgctcagaaggggttttcccgctcgctgccggtgggatttttagcctatcccattagccaggccgccgatatcaccgcctttaaggccgaactggtgccggtcggcgacgatcagctaccgatgattgaacagaccaacgagatcgtgcacaaaatgaatagcctgacgacgacgccgatcttacggcactgcaaagcgctgctcagcgacgtcagccgcctgccgggcatcgatggcaatgccaaaatgtcgaaatcgctggggaacacgctcaccctttcggccagtgaagaggagatccatcgtgcggtcagcgccatgtacaccgacccgaatcacctgcgggtcgccgacccgggtcaggtagaaggcaacgtggtgtttacttatcttgatgccttccataccgataaaaccttcgtggccgagatgaaagcccactatcagcgcggagggctgggagacaggcagtgcaaaaacgcgctggagacctgcttacaggagctgctggcgccgatacgcgaacgccgggcgacctatattcaggataaaggcatgctgctggcgctgctgcgccggggaagcgagcgggcgcatctgctgacacaacggacgctgcatgaagtgaaacgcggcctggggctgccggtgctgttctga

SEQ ID NO: 183174 - DNA, 696 bp, Klebsiella oxytoca
gtgactcggattctgacagcgattcggattctgacagtgattcggattctgacagcgattcggattctgacagtgattcggattctgacagtgattccgactctgacagcgactcggattcagacagcgattccgattcggacagcgattcggattctgacagtgattcggattccgacagtgattctgattccgacagcgattcggattctgacagcgatgctgactctgacagcgactcggattctgacagcgattctgactccgacagcgactcggactctgacagcgatgccgattccgacagcgattcggattcggacagcgattcggactctgacagcgatgccgattccgacagcgactcggattcggacagcgactcggactctgacagcgactcggactccgacagcgactcggattcagacagcgactcggattcagacagcgactcggattccgacagcgactcggactcggatagtgactcggattcggacagcgattcggactccgacagtgactccgactctgacagcgactcggattccgacagtgattcggattctgacagtgactcggattctgacagcgattcggactctgacagcgactccgattccgacagcgactcggactctgacagcgattcggatatcccgcaggccaatgcggataccaataccgcgctga

SEQ ID NO: 183175 - DNA, 462 bp, Klebsiella oxytoca
atgatgtatccggagttccggctgggctttttagtggtccccgagcatttgcgtgaacagtttgccatgacgaaatattacaccgatctctgtagtgggtatctcgaacaggccgtcctggcccgtttcatcagcgaggggcactatgccagccacgtccgtcgtattcgcaaagcctgttttgagcgaaaaagcgcgctggaggcggctattgcccgctactttgccgggcgcatggtcgtacatccaacggattcgggtattcacatagtctgctggctatcagcgggtttaaaggcagaagaggtcgtcgctaaggcgcgccagcaaggtttcggcgtgcagacgtttgagcgctattgtcagcggccgatgtcgcgcgagggcgttttattcggttttgcaaaccatcccccagcggttttgaccgagggaattcgccgcctggctgcgatgttttag

SEQ ID NO: 183176 - DNA, 243 bp, Klebsiella oxytoca
atgcagcagaacggttacattcctgacacggctaacgctattgcccactacttcaataaagcgtcgttaccttcgcagcaggagacgttagggcagattgtaatggatatccttaatgaaggacgcaacctgaatcgcaaatccctgtgtacgaaactgctgggtcgccttgaagtggcttcagaacctgaagaagaaaaccattatcaaacgttgattggtctcttgtttgagcatcagtga

SEQ ID NO: 183177 - DNA, 732 bp, Klebsiella oxytoca
atggcatattacagcatcggtgaggttgccgaacgttgcggaatcaaccccgtgactttgcgtgcatggcagcgaagatatggtttgctaaagccgcagagaagcgagggaggccaccgccagtttgacgaggaggacgttcagcgcattgaggaaatcaaacgctggatcgatcgcggagtctccgtgggcaaggttaaggcgcttctggaaggccatcaacctgaaacgcaagacgctgccgtcctgctccaggaagagatgatgacgcttctgcgaggcgtccagccctcaaaattacgcacccgcatcatgtccctcagccatgaatatcccgtagataaactgattgaccggctctttgtccccgtccgcagtaagctcaatctcgatccgaatacctccatggcgattatcagtatgctggacggtatcctgattgattgcgtagcgtccattcttgcggaatcgcgcaaaaaggtggggaaagagacgctgttggtggggtggggtaatgaagaccgtacccgtctgtggctggaagcgtggcgtttatcgcagcgcgcctggcacgtcaacgtgctggcggagccgctggattctcctcgcccggaactgtttcctggtcagcacatttttgtctggaccggccgcgcgctgacccccttgcaggcagaattacttagccactggcaaagccagggcttcaccattgagtttcacggagagtaa

SEQ ID NO: 183178 - DNA, 753 bp, Klebsiella oxytoca
atgcagagcagaaccgtttaccactggcagagccggcgggatgatcgggcgataaccctgcgtatccgggaaatagcggaaacccggatccgctacggttgcccgcgtattcatattcagcagcggcgggaaggctggcctgttaaccacaagaaaacacaccggatttactgtctggaaggcctcaacctgcgcagaaaacgcccgcgcaggcatgtcagtgcagcacatcgtcagcaacgtccggtcctgaccggtgtcgatcagtgctggagtatggatttcgtgtcggataacctgtttaacggacgacgtttccgggcgctgactgtagtggataattttagtcgggagtgtgtggcgatccatgccggaaagtcgctgaaaggtgaggatgtggtcggtgtgatggaagggttgcgggtgctgggcaagcgcctgccggtacgtattcagacagataacggcagcgagtttatttcgaaaattctggataaatgggcgtatgagcacggtgtcacaatggacttctcccgccccggaaaaccaacggataacccgtttattgagtcatttaatggcagtctgcgggatgaatgcctgaacattcactggttcctgtcgctggaagatgcgcaggacaaactcgacaactggcgcagggaatataatcatgagagaacgcattcatcattaaatgacatgactccggctgaattcatccgaagtctccggaaagacgaagatctctga

SEQ ID NO: 183179 - DNA, 198 bp, Klebsiella oxytoca
atgcgcggactgatatattattggaaacagatccctacaaaagaggaatatttaaaaaaatataatttgaagtcactgtcatgctataaatgtggctctgatgatttgctcaatgttggattaattcatcctgtagataatcgtagaagagtgatttgcagaaaatgtaagtctgaactttatcgggaagaagattaa

SEQ ID NO: 183180 - DNA, 1029 bp, Klebsiella oxytoca
atggtactgaaagatttcatttctgacgaacggctggacatctatgaaaagcatctgaaggttgaaccccatcaggtaatgtcggcatatcactggaataaagctcttgctggcgccatgcttcccgcacttcagtgtcttgaagttacactgcgaaatgcgttggatcaggctatccgcactacaccgcttccgggggcaaaaggtctgtggctaacggatcacaactggatcttctccctgcctcgttacatggggaagaaagcttatcccagactctggaagcggtacaagatggccaaaaagcccggagaccctcaggatccccagggagtccttctggatcaatatggccaccggattattgcccgaaaggtgaaggaggaaagcctcatcgaccaggccagagacacgatcgtcgcagaaggcaaaacaatcacgccggcgagggtgattgccgggctgagttttggtttctggactacgttactggggacgaaatatgaagacagtaaaagtcagtcactgctgtggccaacccttgagaacgtggtgtttcctcaccgccctgtaggtcataatatgtccgatatccggcaggcttttcaccgtattcgcgagctgcgtaaccggttatcgcatcatgaagccctgtggaagtttcattatgatgatcccgccaccgggcgccctgattatagccagccagtttatggtgctcatgccagttgcaacctgctgaggaaacattatgacgatatcctcgagatgattggctggataagtaccgatcgtaaaaccaactttctgaatcactcagcaaatcttcggttctacgccctgtgctcggtagacgggctgaatagctatattgagcctgaaaaagtaacggctaccataaaagtttctcggggcggtagggggatcaacaagctgataaaagtactcaaaaaaaatgagtttgtccggctcgtaaagggcggtgagacaatccttaccatcggctcagacaattctatcctgatttaa

SEQ ID NO: 183181 - DNA, 300 bp, Klebsiella oxytoca; identical to SEQ ID NO: 98238

SEQ ID NO: 183182 - DNA, 687 bp, Klebsiella oxytoca; identical to SEQ ID NO: 98237

SEQ ID NO: 183183 - DNA, 135 bp, Klebsiella oxytoca
atgccaaaccggtgcgctaaccggctgaccttcagtggaatacatcacgccgatgaactcaaaacgtggggcgtggcgagcaatcgcctctgcccggactggattattaacaactttgcacgctttggcggctga

SEQ ID NO: 183184 - DNA, 234 bp, Klebsiella oxytoca
atggaaaaacgcatgaccgtgaaagcctttatagaccgcttgtcgcagtaccccgacgacgcgctgtgctgcggcacgttctggctggccgatgattttctctcactggacggctcgctcacggaaggcgacatcgatgcagcgatggagcgggcgcaggacagccatgatgcgaatgacggatttaactggagccacctgcaggcggcgattgatgaggtaaaacgtgtatga

SEQ ID NO: 183185 - DNA, 336 bp, Klebsiella oxytoca
atgaatacctggctggtcggctttgccgttgaaatcagcggcgtggaattgatggtgcatcacatgatatcagcaaccggcctggcgcaggctgaatcgggcgcgatacagatgggccggacgtggtgggacagtctgctgctcgaggatgaccgtcaccgctggcaatatccggatggcgtggtctggtttaacagcatcatcctgctcgatgacgtggagagcagtatcctgcgcggactgaagtttctggatacgtgggcagtaaccggcgtaacggatacgcccggcctctgcgatgagtacggaaatgactggcgggatatcacacgctga

SEQ ID NO: 183186 - DNA, 702 bp, Klebsiella oxytoca; identical to SEQ ID NO: 181246

SEQ ID NO: 183187 - DNA, 396 bp, Klebsiella oxytoca
atgccaagggttcaagtgtatataagcgatcaggctgttgagaaaataaactcgataatcgagaatcgacgttctggtggggctaaggataaggatgttaatttttcaagtataagttcaatgttgatagagttagggcttagggtgtatgaggcacaaatggaacggaaagagtcgggttttaatcagatggcattcaataaggctctgtttgaatatgttgtaaaaactcagttcaccatgaataaagttatgggaatggagtgtctcagtcctcatgtcaaagaggacccgaagtggcaatggaaaagcatggttcataatatccaggaagatgtgcgggaagttatgcgtgcttattttcctgaggaggctgaggatagttctaatgattag

SEQ ID NO: 183188 - DNA, 687 bp, Klebsiella oxytoca
atgtatccgatggatcgtaaagaaaaagacacctgccgtcaatccctcgcatcttctcttgaagtgctcataatgaactattcttttcccgtttgcattcatgatcagtcaggagatttcccggcattcaacgcagcatttctacacgagtttgggggtgggcttaagtctgaaaggaaatgggaagagttcataggtacagaaacctttcttgatatgcgtgagttagagttaatgacgcaaattcaacaatccaacttccatattgaacgatgtatttatatcaatgggaaacaatttgatttcatgattgaagaattcatcattaatggatgtgtgtgttttctgtggaagtttggacaggcaacaagctccaataaaaaaatcaggcgctcactccctcttcacgcggatatcattagcttcatgagagctgtaagatctttggataaacatgaatacgactttttggggttttatgcgggcggtgccagtcataagataataggccaatttcttggccgtgagaatggttcgtccagaaataaaagtagtcagatactaaaaaaactcaacatcggtaatcgggatgacgccttcattgttattcatcttagtgatttgatggaacctataatgaagaatgtcagagatataatagctagaaatgtaaataaattgttataa

SEQ ID NO: 183189 - DNA, 159 bp, Klebsiella oxytoca
atgatcatcaactcgcagttgaacttcagtacctttaactctaccacttctgagagtcgccaataccagcttctgataagtttcatcgtcacaggtaaaaacaactgcactacctgtagcaggacgattaacaagtcgtttcaccttaagccctcatag

SEQ ID NO: 183190 - DNA, 225 bp, Klebsiella oxytoca
atgaaaacaaagagaaataatccataccccgatgaaaccggtaatgcggttccggtcggggagcctggtgcaggaaaaacagcgttttcatcagaactgattttcgcccgatcggatgtcactcagcttaagcgtgttgacgaagcgatgagtccgggagagcgggataaatttgtccggacgattaaggcaaacactctgttcaggatgaacctgaaaaaataa

SEQ ID NO: 183191 - DNA, 564 bp, Klebsiella oxytoca
atgaaggaattaatgctgttaattcctctgagcagcgctttgctcttaaccgggtgcgcgggcacagagacggaattcgaatgtaatgccacgacatcggatacctgtatgacgatggagcaggcgaatgagaaagcgaaggcccgggaggaaagcgccgcaaagccggctgcggccgggttgcctcgactggctgacggcaacttccgcacgctgtcgcaggtatcgtacccgctgccgccgcaaccgaccctctctgcaaccggcacaactccagtgtcaacggcggcagtgaaaccggcaggcatgctgagcgcgccgccagtacacccggtgcaaaacgccagcaatcggaccgcgccgctcactgccacgccggtcagtcagacatttcgttcacctgtaacgctgccgggcaattatccccgcccactcaggaagggagaacagacggcctccctctggatagcgccgtatatcgatgctgaagacgtctatcaccagcccaccacggtgttatttgtggtgacgccatcggcatggggccagccccgaattaactaa

SEQ ID NO: 183192 - DNA, 138 bp, Klebsiella oxytoca
atgactgaggcttttaaatatacctggctgcttctgaaagaagagccggtatacataccactgattttcatgattacgggtactggagttatttctgtttttttttgttctgaaggatttcaggtcatggtggagtaa

SEQ ID NO: 183193 - DNA, 327 bp, Klebsiella oxytoca
atggaagagagaaaatcgtatggaatggtgatgctgtttgtcagcgtgtttgttgtttttctggtgagcattatgtcttacagcctgtggcgggacaaacagattagtgcgttcaggacgaccaatcgtgcctggggtatccagtgtgaccggatttctcaggccgcctgggtggtgaaagcgggtgagcgggtcgatttagaaatggaccatctttttttgtattgcgagggcgaccattttgtcgggcgcgatgatgccggcagacgctccatcactctcgataaattcatcgtctatcagcacatctcacaccagccacactga

SEQ ID NO: 183194 - DNA, 2871 bp, Klebsiella oxytoca
atgacgccacttgaaatctacaccatcgccgggggcgactggctgcggggtaatctcaatgccatcgcggcgttcatggggaccgccacctggtcgtccattgagaaaatgtgcatcgcgttttcggtgctgattgtggccgtcagctgggtgaaaaaacacaacatcatggaccttgtcggctgggtgttttccctgaccctggtctcgatgctggttgtcgtccgtacacctgtacagataatcgactacagcaacgtggcgcaggtctacaaagtggataacgtcccggttggtctggctattccggcatcgctgaccacgcgtgtgggtaatgccctggtacagagctacgagatgattttctccctgcctgacagtgtgacctacagtaagaccgggatgctgtttggcggaaacctggtggcgaaaagcaccgattttgtttcgcagaaccccgaaatcaccaccctgttctccgactatgtccagaactgcgtgatgggcgatatctttctcaacggtaaatacacccttgaggagctgatgaactcctctgacccgtacacgctgatattttcaaagcccagtccgctgcgtcaggtacccaatcacgactataagtttcttgaaaagccggaactgggctcggcctttatcagttgccaggtggcagcgacacagcttaaacaacggctggcgctcgactcccagactggcgggaagacctggagctactatgcgcgccagctgttcggtggcaaacccaatccggacctgctgttcagccagatgataggcgacagctacggatacttctataacgccagccagagtgccgggcagattatccgccagaacgtcaccatgaatgcgctgcgtaacggtctccagagctacgcgtcccgcagcggcgacacggcaagcctcgtgaacatcgccaacaccacgtcgctggaaaagcagcgtctggcacaggccacgatggggcatcaggccctgcgctctctgccgatgatgcagacggtgatcatgggcatcatgattgggttgttccccatactgattatgagcgcgatgttcaacatgatgacgctgcaggtgataaagggctacgcgtttgccctggtatggctacagtcctggccgctggtctactccatcctgaacagcgcgatggcctactacgcaaaacagaacggtgtcccggtggtcctctcagagctctctcaggtgcagctcaagaactcagatattgcgaccacggccgggtatatctcgatgatgataccgccgctcacctggtatatggtcaagaacctcggggccggcttctccagtgcttacagccactttgcctcctcgggactcagttcgacgtctcaggcggcatccggtgtcgtcgatggcaactattccttcgccaatatgcagatggagaatgtcagcggctacaactggggcaccaacagttcaaccagcttcgggcagatgtcgcggcagcttgggaacggaggcatggaaacacagaccggggacgggacgacactctgggatgcgcgctcctctaagattccggtggatatcaacgtcagccggcaactggccagtgccaatcaacagatggcccgcgagacagatgtgcaggcacagagtcacctgcatggttataacagcagcgtgacgagcgcctggaacagcctgaagcagtttggcacaaatatgggtaccagtgcatcgacgacgagtggggccgataatactgagtcgtcgcaggatgcgaaaatggccagtcagatgatgaatgcttcaaaggcattctcgaaagcgaccggcatgagagatgagcagtcgttccagcatctgatggacgagtcatcaagaggaacgataacgggcgaggcatacggcggcattcagtggaacacgggtgatcagctgctcggaaaagcgggaaaactgtttaccggcgccagtgctcagggggggctaaaactttcggccagtggttccggaagtaccggttcaactgattctgtggggcagtcaggaagtcgctctcaggacagtcgtcaggatgccactgctcaggcagcaaaagatttcaaagagagttacgattactttaatagccgtaaaaccactacatcaggaaatgttactgataataatgccagctcgcgtgttgaccagtttgccgcgtcactctccagtgccaaaaacagctatgaccagtatacaaacagccggacacgtagtcatgaatacagtgagatggcatcgcgcacagagagtatgagcggccagatgaacgaaaatctgactcagcagtttgcgagttttgttcagcagcgtgatccacacaatgccagcaatattctgacgaacacaacctctccggagatcgccgcgcaacgtgaagctctggcgcgtgaattcgtcaaagcgcaggttgaaccaaagattgatggtgcttatcaacagggtcgcgaaagcattggtcagaatatgcctggggtgtccggtgggagtgatagcagtaccgtgatggcggattacgggcgtaatagtggtaatattaatgagatgacaagggatgcagggattaaagagaacgtggcccagagcgtcgaagggatgattgctgagaataaacaaactcatcaggaaaccagtcagaagatagaccagcagggtggtgatgtgagaaaacagcagaccgatctggaaaaccaccacaaaacagaaggaaataattttacgggtgaatataataaagatattgacaatcagaaggaaaatccgatctggaatacaacaaggaaattcaaagaaagagcggaaaaacaaacggaaaaatttaataaataa

SEQ ID NO: 183195 - DNA, 441 bp, Klebsiella oxytoca
atggtctggatggttggcttgcctttgatattatatgggtggaaaatgtttcttttagatccgcctaatgttgcacgtactgccatcgcagcttcggtcgtaattggatttgctgccgggctttttatcatgctaaacgttgttaacgccagggctttatatctttcgatccccgaatcttttcgcgacacgtcagtgctgtgtcggtttatttccaccaagttcagggggtacctgtttacgtacctgatcggctatgccacgctgatcgtgatatgttcgctctttgtttatggtccgatttactcctgtatcttaactattgtgttgtcattcggccttatgatttacatgaatgtcgatcttaatcgctatcaactgaccgccctgacctcgttgctggaatctatcaagggtaaagaaacaaagacagttcaatga

SEQ ID NO: 183196 - DNA, 5262 bp, Klebsiella oxytoca
atgatgtcgattggctccgtcaagtcggccgggagtgccagtaattactatacagacaaagacaattactacgtcatcggcagcatggaggaacgctggcagggcaaaggggcggaagcgctgggtctggacggaaaagcggtcgacaaggccgtgttcaccgaactactgaaagggaaactgccggatggcagcgacctgacccggatgcaggacggcgccaataagcaccggccgggttatgacctgaccttttcggcgcccaaaagcgtgtcggtgatggcgatgctgggcggtgataaacgtcttatcgatgcccacaaccaggcggtgacggtagccgtgaaacagctggagactctggcggcaacccgtgtcatgacggacggaaaaagcgaaacggtactgaccggcaatctgattgtggcgaaattcaaccacgatacgaaccgtaatcaggagccgcagctgcacacccatgccgtcgttatcaatgccacgcagaacggggacaagtggcagtctctcggcaccgatacggttggtaaaacgggttttatcgagaatgtgtacgctaaccagacagccttcgggaaactctaccgggaggcgctgaaacccctggtggaaaagctcgggtatgagacaaaggtggtgggcaagcacggcatgtgggagatgaaggacgtgccggtagaggcgttttccacgcgcagccaggagctcagggaggcggcaggacccgatgcgtccctgaagtcccgggatgtggccgcgctcgatacccgcaagtcgaaggaagccatcgatccggcagagaagatggtggagtggatgaacacgctgaaggagaccggcttcgacatccgtggctaccgtgaagctgctgacgcgcatgcagcagagctggcccgcgcacccgtagcgccggagaagaccgacgggccggatatcacggatgtggtgacccgggccattgccggtctcagcgaccgcaaggtgcagtttacgtatgccgatgtgctggcgcgcacggttggccagctggaggcaaagccgggggtgtttgaactggcgcggacgggcatcgatgcggcgattgaacgggagcagcttatcccgctcgaccgggagaaaggcctgttcacctcaaacattcacgtccttgatgagctctctgtgaaagcgctcagccaggaaatccagcggcagaaccacgtctccgtcacgccggatgccggtgttgtgcgcgaaaaacccttcagcgatgcggtcagcgtcctggcgcaggaccgtccggcgatggggattgtcgccggtcagggcggcgcggcaggccagcgggagcgggtggccgagctgacgctgatggcccgggagcaggggcgcgacgtgcatatcctcgccgccgataatcgctcccgggaatttcttgccggggatgcgcgactggccggagaaaccgtcacaggcaaatctgccctgcaggacgggacggcgtttatcccgggcgggaccttaattgtcgaccaggcagagaagctgagcctgaaggagacgatttccctgctcgatggcgccatgcgccataacgtgcaggtcctgctctccgacagcggcaagcgcagtggaaccgggagcgcgctgacagtcctgaaagacagcggcgtgaacacctaccggtggcagggcggaaaacaggcgacggcagacatcatcagtgagccggacaagagtgcgcgctacagccggctggcacaggagtttgccgccagcgtgcgcgaagggcaggagagcgtggcgcaaatcagcggcacgcgtgagcagaatgtcctgaacaacgttatccgcgacaccctcaaaaatgagggggcgctcggcaaccgggacatggcggtgaccgcgctgacgccggtgtggctggacagtaagagccggggagtgcgggacttttaccgtgagggcatggtcatggagcggtgggaccctgaggcccgaaagcatgaccgctttgtcattgaccgtgtgacggccagcagcaacatgctgaccctgaaagaccgcgagggggagcgtctggacctgaaagtctccgccgtcgacagccagtggacgctgtttcgcacggataagctgccggtggcagagggcgaacgtctggcggtactcgggaaaatccccgacacgcgcctgaagggcggggaaagtgtcacggtgctgaaagcggaagccgggcagctgacggttcagcggcccgggcagaaaaccacgcagacgcttcctgtcggcagcagcccgtttgacggtatcaaggtcggccacggctgggtggagagtcccggccggtcggtcagcgagacggcgaccgtctttgcctcggtcacgcagcgcgaactcgacaatgccacgctcaaccagctggcgcagagcgggaaccatatccggctgtactcggcgcaggacgcggcccgcaccacagagaaactggcgcgccacaccgcgttcagtgtggtctcagagcagctgaaggcccgctcgggagaagcagacctggaggcggccatcgcacagcagaaagccggactgcataccccggcagagcaggctgttcacctttccatcccgctgctggagagcaacagcctgacctttacccggccgcagttgctggccgcagctctggaaaccggcgacggcaaagtcccgatgaaggacatagaggcaaccattcaggcgcagattaaggcaggcagtctgctgaatgtgccggtggcctccggccacggcaatgacctgctgatttcccgccagacctgggatgcggagaaaagcgtcctgacgcgggtgctggaaggtaaggatgcggtggcaccgctgatgggccgggtgccgggcagcctcatgacagacctgaccgccggacagcgtgcggcaacccggatgatactcgagaccccggaccggttcactgtggttcagggctatgccggggtggggaaaaccacgcagttcaaagctgtgatgagcgccatcagcctgctgccggaagagacgcgcccgcgcgtcattggtctggggccgacacaccgcgccgtgggcgagatgcagagcgccggcgtcgacgcgcagacgaccgcctcattccttcacgacacgcagctgcagcagcgcaacggccagacgccggatttcagcaacacgctgttcctgctcgatgagagctcgatggtcgggctggcagacaccgcgaaagcgctctccctgattgcggccgggggaggccgtgccgtactcagcggcgataccgaccagctgcagtccatcgcgccgggccagccgttccgtctgatgcaacagcgcagcgcggctgatgtggccatcatgaaagaaatcgtgcgccaggtgcctgagctgagaccggcggtctacagcctgattgaccgggatatcagccgtgcgctgtccactattgagcaggtcacgcctgagcaggtgcccagaaaggacggcgcctgggtacctgaaaactcggtcacagaattcacgccggcacaggagaaagcgatacaggatgcgttgaaggagggtaaggaaataccgcctggcacgccagtgtcccttcatgatgcgattgtgaaggactacaccgggcgcaccccggcggcgcaggcgagtacgctcatcatcacgcatctgaacgcagaccgccgggcgctcaacgggctcatccatgatgcgcgtgtacagaatggcgaggtcagtaaagaggaggtgaccctgccggtactggtcacgagcaatatccgtgacggtgagctgcgtaagctgtccacctggtcagagcatcagggggcagtggctcttctggataacacctaccagcggattgagagcgtcgataaggagaaccagctcatcacccttaaggacaatgagggtaacattcgtcttctctctccccgggaggcctcagcggagggcgtcacgctctatcgcccggagcacatcaccgtctcacagggtgaccggatgcgcttcagcaaaagcgacccggagcggggttacgtcgccaacagcgtgtgggaggtgaaaacggtctcgggtgacagtgtcacgctgtctgacggtaaaaccacccgcacactgaacccgaaggccgatgaagcgcagcgccacatcgaccttgcctacgccatcaccgcccacggcgcgcagggggccagcgaacctttcgccatcgcactcgaaggcgtggaagggcgccggaaagcgctggtcagctttgagtcggcctacgtggcgctgtcgcgcatgaaacagcacgcgcaggtctacaccgacaaccgggagggctggaccacagcggtcagccgttctcaggagaaggccagtgcgcatgacgtgctcgaaccgcagaacgcccgggcggtgaagaatgccggtcagctctatggtcgtgcacagccgctggatgaaaccgccgcaggccgcgctgccctgcaacagtcaggtctggccagaggccgctctccgggtaaattcatctcacccggtaaaaaatacccgcagccacatgtggccctgccggcattcgataaaaacggcaaagaggccggtatctggctcagtccgctgaccgacagggacgggcggctggaggccatcgggggcgaggggcggattatgggggatgaaacggcccggtttgtcgccctgcagagcagccgcaacggcgaaagtctgctggccggaaatatgggcgaaggcgtcaggattgcacgtgataaccccgacagcggggtggttgtccggctggccggagatgaccgcccctggaacccggaggccatcaccggcggtcgcatctgggctgatcccctgccgaatcctccgctccctgataccggtactgacatcccgctcccgccggaagtgctggcacagcgtgctgcagaagaggcacagcgccgggagatggaaaagcaggcggaacaggccacccgggaagtagccggggaggagaagaaagcgggcgagccaggcgagcggataaaagaggttatcggggacgtgattcgcggtctggaacgtgaccgcccgggcgaagagaaaacacggctgccggatgacccacagacgcgacgccaggaggccgcgatacagcaggtcgcctcagagagtctgcagcgcgagcgtctgcagcagatggagcgggacatggtgcgcgacctgaaccgggagaaaaccctcggcggcgactga

SEQ ID NO: 183197 - DNA, 726 bp, Klebsiella oxytoca
atgacaacacatgtaatacgcgtcagcgccgcagaccgctggcttaaggctctgctggcctggacgcccgggcagacagatatcatcaaaacggtggcgctggttctgatggttattgaccacacgggactcctgctgacccataacaacgagctcatgcgcctgctggggcggggctgctttccgctgttcggtctggtctgggggatgaatctggcccggcacgcggatatccgccagtcgcagctgaacagcctctggggctgggcgctggtcgcccaggtgccgttcatgctcatcggatatccgtggtacgcagggaatatcctgttcgcctttgccgtcaccggtcaggcgctgcggtggttcagcctgccgttctggcgttacaccttcgccgccatggccatcgttgccgtctggataccgttctcctgtggcagctacggcatggccggggtggccatgctcaccgtcagctggctgctctgccgcgcacagacttcgcgggagcgactcgggtgcggggtgttgtgggccatcatggtgttactgatgaacccgaatgacgccggtgaatcactggccgggctggccatagcgattctcgtattaatggtgtgttcatcggtcggaggggagattaaacggttctggccacggcatttctttgtgatgttctatgccgtgcacctggcggtgctggggatagtggcgacgatgtaa

SEQ ID NO: 183198 - DNA, 591 bp, Klebsiella oxytoca
atggcagaagaaaaacgccctgtactgagcctcaaacgaaagcctgcggcggaaagcacaggaacggatgtcacaagcacaccgggcgtcgttcgccgcaaaaaagtcgtggtggtctcgacgccgcccgcctggaaggtcaagaaagagaagctggagcaggcgaaaaagactgccgaagccgctgcacgccagacagcagaagaagcggtgaaagcagcaaagactccgcctcctgttcgttatcttcagctgctgccgccggagcaggctatcatgaccctgaaggcgttctggccgcagctgtttgagggtaacgccccgcgcctgctggcaaccgggatgcgtgaacagctgtttgccgatatcgcggagcgcgacctgccgctgtcgcataagcaggtgattaagtgcctgaaaagcctgacccggtcggcgggttatctgtcccggatgcgggaaggtacctcccgctatgacctgcagggaaatattgtggccaccgttacagccgatgaagcgaagtacgccggtgagcgtatgatgaaagagctgctgcgggctgaacgaaagatgagtcagaccctttaa

SEQ ID NO: 183199 - DNA, 630 bp, Klebsiella oxytoca
atgactgtccgtgctgacagattctggatgatgatgactgaaaaaattattgctctcgtagattatgaaaatattggtacacttgaaagtatcagtctgtcccgttatgaacgtcttattttatttaccgggcctcagcaggagtttatacgttttccagctgtaacgtatgcaggtgatatatcggtaagcgtattccaggttgcgaatgtgtcaaaaaataatgtggacttccatctggtgtttgaactgggaagacttagcgcgactgcaccggaagagacgatatttcatattatctcgaatgataaaggctatgatggtgtgattgacgcgctatgcagggcagggagacgatgttgccgtatatcattaccgtactctgcagagaagccgaagacggcacctgtggtaatcagtaacgatgaagtactgcgcctgaccgataaagtccagtcattaagtaaaaaatctgcggggaaccgccccgcgaatacttcatccctgatgaattatattaaatccctgtccggtaatacaaaaggcatggcgctttatgggcgcgttaaggaggaattaatcaggcgtggtgtgattgccgtgtatgagaaaacagtggtctggcgataa

SEQ ID NO: 183200 - DNA, 651 bp, Klebsiella oxytoca
gtggcgaaattcttaatattgggtggtgcggtggctatttttctcggtctggtctgtctgctgggacttattctgaaaagaagggggacgggtgaaccttctccctctttacaggcactcaaagaggccggttttcagccttccgaagctgagagtctgctgtgtcgtcagcacctctgggaaggcaacaaagttctgctgacggcaaaggaacagcgtttttttaccgcattattaagtgtggttaaccgcgaccgctggttgctgtgtccacaggtgagagtggcagacctcgccacactttccccgcgaataaaacaacgttcaaggatgtggtggaagttattcagtatggcatcacagtggcactgcgatgtggtagtgattgaaagcggtacattcgagattgttgcggcaattgagcttgatgatgcctcgcatctgaaaaagcaccgcatccggcgcgatattcttctggaagagatactgaaacagtcggggattcccctgctgcggggatggaactcagacaagctggtcgaaaaggtcagtgaattcctgacaaacaggatggaagaaaagacggcagcaccagcagacgttacggaaacagcaaccggccagacagagcacaaggagagcaaaaaatga

SEQ ID NO: 183201 - DNA, 309 bp, Klebsiella oxytoca
atgattatcgccgccgaagtaaaacgtgatgaacagggggactggacgcatcctgcgctggcgcgcagcggctgcgaaaccccggcagaattccgctactggctgaaaacccacggactgctgtgcttcgtgatgacaatgcgcgatgaagcgcctgaagcgtttgctgacggattaactgatgaagccccggatgcccgtggctggataccggagctgccggatgaggatggctggttcctgggctctgtccacgcgacctgcgacggtccggtctgctactggttccgacagaccacaaaagcctga

SEQ ID NO: 183202 - DNA, 558 bp, Klebsiella oxytoca
gtgaaaataaatcgtactctccgcagatggtgtctgcccgggctggtcagcctgagcctgtgcgcacccttaccggccgtttatgccgcgaacatcgagaccgggttttccccggaagggacagccctgcagctggttctgaaaaccattacgaccgcagaacaggaaatccggctgatggggtattccttcacgtctccggatgtggccggtgcgcttgtcagagccagacagcggggcgtggatgtgaaagttgttctggaccacaaagccaataccggcgagcgcaacaaagccagccgggccgccatgaatctgctggtcagcgcgggtattcctgtccggacagtggatacctataagatcctacacgacaaagtgatcatcgctgacgggcgtaatacggaggtcggttcgttcaacttcagtcgggctgctgaccgttcgaattcagagaacgtgctggtcgtgtgggatgaccctgttgtagcccaaagctatctgcagcactggtcatcccgctggtcgaagggaacggactggaaacagacgtactga

SEQ ID NO: 183203 - DNA, 258 bp, Klebsiella oxytoca
atgtcgcagatcgaaaatgcagtaacttcctcatcgaaagcaaagcgtcagtatcgtaaaggtaaccctcttaccgatgctgagaaacaaagacagtcagtagctcgtaaaagagccttactcaaagaggtaaaagtttttcttgagccacgacttaaaggatatcttttgagtatgtgtgaacaggatggacttacccaagctgaggttttgactgctttaatcgaaagtgaagcacagaaacgaaaaattagctga

SEQ ID NO: 183204 - DNA, 864 bp, Klebsiella oxytoca
gtgactgacgttcagacgctgttctcacattaccggcaggtcaaaaacccgaatccggtgttcacgccgcgtgaaggaaagaagacgctgccgttctgtcgtaagctgatggcgaaagccgaaggcttcacgtcctgttttgatttttccgttcatgttgcttttgcccgttcgctgggtaagcgtcaccggatgccaccgctgctgcgccggcgtgctatcgatgcgctgctgcagggattgtgctttcattacgacccgctggccaaccgggtacagcgctccatcaccaatctggccatcgagtgcgggctggcgaccgagtcgaagggcggcaatctgtctattacccgcgccacaagggcgctaaagtttatggcggagctggggctgattacgtaccagaccgaatatgacccgcagattggctgcaacatcccgacagatatcacgttcaccccggccctgttctccgcactggatgtttctgacgtggcagtgctggctgcgcgccgcagccgcgtggagtgggaaaatctgcagcgtaaaaagcagagcctgctgccgctggaaatggatgagctgatagcgaaggcctggcgctttgtgcgtgagcggtttcgcagctatcagtccgaacgtaaatcacatggcctgaaacgcgcccgtgcgcgccgtgatgcggacagaacgcgccaggatatcgtgacgctggtgaagcagcagctgacgcgtgagtacgccagcggtcgctttatcggtggtctcgatgccatgaagcgggagcttgagcggcgtgtgaaagagcgcatgctgatgtcgcgcggcaacaactacacgcggctggccacagtcccgatataa

SEQ ID NO: 183205 - DNA, 732 bp, Klebsiella oxytoca
atgaaccgcaaacaattcatccagagccggggggccacctgtcgtaactggacctggagctggtcttttatcaaccatgacgaccagctggtcatcttcggggcgtgggacgttgagcgtgaccaggagcgcgctgttatcctgcgtgaagactgggaatacaacgccagactcaggaaaaaccccggctacacccaggcggttgagcatatcggctacatcctcaggggatacgacctgtacaccttcaacatggtgcaggccgcccgtaccgatgcgccggacgtcgcggtcattcaggatttcgaacgccggctggaaaaacgctttctgagaaaagagggcgccgtctggtacgctgactttactgccagtccatatcccgaagagctgtccgtcgccggcagctatatcgagggcgccacaaaatccatcaccatcaatgcgtatgaacgcgacccggccgcacggcgggcctgtatcgcgtatcatggtgccgtctgtcagtgctgcggattcgattttgagagaacctggggtgagcacgggaaaggatttatccacgttcatcatatccggccgctgagaacactcggacctgactatcagattgacccggtcaacgagctggtcccgttgtgcccgaactgccatgccatgatccatcggggcaacgaggcaaagccgttgtccgttgaggaattacgcgccatgatgaggccctccggctga

SEQ ID NO: 183206 - DNA, 282 bp, Klebsiella oxytoca
atgcgcgttgccgaacatatcatcctcgatgcccttactcgcggaggatgcatcaaaaccttctggcgcatatcgtcacgacaggccgctgaatcgtcagcgcggatacctgaggggtatatcctggagtcgcccggtgaacgggaagatatcgtgctcagccatgccgattttcatgcgctggagaagcatctggagcagaaggaaacctgggagcaggtggtcggtctgacctgttttggtggcgcaacctggcagctgagaccgactgtacagagctga

SEQ ID NO: 183207 - DNA, 612 bp, Klebsiella oxytoca
atgacgctgacagaaaaaacaggccatctggcatggtgtgcactggtcgcgctggcactggccagacaggagcagggagagatctctcccgcacaggaaaatctctttctcacccgctggctcgcggcagcactgaagcaacggcgattctcgcgcgatgtggcacaggatatcgggtggttactgaatcaggggcgtttgctgggtgtgagagcaaagctggcagacaaactggactatgtctggcgctcctgcagcggcgagttgactgaacagaacgacatgttccggctgacgtatgcgctggaaacagcgaaagacatgggctggaattaccgcgtaatgagcgacagagaatgggccgggcgatatgccttggtactcaatcctggagtaaacggcgtttatctcttacggacaaacctcgatgccgcttttgacgacaatggccagcagacaaatccgctgacagcacgtctgacagggagcgtagcaggggtaatgaagctgttaagtcgctgtggctggcaggcagagccggagtgtaatatctccctgtcccatcagtttacgcttatggccggacagggagtgccaggaaagggggattag

SEQ ID NO: 183208 - DNA, 162 bp, Klebsiella oxytoca
atgtgcaaatcaccggagcacacgctaataggccgttcagaaggtgagcgtcaggccactctgaaaattgaccgcaccatgctgcagaacggcattgaccgcaataccgtcatgaaaatgaccggtctgactgaagacgacctggcgcagatccgccactaa

SEQ ID NO: 183209 - DNA, 993 bp, Klebsiella oxytoca
atgcctgttcaagacgttattcccccctatgagcagatgtacctgctaaatcagcagctgatctgcaacgctgaccagttcaaacatgccgttatcacagttggcggtcaggctgtgcaatactggatatcctattatcatgcacaatacggcgacagattgcctgatgagcgcctcaccacatctgttgactgcgactacagcgcccggaaagatgatattgcggctatagcaaaaacgctcaacgttaagacgtgggagaacaaagacggtcagcccccatcccttgcgcagtttatgcttatcgatcaggatacacacgatatcaaacgggatgatggacgcttatttgccgtaccggatgcgcctgacgagccaaatgtggtggatattatcgaccgccccggaggctttgaccgttctgattttcaggggaaaaagctttacctgtataccgccccgttttatgtagaagcaaccggccccggcatgcctgaaatgaatgaaaaggtaagggtattgaaccctgttgcctgtatgcgctcgcgctttagcaatctgattgccttgcgccgtgatgctgaaattgaaattgcgcgtattaacgcgctcaagatcccgtgttatttctttctcatcgaacagtttgatgaacagccgttcaaagttgcacgaggaatctttatggatttatggaggctcgcgaatgacgaaagctgtctgcgccatcaggccttctggcatagctggcaggggccgcttcttgaagggcaacaaagtaacaacatcactctgattgatgtgttggaaggcgtacatgtatacctggaagggcatcttgatgactttgaaataccggaagcctttgtcaccaaagaagtaccgctaaagctcgcacagctgcgtgaacgctgggagcgttacgtggtactcaatgctgaatgggcagcaagagggcgcaggggatttgaacgtaatccccgtgatgattag

SEQ ID NO: 183210 - DNA, 156 bp, Klebsiella oxytoca
atgtctcccgtacaagctaaacaaaagcagcatgaacgctacgaagccgtagcggtgcaggttttgcgtggtcgtgccggttacaaacctgccgtgaaaagccgcttcagtaagtcagctagcagcaaattctctcatactatcgcttttgcctga

SEQ ID NO: 183211 - DNA, 372 bp, Klebsiella oxytoca
atgcagcatcccgttagatttggtcgtatagcagccgtaataccagtaaaaaacataaaaatttccagtgaattctacatcaatggactgagtttcaatgatgtttttgcaaatggagaccctgtgggcttcatgatattaaaacgtgaagacgctgagctacatttgactctgcagccacagcacaaagcgccttcctttccagtcgctcaccttcttgtggatgacgcaaatgcactttatacccaatgtcagaatatcggtgccagaattataaaaggcctacaagataaagaatacggcattcgggcatttgttttcgctgatccggatggaaatcgaatagacgttggacagattctgaggaagtaa

SEQ ID NO: 183212 - DNA, 405 bp, Klebsiella oxytoca; identical to SEQ ID NO: 98664

SEQ ID NO: 183213 - DNA, 219 bp, Klebsiella oxytoca
atgacctctagaattatgggcctggttaaatggtttaatgaagacaaaggttttggtttcatctctcctcttgatggcagcaaagatatctttgtccatttgtctgcacttaatggcgacaactttaaaactttatttgaaggtcagaaagttgaattcgccattcaccgcggagacaagggtcctgctgctgcaaacgtaacactttgcgataaataa

SEQ ID NO: 183214 - DNA, 8583 bp, Klebsiella oxytoca
atgaaaatgatccccagagcgtggtttaaccgctcccgtattctgatgaatgctgccgaaaacataacgttttcggcgaacgatcctgccggtgaaagctcgccgcggtcagaactcttttcgaccgtccagatggaacgctacggccagaagctggcgcggactcataaagtatcaccggataggcatccttattatcttctgaaacggcttggcgacaatgaggccgtcattacccaaaactgctatgagcttaacgcgggtaaaaagaccagtatcatgcccgccggtgaatggctgctggacaattattatctgattgaggaacaaatccgcactgtccgccagcatctgccgaaaagctttggcaaaggtcttccgtcgcttgtatcgccgttgaattgcccacgaatttatcatattgcatcagaggccattgctcacggcgatggccgctgggatgccgccagcctgaccagctatctcactgcctatcaacaggtgacgccgctgacgctgggtgaagtctgggcgttaccgggaatgctgcgccttgcgctgattgaaaatcttcgtcgtatcagtatggaagtgataaaagcgcagcaggacagaaaccttgctgatacgtggataacaaggattgtcgaatgtgcagagagtgcgcctggtgatttaatcatggtggttgccgatatggcgcgctcccgacctccgttaaccagtgcgtttgtcgcagagctggtgcggcgcctgcaggggcatggcaacgcgctatcgttacctctgacctgggttgatcagtgccttcgggaacaggggatcaccactgacgttctcatacatagtttcaatcagcagcttgccgccagccagctgtccgtcagtaacagcatcgcgggcctgcgtttattgagtgaaacggactgggctgatttcgccgaaacgataagcgttgtcgaacaggcattacgcaatgatcctgccggcatctatccccggatgcatttcaatacccgggatcattaccggcacgtagttgaggttctggccagagacagcggtctcagcgagcctgaggttgctgagaaggcgctggcgttttcagaggaaaaagcgcctgatacaccggaacatcatgttggttattatcttgcgggcgaaggtcgacaggcgctggatattcatctcctggcagacgcctcaaggctcatacgcttgcggcacagtttcaacagaataaccctgctgtcatggcttggaagcctggcgttgctgacaaccgcagcgaccgcagcaatattgcacgaaaccgccatgcagggcgcagactggctattgatcgcggtgatattacctctgattatcgcattaactcagttaatgagcgatttgctcagtgatgcaaccacccgttttcgcgttcctcgacccttgccggggatggatttttcagccggtattcccgctgacagtgccaccatgttagtcattccctgcatgttgaccagccacgaaagtttcagccagctcctcaccagtcttgaagtctgctggttggggaatgaaaacgaaaatctcaggttcgcgctgctcactgattttgctgattctgaaaatgaaccctcgccggaaagtcacgcactgctcagacaggctatcgccgatacgcaggcgcttaatcgccgctacccctccggccgaccacgtttttatctgttacatcgccagcctgaatggaacccctcggaaggcgcgtggatgggctatgaacgcaagcggggaaaactggcgttactgaacagctggttgcgccatcccggaacgcaattcgtcagcgttgcagagatgcctgcccaccttttaccgggtcacataaaatacgtcattaccctggacagcgatacggtgctcccgcgcgatacggcgcacaaactcgtcgcgacgatggcgcatccgctgaatacgcctgagtatgatccggtacgccagagggttgtcaaaggattcggtattttacagcccggtcttgcggaggagataccacgcaacggtcaggggcgttacgcagccctgcgcagcagcgtaccgggcaataacccttattcgatgatgtcttcggatatttatcaggatctctttggggaaggctcgtttgtgggcaaagggatttacgatgttgatatttttatgcaggccactacgaacatctgcccggaaaatctggtactcagccacgatctgcttgaaggatgctatgcacgttcgggtctgctgagcgaggtgttactgtacgaacagtaccctaataattatctgtcggatgttgcacgacgttcacgctggatccggggtgactggcaactgcttaactggctaaaaccacgcgtcagaaaagccgatggaacccgggtcaggaatccgctgaccgcgctttcttactggaaattactcgataatctacgtcgcagtctggtcgccccctccttactgatattgctgttcttcactctgctttgggtacccaatccggtttactggctgggcatactgttgctgatatggttgttgccagccatcctctgcattagccacgaccttctgcataaacctctgcgtcgccgcgtgaagtcgcatctgttactggtgggggcgggcgcgctaaagcgtctgtcaggtatcagccttaattttgcgatactgccgcacgaagccggatattcgctgaaagcgatcgccgtgacgctatggcgactggggataagcaggcgtcacctcagccagtgggtcagccacagccaggacagcagtcaggccagacccactgttgcacgtttttatcaggcgatgtggctgaacgctgccggtggcgtggcgctgacaatactgaccggacaatttgccccacagctgctggggattgcgttaccgatcggtttggtatggtgtgtggcaccgctgctgatgagctggctgagtcgccagcccgtgcgaaaggttttttcgcctaatcaggaacaaaaacagctgttacgccagacaagccgtgaaatctgggctttttttgaaacatttgccacagcaaaagagaactggcttccgcctgataattatcaggaaataccacaaccgacggtggcacaccgaacttctcctaccaatattggtctttcacttatggctaacctgacggcatgggactttggctacctgcctggcggagaggtgctccggcgcgtgtcgctcacgctcgacacgatggataaaatggagcactaccggggccatctctacaactggtatgacacccgtacgctggtccccctcagtccacgctatatctccagcgtcgacagcggcaatatggccgggcatttattgaccctgcgtgcaggcctgtccgccatgcgtcatcagcctgttttaagcaaccaacagatactggcaggactgaacgatacgctggatattctggaaaaacagtggggtaagaacccacctgacagcctgagactgctgcgcaagcattgcctgaacgcggtgtcgctctctccgcaggcgcttttcagcgaactgaaaagcatgcgcacccagtgcaaccatctgaccagcgcatgtcatcagggatctcctcttcagatgcgctgggctggacatctggagcatcaactggttcagctttgccatgagtggtctctgttgcttggctggttgcctgcatcctggaatgaacagacgctgccgacgctgagcgagcttgcccgtccgacattaaccggtacaggaacgcctccggcgtcagtggcggagcaggcccgaatgcgactcaatattatcaccgagctggaacagcggctggatgagcatgcccggatggatttcgcctttctgtacagtgaagcaaccagtctgctcagcgtcggttataactgtgacaccaatatgcctgacaagagccactacgatctcctgccgtctgaaatccgcctgaccagttttcttgccattgcgactaatcagctgcctcttaaaagctggtacgcgctgggtcgattgtttaccacgattgataatgaaactgccctgatgtcatggagcggatccatgtttgaatatctgatgccgaatctggtgatgcccacctggcccggcagcctgctcgatgaaatgagtcagtcggcggttatgcgccagattcactgggggaaagaacgcggggtaccatggggtgtttcagagtctggctatcatgcttttgatgttcagcataattatcagtatcaggcatttggcgtaccggggctcggtctgcgcaggggacttgccgatgacatggttgtcgctccttacgccacgctgctggcgctgatggtttccccgcagaaagcttgtgagaacctgttcaggctgcaaaaaaatggtgcatgcggagaatacggtttttatgaagcgctggactataccccctcacgtcttgcaaccggtcagctctatgcggtggtacagtcctggatggcgcatcaccagggtatggcatttcaggcgctggctcatgtgctgcttgatgcccccatgactgaacgctttatgtccagtacggtattccggtcagcgagtctgctgttacaggagcgcgtgccggatgcggtcgatctgtacagtccgcgccgtcattttgaatctcatgagggcatggtcaaacccgttcgctatgaaccccgtattttctatagcgtggatacccccgccccggatattcaactcctgtccaacggccattatcatttgatgttgaccgcgggcggcggcggttacagtcgctggaatgatattgtactaacgcgctggcgcagtgataccacccgtgataactggggagcattctgctacatccgcgatacccagacgggagatgtgtggagcaatacctggcaaccaacaggctacaccagcggacaagacgaggaagtgttgttcaccgatgcgggggcagaattcagacgcagcttagggggactcagcgtcaaaactcaggtggtgatctctccggaggatgatgttgaattgcgacggctcacactgattcatcgtggtcgcaaacctcgctctctggagctgacaacctatgctgaagtggtactggcacctgatgtcagcgatctggcacacccggcattcagcaatttgtttattcagactgagctggctcctgagcgtgacgctattctttgccaccggcgcccgcgctcaccggatgaaccgggcccttgcctgtttcacatgatggtggtgcacggcgataaccgacataacgtgtcgtttgaaacggacagggcaaggtttattggacgtggcagaaaccctgcgaatgcccaggcaatagagacgggagggatgctaggcaacacgtcgggctcggtgctggatccgatactggcaattcgcaacgccatcattctgcagccggggcagccggttacgattgatatcatttatggcatcagcgagacccgtcagcagagcctggcgttgctggagaaatatcgcgattaccctatcgccgatcgcgtctttgaactggcctggtctcacagtctggtggttttgcgccagatgaacgccagtgaagatgatgccacgttgttcaatagtctcgccagcgctgtgctttaccctgtccaggagctgcgcgccgaaggccaggcgatcggccgcaaccggcgtggccagtccggactgtggggctgggcaatttcaggggatctgccgatagtgctgctgagtataaccagcgaggaaagtatcacctcagtgaccacactgattcaggcacaccgttactggagacagaaagggctggatgttgatttggttatcctgaataacagccccggcggctaccagcagggattacaaaatcagattatggagttaatttatgccgggtctgaagccagtctgctggataaaaagggcgggctttttgtccggaacggtgagcatctctccgctgaggataagttgcttttgatgagcgtggcctgtctttatcttgatgaccgcgcagggggtattaatgagcagcttaaccagcgtattcataccctgaaatcgccggcaagagcattcattccgcgtgctgtgcgcgagcgtaatcaacatacggactggagccctgataccagtcagttatgccatttcaatgggtacggtggattttctcaggatgggcgggagtatcagatcgtccttcgggaaaatgcgcttacaccggctccctggtcgaacatactggcaaattctcgttttggcagtgtgatctcagaggcagggcaggcctatacctggtatgagaatgcccatgaataccggttgacgccgtgggagaacgatccggtcagcgatcgcagcggcgaggcattttacctgcgcgatgaagagagcggggagtgctggtcgccgacggctttacctgttcgcggacacggtgattacctgacccgccatggttttggctacagcgtttttgcccatcgtgagagtggtatagacagcgagttgacggtcctggttgctgaagaagatccggttaaactggtgctcctgacgctcagtaactcttcgggacggacacgtcaactttccgtcacaggctatgtagagtggacgctcggagaaacacgaacgcgctcagcccctcacattgtgacacatgtggccagaacgcccggcggctgcggggtgcttgcgaataacttttatggtgataatggtggcggccgaactgcattttttgccgtcagcggtaatgactgttctctgacaggggaccgccgggagtttattggccgtaatggttcccttcacgccccttcggccatgaaactgcaaaagctttctggtaagacgggggccggtctggatccctgcggagcggtgcaatcggcggttacattaattgacggggaccagaggacgtttatttttatcctcggcgcagaggagaatgatgtttgtgctcaggagacgctggcccgctacatgaacgaggatacggtccgccaggagctgaaccggattcataatcactggcacaatgttctcgataaaatcgtagttaacacccccgacacgtccgtaaatttactggttaatggctggctgttgtatcagacggtcgcctgccgtcttatggcccggagtggctactatcagtctggcggtgcatttggttttcgcgatcagctgcaggatacgctggctctgagccatgctgctccggaccggatgcgtgaacagataatactctgtgcatcacggcagtttatcgagggggatgtgcagcactggtggcacccgccacacggcaacggtgtgcgtacccgctgttccgatgactatctttggctgccgcttgctgtttgccactatgttgaaacgacgggggatatggatgtactggaaatacgcattccttatctggagggacgctcgcttcagtctggtgaagagtctgtctatgacacgccggtcatcagcggcaccgaagagacactctggttacactgcgtcaaagctattcactatggacttcgcttcggggagcatggcctgccgctgatgggggctggtgactggaatgacgggatgaaccgggtgggtatcgaaggcaaaggtgaaagcgtctggctgggcttcttcctgtacgacattttgcagcggtttgcagcgctggcggagcgcaggctggatgaaagcgtcgccgcgatgtgccgttcacaggctctgcgcctgcaaagtaatctcgaagcccacgcctgggatggggaatggtaccggcgcgggtattttgacgatggtactcccctgggatcgaaaacctcacaggactgccggattgatgcgattgcgcagagttggtctgtgttgtccggcgccgcgagcccgggacggtgcgcaaaggccatgcaggcgctggataagcaccttgtggataacgaaggagggctgatcaaactgttaacgcctcctttcgacggacacggtccaaatccgggctacatacaggggtacctgcccggcgtgcgggaaaacggagggcagtatacgcatggcgccatctgggcagtgatggcctttgcccgaatggggaatgccggacgagcctggcaactctggtcaatgctcagccctgtaaatcataccctgaatgcggactctgtcgggatttataaagctgagccttatgtcatgagtgctgatgtctacagcgtcgctccccataccggacgtgcagggtggagctggtataccggttccgcaggctgggcctggcgtttacttaccgaggaattactggggataaaacgttccggcactgactttagtgttcatgccaggttaccggatgagtggtcgtctttttctatggcatatcaatatggtgaaagccattatcagattagtatttcacgcggcgatgcagaatattgcgtgacgctggatggtgttctcctccctgatgacagaataccgctgaaggatgatggacaaaaccatacggttgagatcattcagaactga

SEQ ID NO: 183215 - DNA, 288 bp, Klebsiella oxytoca
ttgaaaattgaacgtcttatttatgatacactacccttccgtgagaaatttaagatgaaatcagaagacacccttgactggtatccggcacaactgccgcctgtgaaaattattcttggtgaagccgtgctggctgtgggtaaacagggccgaccgattaatacccgcaccttgctggaataccttcaggtcatgcaggacaaacaaaaaaggcgggatgacaaaatcgccatgcagactgcgatcgatgttctcagggataatcagcgcattaacggcagacgttaa

SEQ ID NO: 183216 - DNA, 189 bp, Klebsiella oxytoca
atggtaaatatgcgattattcgggtggcatccgggatatgtttcaaaccaggcgaaattattcaacgaaacgattgtgagtggttttataaacttacaaaaattcggcttcattcttttgagtaccttgatgatgatgaatcaagaagacaattccttgagtatcaatgataaaaccatggatttataa

SEQ ID NO: 183217 - DNA, 237 bp, Klebsiella oxytoca
atggcacagacttttactcataatttacttcatcctcgtcactggcttacctggtctggtttgggtctgctgtggcttctcgttcaacttccttacccggttttacatattctgggctctggccttggaaaaatatccagaccctttctgaaacgccgggaacggattgcgattagaaatatcgaactgtgctttcccgagatgacaccgtttgcccggcgccagatggtcgattag

SEQ ID NO: 183218 - DNA, 633 bp, Klebsiella oxytoca
atggcctggttctggagcgatgcgagagtcaaaaaatggtttgatgtcgaagggcttgaaaacctgaccggtgcgacaagaggagtaatggttgtcggggttcattttatgtcccttgagttgtgtggaagagtaatggggttatgccatcctatgatggcaacgtaccgcccacacaatgatccattaatggaatgggtacagacaaaagggcgtatgcgttcaaataaggctatgattaatcgacgtaatttatcaggttttgttcatgcgctaaaagcaggtgaagccgtttggtttgcaccagaccaggattatgggtctaaaggaagcgtttttgcaccttttttctcggtaaaaaaagcagccacgacgaacggaacgtatgctctgtcaaaactagctggtgcacacttgatcacacttagcatgattcgacgtagcgataaaaaaggttatcacatgtatatcagcaatccgttgtcaggctatccaggggaagacaagatcgccgcagcggcttatatgaacaagatcatcgagcgtgaaattctccgtgctcctgagcaatacctctggatgcatcgcaggttcaaaacgcgtcctgaaggcgaagtctctttatacaaatga

SEQ ID NO: 183219 - DNA, 396 bp, Klebsiella oxytoca
atgaatgagcatgcggttctgaaattgcttaaagagctggatatatcttttcagtacatatcacatccggaagtgaagacggtcgctgaccatgcgagttttgctgcggattttccggcacagttgctgaagaacctgttactcaaaaatagttctggtaagcatttctacctgtatgttcttgatggcaataaaaaggcagatcttcgcgagttagcgctccagcttaatgaatcgcgtctgtctttcgctaaaccagacgagttaatagaaatactcggtgtggaacctggcggggttacgcctttcgctattgcacataacaaggagaaggatattcgaattgttatcgatacttctgtatcagcgagtcggtcactggttttcaccctctga

SEQ ID NO: 183220 - DNA, 552 bp, Klebsiella oxytoca
atgacagcacaccacttcacttttcaaatcacagatgaaagtgatgccagtgatatccgggaagtcgaaacccgcgcatttggcttcagcaaagaagccgatttaacggcctctttacttgaggatgaaagcgcgcgccctgcgttatcgctgctggcccgacatgaaggcaaagccgtcgggcatattttatttacccgggcaaccttcaaaggggaaatggattcaccgctgatgcatatcctcgctcccctggcagtcataccggaataccaggggatggacgtgggaggacggttgatacgcactggcatcgagcacctgaaattgatgggctgccagacagtatttgtgctcggccacgccacctattaccccagacatgggttcgaaccctgtgccggagacaaaggctatccggcaccttatcccatcccgggggagcacaaagcctactggatgatgcaatcactcaccgctcagcccatgaacgtgaccggccacatccagtgcgcgcaggccctgatgaaaccggagcactggcgtgaataa

SEQ ID NO: 183221 - DNA, 312 bp, Klebsiella oxytoca
atgttttcttacattatgcttggaaccaacgacctgccacgcgccattacattctacgatccgctgatggatatgctggggtatccccgtggcggcaggaatgaggacgtcgcatggtggggcgttttcaacggtaataacacgacggcactgggtatcggcagaccttttgataaacaggatgccacgaccggaaatggtgtgatggtcgccctgattgcgcggtctgccaaacatatccagcagcttcacgcgctcgctttaaaccatggtggcacggacgagggagcacctggcctgcggaggtggtga

SEQ ID NO: 183222 - DNA, 324 bp, Klebsiella oxytoca
atggtacaactcaatctggtaaaagtactgctgttgagcaatgaacgcaccggcgatgtccgctatgagattttctcgaaggaaggtgaaaatcctgactacccggagaaaatcatcgtttatcgtgagggaaatatcggtgagcatggtgagcgtggctggatcaagactgacgatgttataagtcttgaacacttgggatttcaacccggaaggggattccagaccacgataacctatcacatacggcctgcacgagatatatgttcagcaatagctgaatgccgacagcactttcaggaaaagttttgttctgatagataa

SEQ ID NO: 183223 - DNA, 1173 bp, Klebsiella oxytoca
atgagtaaggttgcattcaaaagattgggagatttgattaccctcaagaggggatatgatttacctgaaaaagttaggatagcaggcccgtatccagtaataagttcttcaggggtgtctggatggcataatgagtacaaagtagaagggccgggtgttgtaactgggcgatacggcaccttgggtgaaatgtattatgttgaagaagaatattggccgcacaatactgcactgtatgtacaggacttcaaaggtaatgacccaaaatacatttattatttattaagttgtttggggcgaattcgtacttctgataaaagtgctgtacctggcgtaaacagaaatgaacttcatgaaatggctgttccagccatagaagatctgacatcacaaaaaaaaatacgtgaagttcttgaatcaattgacgaaaaaatcgccctcaacaaccgcatcatcgctgaactggaagcgatggcgaaaacgctgtattactattggtttgtacagtttgattttcctgatgccaacggaaaaccgtataaaacctccggcgggaagatggagtataacgctacactgaaacgggaaattccggcgggttggagtgtaacaaatattggttctattaccaaaactgtattaggtggtacaccatcgacagaaaatgatgattattggaaaaatgcgaatatcccctggcttagttccgctgaaacagcatcttttcctgttgtatcatctgaacagatgataacttcatcaggaattgaaaactcttctgcaactttgttatctaaagggacagtcgttatttccattgttcgttatattcgcccttcaatattaggtatagatgccgctaccaaccagtcggttgtcggaataagagaaagcgacatctataagagttcttttatttactcttacttttgcagtgaagttcctcgattaatgagtttaagaacaggggcgcagcaacctcatattaataaaggtgttattgacgaaagtccaatagctttacctccatcatctacgcttgtagaatactataagttggctaatcctgtttttgataaaattatggctgtcgcatttcaaaaccatgaattagttagactccgtgactggctccttcccttgcttatgaacggacaggtcacggttaaataa

SEQ ID NO: 183224 - DNA, 1344 bp, Klebsiella oxytoca
atgaggattgtaaagagaatgcttttcctttttttcatttatacagcgacattaagttcttgctttgctagcgtaagtttcaatttatatgactccggagcgctcatgaataataatgttcttgataacaatcaaaaagaattatttggagtcgctcctgggggagggaataaaacattctcatcttacaaatattataattctataaatcaaatgtccccagacgttatacgccttgaagcgattacatctgaccataggaaaatttatgatccagataaaaaggtatggaacttcagtattctagatcaagaaattgataagatgaatgaaggaaagaaaacaataattgctaatgttttttacacccctaaatttttgtctacttgcccagatagtaaattttatgcattttgtattccaaatgatatgaatgcttggagtttttatgtctcaagtatagctcagcatgtgtatcaaaaatatggtattaagtattgggagattggtaatgaaccatcaggtaaattcttcttcacaagttcaatgaatgaattttataactattatattcttacagcaaaagctattaaaaaggtcaatggtaacatccttgttggtgggtttgcagataatgcatattatctaaagttgtattctgattttttttctaaaattagaggtagtaaagctccacttcttgacttcgtcacttttcattggtatggtgattggggtaaggataacaccagtaaatacaaccctaaatatgtatttacgatatctaataatctcaagttagctatgaataaaaatggctttaccgatataccaattttcctaactgaatggaatttggttgggaatagacctgctccaggtggaaaagatcaagttaattcttattttatagcttcgctgtattggcttaaaaaatcacaagttgataagtctcttttcttcagggttgaaccttacaataacacaaatgcatctcttttagattataatggaaacaaaaatactgtaggcgattttttttctatattaaatgattctagtttttcaaacatctccatgaaaaataatgtttatttattttctagtgattctcgccaggaaatcattttatcaaattatgatttagatgatgttgagcctaaaaatattactattcattttggaaacaaaatgctgaacagttgcaataaaaccaactatacattagttacgtatagtaatgggaagataataaaaaatgcaagaaatataacttgcacaagtaatgattcttatattaacttaactgctaagaatttctcagttattcatattaaatactaa

SEQ ID NO: 183225 - DNA, 1377 bp, Klebsiella oxytoca
atgtctagtttattgacttgttttaaagcatacgatataagagggaaacttggaagtgagcttaatgaagatattgcctaccgaattggtcgcgcatatggagaatatctcaaacctcaaaaaatggtactcggtggtgatgttcgtttgacgagtgagtctttgaaaaatgcacttgctaaaggtctgcaggattctggtgctgatatacttgatattggtttaagcggtactgaagaaatttattttgctacaagttatttggatgctagcggtggaattgagatcacagctagccataatcctatggactataatgggatgaaacttgtccgtgaacaatcgcaaccaattagcggtgatagtggtttgcgggagatccagcgtatagctgaaagaaatgaattttcgccggtagtattgagtaatagaggtaattatgagaagacctctgtgcttgatgcatatattgataagctcatgagctttattaatttttctaacctcaccactccccttcgattagttattaattcggggaatggtgctgctggtcatgtaattgacgctattgaagtgaaatttaaaaatgctggtgtccccattgagttcattaaagttcatcatgaacctgatggtaattttcctaatggaattcctaatcctttattaccagaatgtcgtcaagatacaactgatgctgtaattaagtataatgcggatatgggcattgcatttgatggcgacttcgatcgttgtttcttttttgatgaaaaaggaaactttattgaagggtactatatcgttggtttgttatctgcagcatttcttaataagcatccaaattcgcgcatcattcatgacccgcgtttaacttggaatactattgatatagttaataaagaaggtgggatacctgttatgtcaaaaacaggacatgccttcattaaggaacgcatgcgtaaggaagatgcaatatatggtggcgaaatgagtgcccatcattattttagggatttttcttattgtgatagcggtatgattccatggttacttgttacggagttgttatgtgtgaaatcgcaaactttgggacaattagttaatgaccgggtcatgctttacccagcttctggagaaattaatatatatcttgaacaaccccaaaatgctatccaacgtatacttgaagaatatcggaatgacgctaaagtagttgattctactgatggaattagtattgaatatgaagattggcgttttaatcttcgtggttctaacactgaacctgttctcagacttaacgtagaatctaaatttaatcgggctttgatgaatgaaaagactaatgaaatattaaagttacttgaggcataa

SEQ ID NO: 183226 - DNA, 1422 bp, Klebsiella oxytoca
atgattctccctatagttatggctggtggtacaggtagccgtttatggccgatgtcacgtgaactctatcctaaacaattcttgcgcctttacggtgagaattccatgcttcaggaaacaattcatcgtcttgaagggcttaacgtccatgagccattagtcatttgtaacgaacagcatcgatttattgtagctgagcagttgcaacagataaatcaattatctcaaaacattatactggagccagttggccgtaacactgctcccgcaatcgcacttgctgctttaaaggcaattttaactggagaagatccattattgcttatccttgcggctgatcatgtaattggagataaaaatgcatttcatgctgctgttgagaatgcaatcccattcgcagatgatggaaaattagttacgtttggtattgttgctacaagtccagaaactggctatggttatatccaacgcggtgaaaagatagatcaagaagaattttccgcttttaaagttcagcggtttgtagaaaaacctaactatataactgctgaaaaatacctagagagcaatgagtattattggaacagtggcatgtttctttttcgagcaaaacgcttcttagaagaactatcaaaatttcgtccagatattcttacggcttgccaacaagcaatggctcatcttcgttccgatttgacccaagactttgttcgtgttgataaagatgcgtttttagcctgcccggatgagtcaatcgattatgcagttatggaaaagactgaagatgccgtcgtagtacctctttctgcaggttggaatgatgttggctcttggtctgcattgtgggaggttaatagaaaggataataacggaaatgtgataaatggggatgtttttgttgataatgcagaaaattgttatatcaatacagatgagaaactaattgcagcaataggaataaaaaacttagttattgtaaatactaaggatgcggtacttgtcattgaaaaatcacaagttcaagatgtaaaaaaaatagttgaacacttgaagaatagtcaaagacgtgagtatcgttaccatcaggagtcatatagcccttgggggcgtaatgataaggttgtgagggccccgcgttaccatatcaatcatatcactgtaaagcctggcggaaaattctccttgcagatgcatcatcatagagcggaacactgggttgtactatctggcacagcacaggtgacacttaatgataaaacctatttacttacagagaatcaatcaacttttattcctatagggtccgtacatatgttggaaaaccctggcaagatacctcttgaattattagagattcaggctggttcctatttaggagaagatgatattattaggtttaaagatcattacagcattaattaa

SEQ ID NO: 183227 - DNA, 1077 bp, Klebsiella oxytoca
atgatagttaatttatctaggttgggtaaaagtggtaccgggatgtggatatattcactcaagttcttaaaatcacttaataaattaggggaacttgatggtataatttgtgcgaaaatgcatgaggatttttttcgtgaatttaaatgcaaaattataacagttccagatatagtatcaaatacctcaaaagtttctaaacttaaacctatattatggcttttatatagttactttctttcacttaaagttaaattgttttataataattttacggtagttagtacaacacatcatttcttaccttttcacaaaaaacaagttattactatacacgacttgagaccatatttttatcctgattctaaactacaacaagtttacttcaggaaaattctccctaaaaaaatattttcttgtgagcatataattactgtatctgaatctgtaaaaaagttgattgttcagcactataaaatagatagcaataaggtttcagttgtttataatgctattgatataacagaatttgaaattcctaataatttagatgaaaagataaattcgaataccctgctttcagttggagcaagctggaaacataagaatatccactcgcttttagataattatgatttatggagagggaaatataatctaattatagtaagcgggaatactgattatactaagcaactggaggaaagagttcataaatatgggattgaaaaacatgttagcttcgtcagttctataagtttttctcaattaaagaaactttacctaaatgctaaagcattgatttacccatcgattgacgaaggatttggtattcccccattagaagcttttgcaagctgtacgcctgttatagtttctgatatccccgtttttagagagatattgcaagataaagcaatatatattgaccctaatagcaagggagattggcaaaaagcgttcaatcatcttgatgagttgacagcaaatgaattaattcctttgcgtgaatatgcctgtaagtttgatcaagtaaatatgacaaacatggttgctaacttactaaaaaaaatctag

SEQ ID NO: 183228 - DNA, 228 bp, Klebsiella oxytoca
gtgcgtatcggcgcgatggactcgtcccgtatcccaatgcagcttatccgccagataatacttttggttctgtcccgttgtcgtaatacacttctattgccctttgagcatccagtccgcgccaattttcggattcaggtcgatatcgaattcatcctgacaaaatactggatggtccgtctgcttctgggcgacagcctgttcgatggagagtcgcttttcctctga

SEQ ID NO: 183229 - DNA, 1020 bp, Klebsiella oxytoca
atgccataccccattgtgccttggatgcaaattgcacctcactatcatcgggatacgatattgttgggtaatggtgcaagcattgctgtttcaccggatcttgactatggttctttactggcttacgccctccgggcaggtttgctcacagatgatgtgaatcaactctttcaatttttcagaacatccgatttcgagctgattcttcggctggtttggcaggcgtcaaacgtcaacaggtcacttcaaattccagacaatcgcacacaccaagcctacctgagagttagagagtgtttgattcaggccgttcgtgatgtacaccctgaatatgagcaagttagcgatcaattgcctaatatgtaccagttcctcaaacggttcgatacggttttatcattgaattatgacttgttggtctactggacaatgacctatggcttagatatcagagatggccatttattcaaggactgcttccgtgggaacagaatgttcgacgatgcctggtggagatttcgtgatcctttattcgagcggactaacactttggtcttctacccgcatgggagcttggctctgtgcagaaatgttgtggagcaggagttcaagattcacaacgcgggagaaggcttgctagaggcaatccttgaacaatggcgcagcgagcaagtcgtgccgttatttgtcagcgaaggaacgatgcagcagaaagtatcgtctatccagaatagctactatctgtctaccgtgtaccgggaggtgctaacgtcgcgacgatccactttaacgctacttggttggggacttggggagcacgatcgacatattctgaagcggatgcgcggaaccggcatccaacgtgtagcggtttccgtctatcgtggtaatcaggtctattgcaactatgcgtaccaagttattcaggacgacttagggcccgtccctgtggatttttttgatagtgaaagtcctggatgctggattcacccgatgccgccagttatacccagagtttag

SEQ ID NO: 183230 - DNA, 144 bp, Klebsiella oxytoca
atgaaaggaacaggctggctctctgccatcttccgagccgaaaaccagcagcaggatgtggtggaagattcacaactcaaggaatcggagaatgacaccgccgtagcaggtgaacagccgcaggctgaaacgattgccgcgtaa

SEQ ID NO: 183231 - DNA, 1881 bp, Klebsiella oxytoca
atgacggcagtaactcccggcttacgcttgcgctttctcggtttttttgggccacaaaagccatccgcaacagtgaccttcggtgctggcctcaatgtcatttacggcgcatcgaacactggaaaatctttcattgtcgaaaccatcgacttcatgctcggtggaaagccgcctctgcgcgatatccctgagcgcgttggctacgaccttgttctattggggcttgaaacccttgatgggaagtcatttacactctggcgcagcatagatggtggtggttttcggctctatgaagacttgcaccaggcgccaccaacaaacgaaattacgtatacgcagcttgacgaaaaacacagcgataagaacaacacgaacctttcatcattcttgctggatctatgtggccttggtggcaagcgtgttcgcaaaaattcccggaacgaaaccatcagtttaagctttcgcaacattgcgcgtttgatgatcgtcgatgagacggagatcacacaacaaagctcaccgctcattgatggcaatcccaccgctaacacgccgaacttggccacattcaagttacttctaaccggagcagacgactccgcattggtcgccaccagtaataaaagtgagccagaagagttatcgcgcgaggcacaattgcgtcttctcgatcagcttcttgacgactatcgtgaccggctcaaggagttgacaaagagtccgaaggaactggaggagcagctagagaagatcgacaactcacttcgtcaacaggcggcccaggtaaacaccaccgaagatgaatttcaggaggctgctgggaagcggcgagaattgcgcaagaaactggaagaaagccgagagcgacgtgcagaggtgagtgcgatgcttgagcggttcaggttgcttgacagacactactggtccgatattgaaaggctacgtgccattgaagaaggcgggacgctgtttagcgtactgggtgccgggcattgtcctctttgtggagctgaccccgatcatcatcgcgcccatactgggtgtgatggagatactgatgtcgtcgttcaggctgcacgagtggagattgccaagatcgaagttttgcgcacggaacttgtagataccgtccaaacccttgagcgcgaaggtgccagccttgatcgcagaatgcctactgttgttcgagaactggagtcaatttcagggtcagttgaagaattgctcgcacctaagctctcgacccttcgcaagtcctattcaggctttgccgacaagcgggccgaggtgcgcgaagcgctggcactctacgccactgtgcaagacatggagcgccgtcgcgctgatcttgaaaagggcactgaagacgggaaggctgggggggttgctaatgcagatctctcaaccactgtggcccatagttttgctaagactgttgaaggcatactgactggttggcacttcccagaggctggggatgtgtacttcgattccaagactagggaccttgtcattgccggaaagtcgcgtagtgcttttggtaagggccttcgcgccattacgcatgcagctttcaccctcgggctgcttgctttctgccgtgcacgccacacaccacatactggattcgttgtgctcgattctccattgctggcatacagagagcctgatggaacggaatatgatttgaccggtactgaccttaaagatcaattttacgcgtaccttgaagctctgcctgaggacacccaagtcatcgttgttgagaacaccgacccgcctgatgcaatcatgaaacgcgagcagtctcttatgtttggcaagaacccgcatcatggccgttacggtctgttcccttttatagcggaccctgaacaataa

SEQ ID NO: 183232 - DNA, 255 bp, Klebsiella oxytoca
atgatgacccgtgacctcgtggagcgcgaagtcacatccgagggaatcaagtacggcgcgggcgaaaatgctgcaacgttcctgtcatcagtatcttccaactatttgctgtccctgaaggatcgcgctgtatggcttgtcgaaaccattggtgatctgacggatgaacagttcaaaggcatgatgcgtcgtttcttcgataaatgggtcgaacagtttcagagcattgagcaaagcttgggaggtgaggtatga

SEQ ID NO: 183233 - DNA, 1089 bp, Klebsiella oxytoca
atgacggcgagttggatggacatcaataagccgccgagcccagcaagcgctgttacggcagctcaggtggcgaacggccccattatgccgccgcagcaaaggctactgacctactcgccagacgagtgggagggattcgtcgaggaatgggcttattactgcctcgcgacgaagtatgaacacgtcctgcgtttctctggtgctggcgatatgggtattgatgtcgccgggttcgttggcgatgaacgccttcagggtgtatgggacaacttccaatgcaagcactacggcaatgccatcaggcctagtgatgtttgggttgagttcggcaagatcatctggtactcgtacaaaggtgaatacacggtccctcgtcgctactattttgtttcgcctcgaggtgctggtacgtcgcttagccgcctattttcaaatggcacgaagttgcgtgaggaattgttagctaactgggataagcatgtgaaagatgcgatcactagcacacaagaagtgttgctcgatgcaaagctccgtgcctatgtagactcattcgattttaccatcttcgatgccaagactgcgcttcagcttgttgacgatcacagagccacgccggttcacacagcgcgctttggtggtggactaccaacgcggcctgcatctgaaaagccgccccaagaagttgccgccaccgagagtcgctatgtgacgcagttgttcggcgcatacagcgagcacacaggaacaatagtgactgacccttcggccttgtccgtgacgaaactcaaggatcatttccgccgccagcgcgaggcgttctatgaggctgagtcactgcgcgtcttcgcacgtgatagtgtcccaccaggcacgttcgaagctttgctggatgacattcatgatggcgttattgatacacaagacgggaaccatgctgacggctacgaaaaggtctgcgctgtcaccaaggctgcccgcgacatgcagattacggcaaacgccctcatcatttgtacgaaccccaaggatagagacggaatctgccaccaacttgtgaatgaggagcgccttcggtggacacgatcatga

SEQ ID NO: 183234 - DNA, 996 bp, Klebsiella oxytoca
atgactaatgcaccctcagacatcatattccactatccaccggagctgttcaacctcctggtggatgttttgccgttgctcaatcgctctaagcaggatgtgctggttttcttccggggcgcaggagtacctgacaaaataacttctgacattgcagttcacttgagggctgcaccaaaggatgtcaacaagtaccagatggttcgcacggtgcttgaacgcctcaacacgaagggggaacacgctctccgtgaacggcgcgaggtgctgcggcgcgtggtggactttgcgaactttgattcgtgctggcccgctgaccaacttaaagccaagggtcttgtcgccagtatccgcgaagtcgtcaaccaaaaagacgctttcatgcgcatgaacaatgcccgcgaagaagaacggcaaacccgcctcgctgagtcacagcggatcgcagcagaaaaacgtgatctctgtaacagaatcgagaatgccaagcagggtttatatacattgtttagcactactgcgactgcacaggaacgcggaaaattgctggagacggctctcaacaatctttttcaagcctatggtgttctcattcgtaaatcctttcatttggttggtgaggctggtggagggatcgtcgagcagattgatgggatcattgaactcggtggtgttctgtatttcgttgaaatgaagtggtatcgcaatcctgtgggtaagcctgagatttcagagcatcttgttcgcctcatgtcgcgtgccgaggttcgaggcatcttcatttctgccagtgactacacagaacctgccattcatacggtacgtgaatttctgcaacacaaagttttagtcctctcgacgcttcatgagatcgtccgtctgcttgagcagcaagacgacctttcggagttcttcacaaagaaagtccaggctgcgcagatacacaaaaacccgtacttctgcccactcgataaccaaggacaaggtgctttatga

SEQ ID NO: 183235 - DNA, 945 bp, Klebsiella oxytoca
atgacgatatccctgcatacccagactggcgcccctaacacctcagcggcgaccagcgtatccccgctggagcagtcaggctcctcaaaaacgaaattttctaaaaatagtaccgatatttatcaggcagttactgacagtatcattacggcactggaagccggtgttaagccgtggtcatgcccctggcagcgcgtaccgggcatgtcaggattaccttcaaattatgcgactagcgctgcatacagcgggatgaatatcatgttgttgtggagcagtgcgtcagaacaggggttcaatgattcacgctggatgacctacaaacaggcaaaagcggagggcgggcaggtacgcaagggagaacacggcactaccgccattttctataccacgctggaaaaggaaaatgacgacggagaaactgactatataccgatgctgaagacgttcaccgtatttaatgttgagcaaattgatggtttgcctatgagggacgaagccgttttcccagcagggacttttgagccgttgccgcctgcggaggcgcttttcctttacagtggtgcaaccatcattgagaagggacagaatgccttttttgcaccatcaaccgacgaaatccatttaccggaacgtcgtctttttagcgatgctgccaatttctacgcaacgggcctgcatgagttaattcactggtgtggggcaaaaagccggctgaaccgtgaaatgaaagggaagtttggcagtgagagttatgcttttgaggagctgatcgccgagttgggaagcgcgttcctgatggcggatttgggggttgtcggagaggttcagcatgaaagctatatcgcttcctggctgaaagcactgaaaaacgacaaacgctatatttttaaagctgccagtgcggcatccaaagcgcatcgttatttgatggataaagcctga

SEQ ID NO: 183236 - DNA, 306 bp, Klebsiella oxytoca
atgactgcgactaatcaatttgctgcgcacgttggtctggactgggcagataaaaaacacgatgtctgtgttcagtttaaaaacggtgaacgcgtattccatgtgattgaacatacagcagaagcgcttgatgtctggcgtaccgagttacaccagaagctaaaaggcaggatcgctatcgccgttgagttgaagaaaggccccgtggtgtatgctcttcagaaatatccgtttatcaccgttttccccatccacgctttgtccctggctcgttaccggcaaagccatctcgcccagcggcgctaa

SEQ ID NO: 183237 - DNA, 837 bp, Klebsiella oxytoca
atgaagaaagtaatggctgcgcttgcaatagtcctttccttgagtagttgtgacaagcccaagattgatacttccagtgacgaaaacatgaagatatcaattcagaaggtaagggagtcacttccagagaatcaacgcactacatacgatagtgcgcttaaggtagtagcccttaaccatttgaatcttgctgatctaatgcaagcagggatgacaaaaaatacctcgggtatcgaggcacaaatgaaaagcgaactttcaggtaaaaccggagaagagatcatctcttatgccgaaacgattagaaaggagagagctgaacgcgaacaaactcaggcacttcaggaaatctcggaacttctacaaaagcaaaaaaccgcagaaagtagcctgaaggaacttgaagccttcaaggtatcccgctcccggttttactttgagaaaaaaaattatggaagagatcagcccatcattgagttgagcgttgagaacggcacaaataaagccatcgcgcgcgcttatttcaaaggcgtcatcgcaagcccgggaagggaagttccgtggttcaccgacaccttcaattaccagatttctggtggtcttgagcctggagaaaaggctgaatggaacctggcgccgaatatgttttccgattggggaaaagtgaatgctccctctgacgctgtatttaccgtaaccgttataagagtcgatgatgcgcagggcaatcctgtgtttggcgatgccgaattttctgagcgtgacgcaaaaagactggctgaactccaggctaaataccccaattccccccccctgaatattcattggcaaagctga

SEQ ID NO: 183238 - DNA, 1938 bp, Klebsiella oxytoca
atgttcttaaatgaccaggaaacggctacagatcttttgtactactcggcgattgccgagacggtggtgaagctcattgaagagacacccgaggctccgattacaattggtgttcacggcgactggggagcgggtaaatctagtgttctcaagatgttgcagacctcgtgtgaaaataaagataagactctctgcatctggtttaatggctggacttttgaaggttttgaagatgctaagacggttattatcgaaactcttgtggaagaacttgtacgagcccgcccgggttgcactaaggtcgcagccgcagctaagaaggtactcagaagggttgactggcttaaactcgcccgcaaaacgggaggcctggcgcttaccgctttcactggcatacctacgatggatcaactcaaaggcgtgctggatatcgccgccgggctgatcagtaatcctcaggaaacgttgtcagctgagggaatcaaagcatttgtcgggaaggcgggagattttattaaagaggctgatgctgagcaggaaacgctgccgaagcatatacatgccttcagaaatgaattcagtgaacttctcaaagaagcccaaattgacaagcttgtagtaattgttgacgatctcgatcgatgcctgccagaaacggcgatagacacactggaggcgatccgcctgttcctgtttgtcgagaaaacggcttttgtgattggtgctgacgaggcgatgatcgaatatgccgtccgaaatcactttcccgatctgcctcagagccagggcccgttatcttatgcgcgtaattatcttgagaagctgatacaggtacctttccgcatacccgcattaggtagcttagagacacgggtatataccacgcttctgttggcagaaaacgcactgggtccaacgcataaacagtttacggacctgttggagaaggctcgtgaagagatgcagcgcccctggctgagtagcggcctggacagaaaagtggtcagtgaggttcttaaagatgacatccctgagccggtcgatcaggcgcttctcattagcgctcatgtcacccctctcctgagcgcaggtactcgagggaatccgcgacagattaagcggttcctgaattcgatgatgttaagacaggcaattgctgaagcacggggattcggggatgagataaagcgccctgtgctggcaaagataatgctggctgagcgcttctatcccaccttttacgaacaaattgtcagggaagtaagcagccacaacaaaggaaaaccagaggtacttgcacaattcgaagaacaggcaaggggggcgactggttcggaaaaagaggaagaagcaccacacactcagcttttatcttcagaccaatttgacgttgccgtgtggatgaaaaacggctgggcagttgactgggcgcggacagaaccgcggcttgccgatgaagacttaagaccttatgtgtttgtgacgagagataaacaaagccttttcgagggggcactgacctctagccatcttgaaccgttgattgagaaactcatggggccgcggatggctgtagcaggcctcaaggtcccccttgagaaactctctgcaccggaagccgatgaagtgtttgaagctctctgtgtacgcattctccaggaagacagctttgtcaaagcgccagcagggattgatggtttgctgttcctcgtgaagtgcctgcccaggacacaaaataagctaattgattttattcgccgcatccagattccaaaaaaagggggtagttggatgaccgggttttcacaatctttcgttgacgccagttatgaaatggagttccgctctattcttcaagagtgggtagatcagcctcacaacgcagcgttaagccgttctgcaaaagcgatcctcgaactggaagggaaacaaaagtaa

SEQ ID NO: 183239 - DNA, 348 bp, Klebsiella oxytoca
atgctcgataccattagggacctggcagaaacaggtgaggggagtttcgatgccttgacgcctgaacagctccaggaagtatttcttggttttgtcgtgcactccattgaaggcaagataatgtcagatatcggtaaaaatgcgatcaaactacccgatgatgttgaagcaatcgcggacatacaagaaacactgcatagtttcatcgatagcgcgacacgttcccagctcagaaacgatttatctgatgtttcaggtctttcaggaaatgaaattgacagaaaagttcatgagatttacgagaaggcatttgagctgattgccagcgaaggggagagcatggaatga

SEQ ID NO: 183240 - DNA, 1374 bp, Klebsiella oxytoca
atgagccatcaaacaatcgtagccagactgggtagtggtgacaccgctgcgccaacactcgatcggttgcacacgttgttaacggaaattaactttctgaaagacaacgggaaacttgagtttggcctcgataaggctatcgaaggcttaggtgagtatgggcttactcctacagatacgtctgtagatctcgcattgcttgccgcaaccgttactgcggccgatacacgtatatcccgacgccttaatgcccaggatttttggactcgcgagattgcgcttcatattccggttgctgaccctgcattgtggggaaatcaggctgaactgctcagtaaactacttaatttcctaacaggggatcgctggtctttacactttcgcgaaaggccagaggtggaaggcggcctgataaaagcgtcaactaaaccacgttccctgaacccaacatcggtttgcctgttttcgggagggctcgacagctttattggcgcgatagatctgttgtcacaggggcttaccccactttttgtcagccaccactgggatagtgtaacggcaaagtatcagagaaattgttcggccctgttgaaggcccgatacagtcaggcttttggacacgtgcgcgcacatgtaggctttaaaagaacaacgtttttacaggagacaggggaagacaccctgcggggacgctctttcctcttcttctcgcttgccgccctggctgcagactctgttggcgagaggatggtcatcaatgtaccggaaaacggcctcatttctctcaatgttccacttgacccattacgagtgggggcattaagtacacgcacgacgcatccattttacatggctcggtttaatgaattactgaccaatcttggaatcaatgctgtcttgcataacccctatgcatttaagacgaaaggtgagatggcactagagtgcagggaccaacagtttatccggcaacatgcatcaaataccatgtcttgctcctctccacagagccgacgttatgatcctgatccggccgagcgtgctcccaagcattgtggcaggtgcgtgccctgccttatcaggcgtgcgtctcttcatgccgcattccgccttgatgaaaccccctaccgcataccagatctcaatgcgcaaactctcgacagtcgcaaagcggaaggggagcatgtcagggcattccagctttctcttgcaaaacttgcgaccaaccccggacgtgcaaaattcgatgtccacaagccaggtccactttctgaccatccaggcagtattgccgattatgtcggtgtgtatacgcgtggaatggaggaaatcggcagcctgcttaatggtgttgtatcaaggccgaaatcatga

SEQ ID NO: 183241 - DNA, 771 bp, Klebsiella oxytoca
atgactgccatgcagaaaaaagcgtctccgttatgggttgattttcactgtcatctcgacctttattctgatcacgtcggcatcattgctgactgtgatcaggagcgggtcgccaccctggcggttacgaccacgcctaaggcatggcccagaaactgcgaactgacagccgagtcacattatgtgagggtgggcttgggtatgcatccccagttaattcaggaacgggaacaggagattgctttatttgagcgctatcttccctccgctcgctacgtgggggaggttggtcttgatgctggccctcgtttctataaaagctttgaagcccaggaacgtgttttttcccgtattcttcgcgccagcgctgagcaggggaataaaattttgagtatccatagtgtgcgaacggtctcaaaagtactgaagcaccttgaggagagcaggctgtttgataatagtcaggcgatccttcactggtttaccggaaccgtttctgaagcccggcgggcagttgagctcggttgttatttttcaattaatgaagagatgctcaggtcagaaaaacaccgcaaactcatcagcattttgcctcttgaccgattgctgaccgagacagatggcccatttattctgcacgaaggcacccctcttcggccgcgtgatgtccatcgtacagtgcatgagattgccctgatccataatttggctccgctggatgcaggcaaactaattctaaataatctcagacagttggtctctcgagtctga

SEQ ID NO: 183242 - DNA, 1287 bp, Klebsiella oxytoca
gtgttcagaaatagttttggcatagaagaaaagatagagatgattgaatcaagctctacaaaaaattacttcaaagaagtttacagtagttacttgaatggtaattatagagctgcagtagttacattgtggtcagtgttagtttgtgacgcagtttataaaacccgcagattaattgacttaacggatgataaatgggcaaaaaaggaaattagtaaaattgaagaattacaacgtacaaatagcacttcttctgaatgggagttggctatatttgaagggttttatgaacaaaaaaaattcataggtgccggtgaaatatcaaacatcagagacatacagaaaaagagacacctatgtgctcatcctatactttccgaggacgacgccctatacacaccaaataaagaattagttaaaagcatgataattaatgcgctcgatgatttcataaccagaaaaaattactacggaaaagatctatttcaggtcatccttgaaacattggttaataatagcgaattttatgcctcttcaggtaatataaagccactcattgaaaaatatctttcacgagtaacgccaggttcagcttgtaaaatatttaaagatttttggaagtttagtttcagactggacgacgcggaggcaatcaagcatagattgattctacgtaatgcatgttaccatgtttataccgaggtcaaaaaagatccaagtacggcaaataagattaaagatgatttagattatttcgaaaatataacttttaaatggtcaaacttaagccatttctttacatttttatgcagacaccccgatttgtataaaaaattctcacccgaactccaagggcgtcttcgagaatatatcaaccgaaaagatgaagatgatattgattcacatgtttacttagttgctacaacctttctattcagctcatctagcgattactttaaacacattcaaagcaagattgaaagttatgaactaaataaccttacaatctcacatataaaattaatgcttgatatctatgacgaatataactgcgagaaagaggtttatgatatagtcatattatatgcatcaaaggcaattgatttcgatgatgcagataatagatttaatctcatattcaaagatgaaatatttgataacttatctaaagatcatattacaaagttaattgattcttttgatgagaacggccaaattggtagtagaagaagaaagagcattgacttggctaagttaataaaaaaactcgatgagtttgaaagttag

SEQ ID NO: 183243 - DNA, 228 bp, Klebsiella oxytoca
atgcttcactaccgaacatcttatgctgactgcagtcgtccggcattgcgttcatcctactggctgcattcggatagtaggctctgttttttcaccaagcaacgccagctgcaggcgctgcttaggtccgcagctgagatgttatatttaatgtcgttgcttaaagccacattaaaaagaagacagtgtgtgaacagaaatcagagcaaagattatcagggtatgtga

SEQ ID NO: 183244 - DNA, 1029 bp, Klebsiella oxytoca
ttgggaataattgatatttatagaaaaaatgttgagcgtaagcgtagtgacttaacccgattgagcgagcaaaaatcgaaagaactagccaagatttcaggtttgaacaataaaattcaaacagcgatccggcaaatgaactcgtctaagtccgcaacaacgattaacaatcggcaagaagatattttcaaaattcagatgattatatcaaaaatagaaaaaaaagttgccgattttgaggcaaaaatatctatgaagaatagagaactgcataacgaacagcgaaaactggatgctcaagaactgaaagaacataagaatcgccaacaaattcaggaaaaattacagcgtcagcaaactagcgcattaagtaatgttaacaaaacgctcttggaacactccgacatgataaacactttgagtaagctacctgaaaaaatcacggtacttttttttgcttctaacccccaagatcaaggacaactgaggttagatgaagaggtgagatccatcaaagagatgattagaagttcacgacatcgtgatgccgtaaaactggagtcatgttgggcagtcaggcctggtgatattttgcaaaacataaacgagttctcaccaacaattgtgcattttagtgggcatggaagttctgatgatgaattggttcttatggataataactccaatactaaactggtttctatgcaatccatcgtgcaggccatgagtgtggcaaatgacaatctgagactagtctttttcaatacatgtcactcacagaatcaagctagtaaagtaatcgaacatgtcgaatgcgctattggaatgagtacatcaattagagatgatgcagcaagagtattctcagctcaattttattcctccctgacgtttgggctttcagttgaaaaatcttttaatcaggcaaaagcagcgctgatgcttgagggaattcctcaagaagatacccctatactttttatgagagatggtcttgaagcagctgatatgtacattatctcacagtaa

SEQ ID NO: 183245 - DNA, 270 bp, Klebsiella oxytoca; identical to SEQ ID NO: 95275

SEQ ID NO: 183246 - DNA, 561 bp, Klebsiella oxytoca
gtgaaaaaaatgaaccgtacgctccgcagatgttgtctgtccgggcttatcagcctgtctttgtttgcaccagctccggccgtgtatgccgccagcatcgagacggggtattcgccggaaggaacggctctgcagctggtcctgaagactattaattctgcaaagcaggaaatccggctgatgggctattccttcacctcacccgaagtcgccggcgcgcttgtcagggcaaaacagcgtggtctcgatgtgaaagtggttctggactggaaagccaatacaggcaagcaaaacaaggcgagtctggcggccatgaatcttctggtcaatgccggtatcccggttcgcacagtgtcgcagtacaaaatcatgcacgataaagtcattattgctgacggccgtaatgttgaagtggggtcttttaactacactcgagccgctgatcggttcaattcagagaatgtgctagtcgtgtgggatgaaccagtcgttgctcaactctatctgcagcactggcaaactcgttgggagatgggaaaagactggagttcctcgtattaa

SEQ ID NO: 183247 - DNA, 222 bp, Klebsiella oxytoca
atggtaatcagtaacgatgaagtgctgcacctgaccgataaagtccagtcattaagtaaaaaatctgcagggaaccgcccggcgaatacttcatccctgatgaactatattaaatccctgtccggtaatacaaaaggcatggcgctttatggtcgcgttaaagaggaattaatcaggcgtggtgtgatagcggtgtatgagaaaactgtggtctggcgataa

SEQ ID NO: 183248 - DNA, 531 bp, Klebsiella oxytoca
atgatgatgacaaataaaatcctcattgaagaagtagatcagctgaaaaatatgttttcacgaggtgaaatggagataccatctttttggtcatgtctatggccaggggtaattattgctgcctggaatatggtttgcgccataattagtgtggggggcgggtatttgtctgttaaattcatattttgggtgttggtgttccccggcgttataagtcttatgattctgcttggagtggcaagtgcgcgttcactttttttatctgttcccagatcctatagaatgcgctcgcaggtatatcggtttatatctagaaaagtaattgtctatgcacttgtgtatatggctttaattctagcgcttgccctatttaatagggtgtattatgcctctccatttccttttgcgttcatggttcttattgcgacgatttttgtgtggtttgttatgaatattgattttggaagatatcaactttcggtactctcatctgcgataaactctttccgcgcagaaaagttgggggggtaa

SEQ ID NO: 183249 - DNA, 558 bp, Klebsiella oxytoca
gtgaaaaacagcctgatgaacctcgctaagacgccgctggcggcactggctttttcccttgcactggctggggtggcacaggcgggaacgctcgatgaggtgaagtcgctctgggatccgcggggaatctccggtactgaaacggcctccccgcagagcgacactccccaggcggtgagcggggcatctcagccacgctggttacgactcagcaacggaaagcaggtggacctgcgcgactggaaagtggtgctgttcatgcagggacactgtccctactgtcataaatttgacccggtgctgaagcagctggccggacagtatggcttctccgtgttctcttacaccattgacggacagggtgatgatgcgtttcctgaagcgctgccggcgcctcctgacgtgatgcagacctttttcccgaatatcccggtggccaccccgaccacgtttctggtgaacgtaaacacactggcagcgtacccgatcctgcagggcgccacggatgcacagggctttatggccagagtggatacggtatttcagatgatgcactga

SEQ ID NO: 183250 - DNA, 327 bp, Klebsiella oxytoca
atggaagagaaaaaagcctacgggctggtcatggtgtttgtcggggtgtttgtctttttcctggtcagcattatgtcgtacagcctgtggcgggacagacaggttaacgcatttatgaccaccaaccgggcctgggggatccagtgcgacactgtttctcaggccgcgtgggtggtcagggacggggagcgggtggaccttcagataaatcatctgcctctgtactgcagcggttaccgctttgaagcccgtgatgatgcaggaaagatacagcgccagctcgataaatacagtgtctatcagcatctgtcacgccagtcgcaataa

SEQ ID NO: 183251 - DNA, 186 bp, Klebsiella oxytoca
atgaagacggtgcgcaggtttaataagtttaaagattggttcaggttagcaggggtaatccttattcctgttctgttgataattaacatggcatcgttattaacgagcgatgatgggttcgtaattgttagatctttattgtttatctttgttctcaatattatagccagacgattaatgccataa

SEQ ID NO: 183252 - DNA, 237 bp, Klebsiella oxytoca
atgaaaattaatttttacaaacagcctgccattgattttgtcctgagattaacgctgacaataatcattatttcaccggtgatttatttctcctgggatgccgtcaaagggacgtcggggagtgattatgtcgagagtgtggtttttattgttgcggttggttttttctggttcgtgagctatctcttttttagttcgcttgccgcgttgttacggaaaaagacggaggaagaatga

SEQ ID NO: 183253 - DNA, 390 bp, Klebsiella oxytoca
atgactattaccgagattgctctcgcagcattaattgttgttcagtggcttacggtggttcgacaaaataaagaaattaaccaccgacgtgaatgtgaaagacttctgaaagaaagaattgacgattatgaaatacagaaggggcggtattgtcggtatgttgaaggaaaagcaaagtatctcatcagcgatatggaaaaggatttggatgagctttttcttttaaaaccacatgatgaggactcgttctggcgtaaggtttacaggctggagtttatttccaacgtgctgaaggagttcgctaagggacaggatttaaaaaagcagaaagaaataatcgatggtgtaaacaacatctgggaaaaattcaggggaagggataatcaatga

SEQ ID NO: 183254 - DNA, 2640 bp, Klebsiella oxytoca
atgagtaataacatcatcgatgccgtcacccaggctgtgaattcactggtatcagcactgaagctgcccgacgaatccgcgaaagccaatgacacgctgggcagcatgaatttcccccagttcagccgtattttgccctataaggattatgattccgcgaccgggctgtttattaataacaaaaccatcggttttatgtttgaggcgcgtcctttacccggtgcggataaaagtatcgtcgccacactggaacatttactgcgcagcaaacttccccggggcgtcccggtcagttttcatctggtctccagcaaactggtcggcaatgatatcgactacggtctgcgtgaattccgctggagcggtaaacaggctaagaagtttaacgccatcacccaggcctactatctccgggcagcggagacgaagttccccctgcctcctgcactggatttacccctgacgctgcgtaactaccgcgtgtacatctcctgctgcgtgccccggaagaaaaactccaccacgcaaattgtggagatggagaaccagattaaaatcctgcgggcgtcactgggcggtgcctatattccgacgcgtatccttgatgctgccgggctggtcgaactgatgcgcgagctgataaacccggacccgcacgagatgtaccgcgtaccgtataagctggacccctatcaggatctgaactatcagtgtgtcgatgacagctttgatatgcaggtcaccgccggtcatctgaaaattggccgcctggggcgtgacgggaaagagtgcgtaacccgggtgacgagctaccatctggagagtgatccggaaatggccttcctctggacctccgcggataactacgccaacctgcttaacccggagctctccatctcctgcccctttgtcatcacgctgacgctgatggtggaggaccaggtgaagacccagaatgaagccaacatgaaattcatggacgtggagaagaaaagcaaaacctcctacgcgaagttttttccgaacgtgataaaggaaatgcaggagtggggcgatatccgccagcgactggcgaccaaccagacctccctggtgtcctacttctttaatatcaccacgtacaccgcagacagcacagaggcctctctcgccgctgaacagcaggtgctcaacagctaccgtaaaggcggtttccagctgatcccggcccgctaccatcacctgcgtaactttctggccatgatgccgttcaagtgtggtgagggcctgtttaaagagctgcaggcggcaggcgtggtgaagcgggcggagacgttccaggtggctaacctcctgccgatcgtcgctgacagcccgctggcgccggcgggactcctggcgcccacctaccgaaatcagctggcgttcatcgacctgttctacgagggaatgaacaataccaatttcaacatggcagtctgcgggacgtccggggcgggtaaaaccggtctgattcagcccctcattcgcagtgtgctcgactccggcgggtttgcctgggtgttcgacatgggcgatggctataagtccctgtgtgaaaacatggggggcgtatacctcgatggcgataccctcaagtttaacccgttcgccaacgtgctggatgatgctcactttgacatgtcagcagaacgtatacgcgatcagatgtcggtgatggccagtccgaacggcaacctcgatgaagtccatgaaggtctgcttctgcaggcagttcaggcggcctggttaagcaagcgtaatcatgcacgcgttgatgacgtagttcagtttttacaggacgcgaaggacagcgatgaatatgctgattccccgacaatccggggccgtctggacgagatgataatcctgctcgatcagtacacggtgaatgggatctacggtgactatttcaactcagataaaccaacacttcacgatgacgcccggatggtggtactggagctcggtggcctggagtcgaggccctctctgcttatcgcggtgatgttctcattgattatttacatcgagaacaggatgtatcagtcaccgcgtggcctgaaaaaactgaacgtcatcgatgagggctggaagctccttgatttcaagaatgaaaaagtggggcagtttatcgagaaaggctaccgtaccgcgcgtcgacataccggcgcatacatcaccatcacgcaaaatatcgtggacttcgactccccgaccgcatcgagcgctgcacgcgctgcctgggggaactcgtcgtacaaggccattctgaagcagtcagccaaagagtttgccaagtataaccagctgtacccggatcagttcagcaagctggagaaagacatgattaacggcttcggttcggccaaagagcagtggttctcctcttttatgctgcaggtggaagcgaactgctcctggcaccgcctgttcgttgacccgctcagccgggcgatgtactcctccaaaggcccggattttgagtacatgcaagcgcgccggcaggagggggtcgatatccacgatgcggtatacggactggcgtgccgcaactttaaagacgaaatggcagagcttgaatcccgaataccggtgaatgacatggaggataaacagtga

SEQ ID NO: 183255 - DNA, 177 bp, Klebsiella oxytoca
atggacaatggtttttttggtttctactttttcttgcgtcagctggatatttttttgtgcagtatgaagattttcgcgatatgcagcccgctacgcctgaacaactgcaaagtattattcatgatgcgccttgtgcgggtgaggcttttcggatggctcttcaaactaatactgtga

SEQ ID NO: 183256 - DNA, 585 bp, Klebsiella oxytoca
atgaaggaattaatgctgttaattcctctgggcagcgctttgctcttaaccgggtgtgcgggcacagagaccgaatttcaatgtaatgccacgacgtcggatacctgtatgacgatggaacaggcaaatgaaaaagcgaagctgaaagaggaacgcagtgttgcaaagccggctgcggccgggttgccacaactggctgagggtaatttcagaaccacgtcagttaattcgtacccgttgccgcctcaacccaacctgaaccgggccagagtggcagcggagagagaacgagcacgtgcagtgtacctaaataatccaacggcaaagaatgaggcaatatatttcgaaaccgagaaaaggctccagtctttgccggtagtgaaaatgtctttaccagtagtggcgtcaacgtttacgtcaccgtcaacaccgccaggtaattatccccggccattaagaaaaggggaggagacaacgtcattgtggatagcgccgtatgtggattcagatgatgtatatcaccagccggcaacggttctttttgtcgtaaaaccatcggcgtggggacagcctcgccttaattga

SEQ ID NO: 183257 - DNA, 306 bp, Klebsiella oxytoca
atgacgggagacgaattaaagcgataccgtttcccggaaacactgactaaccagtcccgctggtttggcttatatctcgatgaacttatcccggccgtgatttgtctcggctggggtttctggaccagcaagtttatttttggcatagcttcagcggtactggttttctggggtatcaagaaactgaaaaaagggcggggcagttcctggctacgcgacctgatttactggtatctgccaacctcccttcttaaaggtttctttcatgatgttccggactcctgtttccggcagtggattaaataa

SEQ ID NO: 183258 - DNA, 717 bp, Klebsiella oxytoca
atgtgtgcgaaggatcgtagtcatattgctgtgcgcagtcaaacagattccattcattctatgcgcgagatgcttaatatttcatcttgccctgcttttattcgtgattcccggggcgaagtaattcacaccagcccaacctttgacaaaattttcttaacatctggtggaactggagcatttgatacacccagagcaccgggaagctggtttctggatctctccctggagatcaaactggaactgatgcagtcagaactgaaatcgttttcagaaggttctgctgtacttgttaaaaatatttggttggcaggttcactttggactgtttttattgaaacgttctcgattaatgaagatacatacagtaaatgggtttttataaatgaagatgaaccgatacctcatccttcaatggaatacaatgacttttctataaagatgcaaagatatatcgaaagaattcagcgttcagcaaagtctgactgggctatctttaatctgtatgcggttgggttttctcatgcatctatttctaagattacaggtgttggggtgcaaacctcaaaaaatacagttagtaaaataaaaaaggaactgagctttgatgatcgtgactatatcataatgtcatcgatctatactctaagttatggaaagtttatatcgaatgtggtttcgatattaaaagacggtgttaattttttgttaaattaa

SEQ ID NO: 183259 - DNA, 384 bp, Klebsiella oxytoca
atggccagggtacaagcttatgctagtgatgaagttgcagagaaaattaatgcaatagtggaaaagcgaagggctgaaggggcaaaggaaaaggatgtcagtttttcaagtgtcgcttcgatgctccttgaattagggcttagggtttatgaggctcaaatggaaagaaaagattcagggtttaaccaacctgagtttaataagattttgcttgagaatgtcatgaagactcagtttaccgtatccaaacttttggctattggctctctaagccctcatgttacaggtgatgaacgattcgagttccgcagcatggtgaacaacattcgagaagatgcaaaaggtgttatttctcactttttccccgagcaggaagaagagtaa

SEQ ID NO: 183260 - DNA, 486 bp, Klebsiella oxytoca
atgaagggagtagcgtttggtatcatcctgtctttaataccattgtcatcaatggcagcagactgctttgatatggctggcagggattataaaattgacccggatctcctgcgtgctatatcatggcaagaatcacgatttaaaattgatgcgattgggcgtaatcctgttacgggttatggatcaggcttgatgcaaattgattcgcagcatttcaacgaactgtcgcgatatggaataaaaccggatcatcttcttagcgatgcttgtcttaacatctacaccggagcctattatctggctcaggcgtttaaaaagtggggcgtttcgtgggatgcagtcggggcatacaatgcaggcttcaaaaagaccccgcgccaggcagcaagacgttacgagtatgcgaagaagatccattactactacacggctatcaaagcaagcaaacgaacttcttctaaagatcagaaaatcgccatgaactaa

SEQ ID NO: 183261 - DNA, 822 bp, Klebsiella oxytoca
atgcgtttagcatcccgatttggacttactcattccattcgtcaggaacgcccactgactaacgatgaattagtcaaggttgtgccttctgtgttttcagaagaaaagcataattcacgtagtgatcgctatacctatattccaaccattacactgctggataaattacgtgaagaaggtttccagccattttttgcctgtcagtcacgagtaagggatgaggataaacgggggcatactaagcatatggtaagacttcgccgtgaaggggccaataaaggaacagaagtacccgaaatcattcttcttaactcgcatgatggatcgtccagttatcaaatgatcccgggtatgttccgttttgtatgcacaaatggccttgtgtgcggtacgtcgtttggtgagattcgtgtacctcataaaggtgatattgttggaagggttatcgaaggtgcttacgaagttctgggaattttcgataaaataactgaaggcgttgatgtcatgaagtctattgccttaaccaaggaagaacagcgtctgtttggacaagctgcattaacctaccgatatgaagatgaaaataaatctccggtcagtattgaacagataattcatccgcgccgttatgaagataaaaaagatgacatctggactacatatcaaagggtccaggaaaatctgattaaaggcggtttgcctggccgaactgaaaaagggaaaagaacaacaacccggccagtaaaagcaatcgatggtgatgttaaactcaataaggcattgtggttaattgcggagaaattccgcactcttaaaggctaa

SEQ ID NO: 183262 - DNA, 576 bp, Klebsiella oxytoca; identical to SEQ ID NO: 161815

SEQ ID NO: 183263 - DNA, 1374 bp, Klebsiella oxytoca
atgtacaataaccttcccgccttaaccgacagtattctgtgggataatggtcttctggcaaaagactattctgtcctcgacgctgaagcgctgatgggagcacttagccgttatctccacgcggtcagcgtactccggagcgagtggcataatcccgaacactctcctctcagcctgtggattgcccgtcacgaccaggtagccctttatcgacccggattgttgtcagctgagcgaataatcctgaccgatgcgctggaagaagcggcattacggcttgaaattgttgaatcatcccaggcgatggatcatctggtacataacagagaaaccgacaggcttggggatatcagaactggtgttgcgcatttcattcgttttgttaaggacaattttcttctgattcaggccggtttcattgctttcacgccttgtgaatcagcaaggcatgaacagcagcgcaggatgcagctcctgcaggataaccctgaccggcatttccttcacagcgtgatgcctccggctgtggctcagctctatgaacgaagcctttccgtgcggggcatcaggcgagtgggtgacgaagggcatttcaggtttgtgtcagaaaaaacattgccggacgagatcgtgctggaattacgggattgcctcagtcctttcaccaatgcgtatatttatcaggaaatgcggcctgtccggataaacgaagacgggacgtttatagcaaggatcacccgcggtaaacatgaaagccgtaaagggtatgagcgatgggtaaacggagccagaaatcgtagcatgtactttcattatcgcggtctccttactgatatcagccagtcagccagggctggtgcctcttttgtcactcgttgtacattccagagcaaaatacttcagaaactggatgaaccgggtagactttcacgtcggatgctggaaattgagctcccgtttctgcaggacctgtctttacacgacatttttcgcatccgtaccgattacgaaccaagcgtgacagccttcaggcgttctttgcgtgactgtgcagttgaaatggagcgcgcgtccggtccggatgagatccgcctcctgcagcagcgtttccgggaacgtattgcggatgaagggctggatgaacttcaccagaagctcagcatatggaagcgcaggagtatgcaggacactgcactgctcgccgtaccggcagtgctgggttatatgggatcaccttcattgctgaatatggccgctggagcagttagtctcctgcaggctgtgttgggggctcatcgtcatcatggagatgtaacccatcatccgtcctggtttctcctgcgcaccacggcaattaagtgcatgaagaagtag

SEQ ID NO: 183264 - DNA, 315 bp, Klebsiella oxytoca; identical to SEQ ID NO: 37890

SEQ ID NO: 183265 - DNA, 786 bp, Klebsiella oxytoca
atgggaagtatgaaagaactgctgtttgaaatgcaggaggaacggcgtgacgaatggattgcggaaaattatccggatgctgaggaaggaactcctgaatgggatgcggcagcgcaggaatacagctggtttcaggactggatggaagaggcggctgagcagcaatattttgaggcttcgcttgccagtattcctgaccgcctgcaggatgcaaaggctgaactggatgagttagagagcctgatgcagttcaaccaacccaggatcgtagagcggatggcttacgttcattgcgtgagtgtactggacagctttctgatgtacagcgcaagagcacttcttagtcatcccccgcatttacagaagttcctgcacgaggctgattcgttggttcctaataaggaagacagaagaaaattacttgcttccaaatgggtcgagcaggagccggataaagacactcctgagaaggtttatacctggcgagctcagtctcttgtagcgaagaagacatttcagagccacaaagtgataggtcggtatttttcaaggatgctgacaacgccacatgagtggccattggaggagattaagggtgtaatcaagacccgaaacgcactggtacaccgtaatggagttaccgaatctcttgaacccgtgtatatcagttcggggagtgtgcagaatgctatctgcacggtacgagcatttattaccgtggcggctgaaacccttctgcaggaagatgcactatacaggacggatgatggtaagcgtacagcgtga

SEQ ID NO: 183266 - DNA, 147 bp, Klebsiella oxytoca; identical to SEQ ID NO: 94144

SEQ ID NO: 183267 - DNA, 405 bp, Klebsiella oxytoca
atgacaattttagtgacgctacaggctcagctcattgtgggagaagagcaggtgataaaaagcctggcaccggaggggatgctggcggccgtatttgaagacgacggccggaccgggtatttctatgcgctcgatgagtcccttgaaggaaacccgattcttgatgcagtgcatatctacaatgtcgaggatatatcagacgcccacattccttctgacgttaaaatcggctggtctgaagactgtcagaagtgcgtgctccttatcaacggatatccgcatgcagcgttcgatttcgtggggaaaaatgggtactgcagaagcggatacccacccccgattaacaaggtttggtctgtgtccggccatgaatggagcgattcggtggatgactttttccggtga

SEQ ID NO: 183268 - DNA, 321 bp, Klebsiella oxytoca
atgctacagcctgttcagctttttaaactgctcgccgacgagacccgttcaactatcgtgatgcttctcagggagtccggtgaaatgtgcgtctgtgacatctgtgcggcaaccgcagagtctcagccaaaaatttctcgccatatggcccttttacgtgaagccgagctggtcatcgaccgtcgcgaaggaaaatgggtgcattaccgactgtcgccacacatgccagcatgggctgcgggtattattgatacagcctggaactgtgaacgagaaaacatacgcaacaagctcagtagagtggcatctgtctcctgctga

SEQ ID NO: 183269 - DNA, 426 bp, Klebsiella oxytoca; identical to SEQ ID NO: 23459

SEQ ID NO: 183270 - DNA, 828 bp, Klebsiella oxytoca; identical to SEQ ID NO: 105721

SEQ ID NO: 183271 - DNA, 1479 bp, Klebsiella oxytoca
atgttgctgtcctcgacgcgtaaggactggctgggtaacgtccgtggtgacgttctggccggtattgttgtcgcgctcgcactcattccagaagcgatcgccttttccattatcgccggtgttgatccccaggtgggcctctactcggcgttctgtattcctctcgttatggccttctttggcggacgtccggcgatgatttcgtcctccaccggtgcaatggctctcctgatggtgacgctggtgaaagatcatggcttacagtatttactggctgcctccatactgaccggggtattccagctgatagccggatatctgaagcttggcgggctgatgcgttttgtttcacgctcagtggtcacggggtttgttaatgcactggcaatactgatttttatggcccagttgcctgagctgaccaatgtgacatggcatgtttatgccatgactgcggcagggctggggatcatctatctcttcccttatatcaacaaaaccattccttcaccgcttgtgtgcatcgtggtgctgactgggattgccatgtggctgcatctggatgtgcgaaccgtcggggatatggggaaacttcccgacagtctgccggtcttcctgctcccggacgtgcctttaaatcttcagacgctgctcatcatcctgccatattctgcggggcttgcggtggttggcctgcttgagtcgatgatgaccgccactatcgtggatgacatgaccgacacgccaagcgacaaaaacagggagtgcaaagctcagggcatcgcgaacatctgcacatcctttatcggaggaatggcaggctgcgcgatgattgggcaatctgttatcaacgtaaaatccggtggacgcggacgactttcaaccctcacggcgggcgtggtgctgctttgcctgattgtgttcctgcgcaactgggtctcccaaattccgatggcagcgctggtcgcggtgatgattatggtttccatcgggacattctcctggcgctccattgccaacctgcggacacaccccctttcaaccagcgtggtcatgcttgccaccgtcgcggttgtggtggcaacacataatctggccttcggtgtgctgaccggtgtactgattgcttcgctcaattttgccactaaagtatcccggttcatgcgtgtaacctcagttctggaggggacgagccggacgtataccgtcaccggccaggtattctttgcatcagcagaccgctttacgagccactttgatttccgtgaagcgattgagaatgtggtgatagacgtttcacatgcccatttctgggacatcacgtccgtcagcgccctggataaggtggtcattaagttccgcagagagggcgccggggttgaaatacgtgggatgaatgaagccacccgcaccatcgttgaccggtttggtgttcacgataaacctgaagaagtcgaaaaactgatgggcggtcattaa

SEQ ID NO: 183272 - DNA, 258 bp, Klebsiella oxytoca
atggataaaaaatatgatttttcgctcagctatgaagccttgacacgagtatgtgaaaatgcaatatgtgaacatattcgcagagcaggttctctggaagggttaggtttcgcacttgaatataccaaggcctatgccatcctggaagtatggtctctgctggcagctactggcgatacatttccagttctcattgagaaagacagaatatatctgttgcagctaatttccgggaaaaataatatagagctacattag

SEQ ID NO: 183273 - DNA, 2586 bp, Klebsiella oxytoca
atgaaattgttaagtgaagaagggttaaataacggagcccgaacactcctgaaaaaccatttactggttatgttacttgtattggtgggcgggttcatgatcagttttgctacgctgctttatgtatcaaacgagctcgactaccgggacgatgtccgaagcaaggcgcttctcagtaaggcttttaacttccggcaggacgctattcggactcaattaagtgattacgctgactggggtgatacttacaggaacctgcatcagcagcttaatatggaatgggcgtggcaaaaacaaaatttaggtcgatcgctttataataactttggttatgaaggggtatttcttgttacatcagatgggaaaacacggtatagcgtttcagaagggaggcttgtaacgcagtcacttgaaaaatggttagggaaagatatatttcctgaaatacttgcagcactcagacaatccggcgggaaagctgtctccttatttgttatttctgatcagcagcttacgcttttagcagcgaagattattactcccggatctgacagtactgttcagcaacagtcaggcagtccaacagttatgatttttgctgacaggatcacccctgcggaactgggcaagttgggtacggagtttggtgtccctgatgcaagactcatcggcttatcatctttcgtatccccatcaaatcgggatacttttgttatccctgcaaccgaaggtagtgcaattataggatggcgaagcgaagatatcgggacgatactgctcagcaggctgattcccgccttactcatgttaatggttatcgttgctgttcttgcatttttagcgacccgaaatttattacgcaaagcccggatccacgacgaaagcatatttttgctggaaaggagcatgcaggcactgacagcgaatgaattacgcttccgtgatgttgtggaaactaccaccgactgggtctgggaagccgacagtcagttccggtttatctggatatcagaccgttttccttcagtgacaggatttagcattgatgactggattggccgacaggttcatgagctggcgttaaatgaaaaccatgtcacttcattgctggataaattcgctgaaagcgatgaagagtttgttctgcagttacaaaaatgtcgctatgtttctgctcagaaccagcagcgctactgcaacatgactgtaaaaaaggtatcttccgcaggtaaccgggcggtttatcgtggtgctgcaacggatgttaccctggtgattgaggcgcaggaacgtgtcctctacctgtcccgccacgatgagctgacagggctcgccaatcgggtaaaaatgaaagagtttctgacgggacgattaagttttcagcccacagcagagcggcctcttgcaatggtgatggttgatctggataaattcaaagcagtcaatgatatttatggtcatgaaacgggtgacaaagttctgcatgaaacatccagacgccttcaggcttgtcttaaagacgctgacctagtggcacgtcatggtggggatgaatttattatcattatcccggaggttgagggccaggacagtctggaaaagatctgcgcgcacattattgacgaaataaaacagccatacgaggttaacggtaaccagctacttattggtgcaagtcttggtatttctcttgcgccacaacatgcccagaatgcaaacgatctgttgcgctattccgatatagcgctttaccgagccaagcatgaaggacggaaccagtgggtattttaccagcatggtatggcagaaaaaatcgttcaacgccgggagcttgaaaacgaacttcgggaagcggtggatacggggcagttacggcttgtttatcagccacgttatgacattaaatcatcagtaattacctcagtcgaagcactggtcagatgggaccatccttctttggggacaattatgccggatcagtttatcccgcttgctgaagaaacaggactaatagtacggcttagtgagtgggtactgactgcagcatgccgggaaacggcacgtagtttgccgggaatgtcggtttcagtaaatatttcagcgtctgaatttcaggatgatacactttatcaccgtatcgagaaggcacttgatctatccggccttgagggcttccgccttgaaattgaaataacagaaagtgttatgttatttgatccggtcaagacaatgaacctgatgaacagaatccggagccttggcgttaaatttctcatggatgatttcggaaccggatattcttcgctaagctacttacacagctatcctttcgacgggatcaagattgataaatcattcatcatgtcagtgaatgattcaccgctggccatgcaggtcgtaaaaaatatgataggccttggtaaagcttatgaaatggaagtaacagcagaaggcgtggaaacaccagagcagatggagcagctcaaaaatttagagtgtgacgttcttcagggctactatattggaaaaccaatgacccttgcgcaaattcgtcaaatggagacagacaggataaaactcccttga

SEQ ID NO: 183274 - DNA, 2460 bp, Klebsiella oxytoca
ttgagtaaagctggtattcaatctaataggggggatggatatcaaacgttggtagcgtttgagtgggctttgaccgtgttatccaatcctgattatcaatggttagagacagattcagtgaaatggctggtcgatgacgttgtgatagggcggactgacggtacaataatttgttgtcagtgcaaaaaaaatcaaacaggatttcgagcgtggtcgttcaccgatcttaatgatgagctagaaaaggccattaaaatgcttatacaagatcctactacgacagtcagattctactcccgtaccccttttggtgaactggcagctttacaagagtttagtactaattttccagatgaaagtgtctatcatgctgctttaaaagagataaaggtacatgaagcgacaaatagaaagctcagtgaattaattgcaaaaatatcttctaattttaatagttatgagcttttatccagaacaaaatttgttactagcgatattcatgagcgaatgcgagaaacagtagaagagcgcttacaatatttggtgagtaattctgttgcagcttttaattcactttggacttgccttgattaccaagggatgcgagttgctgatacgcaagataataaactgtcatcttgctcgcgtttaaccaaaaccgaccttataaatcttctttctcagtcaggttgtgtcatttctcctccaacagacattcaatctatttttaattcattcagaaaaacatcatcgattggtcgttcgtggcaaagagatattggtggtcatcgcattgacactcttttagttagtgaattaattgaggctatcaaaagcaagagccattccatattagtgactggagggccgggttcagggaaaacgtgtattctacttgaattgcaggagaaattagagcaattggcgcaatctgatagtgttatgttaccgttatttattcaatcgcgagagtttgctgatttagaaactgcacaggaacggcaatctctaggattagatgagcaatggattgaaaagattgcgcgtgtagctgacagctatcatgtaatagtcataattgattcacttgatgtgcttgctatagctcgagaacatacggtgctaacgtattttttagctcaaatagatcagctgttattaattccaaatgttaccgttattacggcttgcagagagtttgatagacattacgatagacgtatatctcagcgctcatgggataaagagtttaagtgccagccgttagattgggaaggtgaaatcatgccgttgcttgaaaaactctcaatcgactcatcagctattgataacataacgcgacatttaattagcaatccacgtgagttagatctatttataaatcttgctcaaagagatggtagttttaatatagtgactagccaagcgctagctcaacgctatattgattcaattatgttgacgaatccatcgctaggtgatgaagggaaaatagcacttgaaaatatggccacggaaatgttaaagcttcgtaccctgtcgataccaactcaacgatttactgcttcagatgacattcgtagaatgctacttagtcataatgttttgcatgaaactgaggataataaattaacatttgggcatcaaacgttacttgatgtattagttattagtagagcgattcgtcatggattgaccttaaataattttataaaggatctccctccagtaccttttgtccgcccatctattcgtagctttattgcacagcttgtcaatgaaggaagacaagagtttagaaaacagttacgaacggtgcttaccggaacttatgcttttcatatacgtcgcctagttgccgagtgttttgctgagcaattacctcaagatgatgattggccaatgttacgtgatttacgtaatacgcatcgagatgttttccaagttatttatagtaaagcttcacaagttgaatggcatcatttttggctaaggaatcttgttccggttttaaaaaacacgcgtgatgttgatggtataggaattcatacttaccgtatagcgcattggttaaatctagatccatcaggtgtcgtttatttttggatggaaatattaagatctgattggatagataagtcacaattgatcagtaagattgctgtttccatatcaaacataaaggaagatcatgcatatttgatgtctcctttattgctggagttatttaaattcccacaagaaaaatatagctttttaggtagagcccttgctcgctgtgttgctgtaggggggggcgatgatgcggtgctttgggattacatcattgctgatgttaaagatgaagacatactgtcatatcgttttggaaataaacttaagtgccgaccacacgaatttggtgataaggataataaattcctttcaaatagaatgattgacctgctccccgttgattaa

SEQ ID NO: 183275 - DNA, 816 bp, Klebsiella oxytoca
gtgaaaaaagtctacgttcaggccgatgcaaaattccgtatgctgccgagcgatatcaataatatgtacgtccgcagcgcgaatggcgaaatggttccgttctccgcctttgtcacctcacgctgggtttatggttcaccgcgcctggagcgctataatggcttaccctctatggaagttttgggtgaagctgctccggggaaaagtaccggcgatgcgatgattttaatggagcagttagccagcaagcttcctgccggtattggttacgactggacgggaatgtcctatcaagaacgtttatccggtaatcaggcgcccgcgctctacgccatttcgcttattgttgtctttctgtgtcttgcggcgctttatgaaagttggtctattcccttctccgtcatgctcgtcgttccattaggggtagttggtgcattactggcggcgtcgttacgcgggcttaataatgacgtttatttccaggtgggcttattaacaactatcggcctctctgcgaaaaacgcgattcttatcgtggagtttgcgaaagacctgatggataaagaaggcaaaggaattatcgaagccacacttgaagcatcgcgtatgcgtttacgccctatcctgatgacttcgctggcctttatcctcggggttctgcctctggttattagccatggagccggcagcggcgcccaaaacgcggtcggtaccggcgttatgggcggaatgctgacggcaacattactggcgatcttctttgttcctgtcttcttcgtcgtggtaagacgccgctttacgaaacacgcagagtaa

SEQ ID NO: 183276 - DNA, 531 bp, Klebsiella oxytoca
atggctttcgacttcaaaaaagaggatgcggccaagtatggccgcgaggtttaccgggcgtttcgtagtaagggcaatcaccgctgggatacgtgcgttttcgtgaatgaatccggggcttactctgccgtgttccggcactcgttccgcaaaaaggttatcgaggatggcaaagagatccggcgcaacgtcattgatgatgaaatcgtggtggccgcgccggacgcgggcagttttaccagggcaaaattcccacaactggccgacgcaaaagagctgaagcaatccggctttttcgcccgcttacggtttcttgctgaagcagctgcttaccgtgaagcgtggccggggcatgatggcggcgtggtactgatatgggaagggaaagcctatggctggaaaaattgcctgcgtgatgccgggtgtgagcgtcccggcgcgatagcgatcgacactgacggccatgtttttattgctgaagtcggtaacgattatgacggcgcgaaatgctgggtagctatgccatgttaa

SEQ ID NO: 183277 - DNA, 291 bp, Klebsiella oxytoca
ttgcccgccttactcgttcaggaaggaatgctgatggttacgacagatgaagtctggtttcggtatcacgactattcgggccagacaaaggcggtccgggtggcatccgtgcggttctggccggacattcaggaaacgatattcccccctttcctggtgccggaaggcaagcgccgcgttgtgcgctgccgctgcgggagtaatgactggaatgaggatggccgctggctgggtgaatactgctgcgccagctgcgggcaatacatacaggtatttgagaaaaaggactga

SEQ ID NO: 183278 - DNA, 423 bp, Klebsiella oxytoca
atggctaatatcgtcaccgcaaaaatctatggccccgctcagaaaatgcgtttccttccttacgcattcgcagaattttatcttcaggcggaaaactacgtttgcaacttcatgaaaaaatacgcagttggctatgatggcggctgctgggagtacatcacctatgaaaacggcgcgtgtgcgttcatcgcgccggatggctaccagctcacgcttcctaactattttgatgaacctgttagcgctaaagaagccgggattatagttgcgctgtatgcctacagccacttttgctgtgtggcctttgagcgtggttggcagcgcgtgaatgagacgatggccgagcgttatcacacgctgcgggactttaccgaaacgctcccgccagagtcacagagccgtatttttcgggcaatagattaa

SEQ ID NO: 183279 - DNA, 789 bp, Klebsiella oxytoca
atgacattgccaacacccgaaacctacgaagaactccagcacgcctacgattttttcgatgaacggctttttaataacgagctgccgccatgcctaatcaccctgcaacgtgaaaaacgtacttacggctattgctcattccagcgttttgttggccgcgagagcgggcaaatggtcgatgaaatagccatgaatccagtgtttttttccatccgtacaatcaaggcaacgttatcgtctctggtgcatgaaatggttcaccagtggcagtatcattttggcaaggccgggcggcgtgggtatcacaataaagaatggtccgcgatgatggaacgcattgggctaatgccttcagataccggacagcccggagggcgaaaagtagggcaaagcatggcgcactacatcattaccggcggtccatttgaccaggcgtgtgatgaactgttaacgcgcaattttcagctgtcctggatggaccgctttcctccgtaccagccgaaacccggagcgccgcagtcacccagcggaaaaggttacatcgatgatgaagatgatgatggagaatacccgccggacgacgacaacaccgacgaacccggcgagctggatgatgaaatcatcgaggctatgaagtttgtttcaccgccgccagaaaccccggtaaacaagtccaaccgcgcaaaatacacctgccctgtgtgtcatgtgaatctgtggggtaagccgggtctggtcgtgttctgcggcggggagcattgcgagaaggccgaacttcagccctcataa

SEQ ID NO: 183280 - DNA, 546 bp, Klebsiella oxytoca
atggcttcacgcggtgttaacaaagtaattctcgttggcaatttaggccaggaccccgaaatgcgctatatgcctaatggcggcgcggtcgctaacctgcgccttgccacatctgaatcatggcgagataaagccactggcgagcagaaagaagtcacggaatggcatacggtggttatcttcggcaagctggccgagattgcaggcgaatacctccgcaaaggttcgcaggtatacattgaaggccagctgcgtacccgcaaatggcaggataaggaccagcaagatcgctactcaacggaaattgtggttagcatgaacggcgttatgcagatgctgggcggtcgccagggcggcggcgctcccgctggtcagggcggtggttggggacagccacaacaaccacagtttagcggtggtggtgcgccagctgctgcaccgggggcgcaacagccacagcaaggcgggatgccggactttgacgatgatattccatttgccccggtcactctcccctttcctaaccatgcgattcacgcgctgtaa

SEQ ID NO: 183281 - DNA, 339 bp, Klebsiella oxytoca
atggcccgcaaacagacccgcagcatgacgcaggaagaatgggatcgcctcttacccgcaatgcagacgtttacccacttatcgaccgaaatcggccattctgttttggttaaaggggaaagcaataaagacgtggccgaacgtatcggacggaccaagcagaacgtgggttccacggtcaaacgtatttgggatctgtaccagtctgtagccgtcgattttgagggcgagaagctacgcaaagttgacgtttggctacctgaaaaaatggccctgaaggtgctgaaggaagccgaaaaatacaccatcaatcagaacaaagccgaacaatccgaataa

SEQ ID NO: 183282 - DNA, 882 bp, Klebsiella oxytoca
atggcagaggaaagcaaacagctaaccaaacggcaacaaaaagccattgaaacagcggcgctaatccggcaggaaccgccgcagggtgaagatatggcattcacccactccattctgtgccaggtcggtttgccccgttctaaggtggccggacgcgagttcatgcgccgttctggtgatgcctggcttgtcgtacaggcaggctggattgatgaaggtagtggcccggtagagcagccgttaccctatggcgctatgccgcgactcacgttcgcctggatttcatcgtatgcactgcgcaacaaaacgcgagaaatcgccatcggccacagcgctaatgagtttcttcaccttatggggatggactcacagggaacccgtcataaaacgctgcgtacacaaatgcaggcgctggccgcgtgtcgtttgcagctgggctttaagggccggacctataacggccagcccgtcgaacagtttgatgcctggatcaaagatggtgacgcgaagcagctcacgttatggccgggaacactcaccctgtccgaaggctattataacggcctgatagacagcgccgttccgctcgacaacagagcgttacatgtgctgaaaggctccgcgctggcgctcgatatatacgcgtggcttgctcaccgtctccaccgcatcgagggccgcccggtcatgctgtactggatgaagctgcgggagcagttcgcccaagagtacagcggaaagaatgccgataaggattttaaacgagcattcatgccagcgctgaaacaggtgctttcagtgtatccggcggcaaaggtcgaacaggttaaaggtggcctgctgctgtattgttccccgccacctataccgtataaatcctga

SEQ ID NO: 183283 - DNA, 333 bp, Klebsiella oxytoca
atgacagaacgccagcagaatagaaatatttgtgttgtggggaaggtcaaagacggaatgaccatcgatacctcaaaaatcaaaatcgaggacgtgtcagaaagagttatcagtattgatgatagcttcaatactgaggatgctactttgtctctgcgtacagtaatgagaaatgttgcaacacggatttatctaccatcagttttaaaaggcgcatgtccagcatttgaagcatgggcagataaacgctcggttggtgaaaagctaccgcgtggaaagtatttcaaatcgcgtgaatttatccgtcagttcaagatccaaaactacgtctga

SEQ ID NO: 183284 - DNA, 609 bp, Klebsiella oxytoca
atgtacatatttggatacctccgggcttctgcgcacgatcaggatgcgtcacgcgcccagcagaggcttaaagcctttgcgcttgagcataatcaccgggtagccggatggtacgttgagaatgcgtctggcgcgtccctgcaacgccctgagcttatgcgcctgctaagtgatgctgagaagggcgatcttatcctgattgagcaggtagaccgcctttcacgcctggatgatgaaggctggcagcagctgaagcgaatgatgcaggaaaagaacctggcgattatcagtctggacctgccaaccagctacgcggcgttaatgccccacggtagcgatgaatttacacggagtatgctgacggccatcaatagcatgatgcttgatatgctcgcggccatcgcccgaaaagactatacagatcgccgccgtcgccagcaggaaggcgtaaagaaagccaaacagaagggggtttatcgtggccggatgcccgaccagaataagcatgacctgatccgttctttgcggcaccaggggaaatctatcagcgagacggccagactcgctggcgtatcggaacggacggttacgcgggtgagcaaaagttaa

SEQ ID NO: 183285 - DNA, 186 bp, Klebsiella oxytoca; identical to SEQ ID NO: 18394

SEQ ID NO: 183286 - DNA, 309 bp, Klebsiella oxytoca; identical to SEQ ID NO: 18395

SEQ ID NO: 183287 - DNA, 339 bp, Klebsiella oxytoca
atgagtaagctaagaaccgttgcaaaaatattattgatgtactgcatcttcagtagcgccagcgcctttgcggagggaaatactaagggtgatccgtgtctcgcgttcacctgtatggccggaaagttacaaggtaacgaggcaacatcagggcctgactgtgtaatgggccgccagagcttctttgagatacgaatttacaccccctactacaaccccggcgcgacagctgctgctcgtaaagtatttctaagcacttgccctatgaccactatttcagaaaacaaaaacacactggagctgattattcagcgatacggacgttcatttcaggagtaa

SEQ ID NO: 183288 - DNA, 351 bp, Klebsiella oxytoca
atgggcaatgtaattgagtttaagaggctgaaaggcgaaagaaaccaaaaagacaaaatgcctaaaaggggggtactgctgtggttcaaaaagactgccctgtccctcaaaaacaacctctttacctactctaagtcatgttgctgtatttgtttgttttttgtaagcgctgcgtcaagaaagctattgaagttgatcgccacactatcaatcgtgctgtttcttgtcgagtggtttatgggccgtttgggagcgccagagttttataacctgttgttcctaatgggattgctgttggttatcaatgtgatttcaacaagctgtatcaaatggataagagggaacgtatga

SEQ ID NO: 183289 - DNA, 318 bp, Klebsiella oxytoca
atgcttgttcctttgcagtcggagaagcgaccaaaagggacgcctgtataccgtgacccggagaatccatttaacacctggagcgggtacggaaagcgccctgtctggttacaggaacgattgagtgatgggtatcttctggatgaaatgaagctgcctggtgcagtggtggatcgggataccaaatcccctcgataccgtgacccggctaacccggctaatacgtggactggcgttggccgtcgtcctaaatggttagttgagctgctggaaaaaggtgtggatttggacgatctgaagattcgagaaagggagtga

SEQ ID NO: 183290 - DNA, 783 bp, Klebsiella oxytoca
atgaaaaaatcatggtgcttgatagcggtatgtatctccggcctttcttttcaggggggcgctcacgcggcttctgcctcggatacgatcgccagccttgctgcccgatgcgcaccagacgtttcaccgctgacaatggcctatatcgtcggccatgaatccgggaacaacccgtattttattaacgttaaccgtggcgcaaacctgaaacgccaaccgcaaaccgaagctgaagcggtagaagttgccaaccggctaatcaaaaacctcaagaaagatgaaagcatcgatatggggcttgcgatgattaattctaacaatttgagttcgttaggtatcacggttgagcaggtatttaaaccctgcatcaatctccgcgccagtcagaccattttaaaagactgttatagtacggccctgaaatccaacccgcccggccagatagcattaagacacgcgctgtcctgctacaacaccgggtcgcaagtgcgggggatttcaaacgggtatgtcacgaaagtaattaacgtggctaaacagtctgatttaaagatccctacgttgctacctgatgggcagaacgaggaagcggagagccagcctgtgagtgcgaagggcgcaacctttgagggtgagcacgatgcgtttacgggtgaaagtgatagtggtggtgatgtgttttcgcaggataacactgacgcgtttctgaccaaagcagagcaaaaagggagtgaggttatgaatgacaaaaatctatctcctgttgcagtctcaaataattga

SEQ ID NO: 183291 - DNA, 279 bp, Klebsiella oxytoca
atgacaaaaatctatctcctgttgcagtctcaaataattgatttatgcgaagccggaaaaatacaggaggttgtaattgaaaggatttcactaaagcagtggtatcccatatttgacgtaaaggatgaaaatttgggtgaggttcgttgctccattcggttgaataaagatcacgaacttcgcacatgggcggacctgagactcctgacggagtttcttctggataagtgcaatgtcggcgagtgccgattgatattgaaatcaacaaaggaaaggtag

SEQ ID NO: 183292 - DNA, 297 bp, Klebsiella oxytoca
atggttacttttttcaaaaataacgggtttgcgctgctggttgcgctgttatgtatcgcagcgccagaactggccctcgcagctggcggggcagacaccggggccagtacaggtaacaacatcaagtcatggctggatacctggattcctatcgcctgtactatcggcgtgatcgtgtcgttcctcgtttggctgttccatcttatttccgctggttttatgttccgtctcgcaatcgcaatggttggcattggctccgcatcatatctggtatccctgactggtatcggcagctga

SEQ ID NO: 183293 - DNA, 318 bp, Klebsiella oxytoca
atgtttgaaaatggacaacggccattatttaaaggtgcaacacgcgtcccccggcttgctggcgttccgcgtactgtggcgctggttatcttcatgatctcggccacgctgtttatgacgttacatttatggtcactccttgtatttgcggttctgtggtcaattgcagcagcgctaactaaatacgacgaccgtatgtttcgcatcctttcattatggctacagactaagtttcgtaatgcacacgacacgccatttaaacaatggagtggttcaagttattcccctgtggattacaagaaaaaggagctgaaataa

SEQ ID NO: 183294 - DNA, 2574 bp, Klebsiella oxytoca
atggtggcattgcttaaacctaaaacgttcagagacgagccgagcgttaatgaaaagtatttgcagcatagccagcaccttgatgattatattatctcgatgcgtaatggcgatctgcttgcattctttaaagtcgatggccggacacatgactgtgcctctgaccgtgagctgattacatggaacgatgatcttaatacgttgattaaatccttcgggactgaccacgtagaggtctggtcacacgagtatcatcaccagtctaaagagtatcctgactctgagtttactcaattcttcccacgctacctggatgaatacaaccgccgcctgcaaacggggtctaaccagatggttaatgacctgtacctgacggtgctttatcgccagataggcgataagacgcagaagttcctggctaagtttgagcgaccgtcagctgacgagttggctcaaatgcaggctgaagccttcaccggaatggaagaagtctgtgagcagatcatggaggggatgaagggctatggcatcaagcgcctgggtatttattaccgggataaaaacggtgaggaaatagcgctaactgacactgaagaaaaacagtcgctgcttgaagtagacgaagcagatattttcgacgaaccggtaatgctcaacgtcgctgataccgtcccgccgactgctcacgcttattctaaagcgctggagtttctttattttctggtaaatctggaatggtccattgttcctgtttgccgtgaccgtatcggttcttacatcatggaaaaccgtgttgtcagttctgtatggggggatattgttcaggtcagaacgctggacagcaatttttatactacagctatcgaaatccgtgattacgaaaaaaacacggaaccgggtcagtttaatttgctgaaagaagctgattttgaatatctgctgactcaaacattttcttgcatatccgaggcttcagctaaaacgcttctggagcgccaggagaagtccatgatggaaactggcgacagaagccagtcccagcttgaacagttgaatacagcgctggatatgctgctttctaaagaaattgtgatgggctatcaccatgccactattcacgttttcgataccgatcagcgagcagtgcagcgcaaggcccgtaaagctaaagtcatgctaagtcagtgtggcttcgtggggggcggcgtagggctggcctctgaagcggcttactttgcgaagattccgggtaatcagaaatgggcgccacgcccgacgccgattaactcatggaatttcttccatttctccccgtaccataattttatgcgcggcaaaccggacaataatccgtggggtccggctgtgacgatgttccgcaccgcgaacggtacaccgctgtattttaacttccacgtcaccccactggaagaacgctcaatcggaaagcgcccgctggggcatatgttgcttacaggtacgtctggtgaaggtaaaactacgctgctggatttcctgttatgccagtgcatgaagtttaatccgcgtatgttctgctatgaccgtgaccggggaatggagccgtttattcgcagtgtcggcggctactataaagttttacagcagggcgtaaaaactaacttctcaccgctcaaacagaaaggcacaccgcgtaatattgcgaccactaaaaatattatgcgtgtctgtgctgaaattacaaataacggcccattagataaagatatggggatggaactcaataaggctgtggatgctgtcatgggcgaacactctttaatccctgttgaggccagagatattacccgactgaaagggtacatcacgcacccatatctcaaagacctgattaatgactggacgaatgacggccaatacggctggctttttgataatggtgaagatgcgttagatctcgatgctcatgatattttcggcttcgacctgacggagtttattgctgcggaaggtgagattcccagcccggccagaacgccattgttaatgtacttgctttatcgtattcgtaattcaattgacggaaagcgccgtgttattcagtgtttcgatgaatttcatgcttatcttgacgatcctgttttaaagctggaaataaagcgtggcattaaaacagaccgtaagaaagatgcgatttatttgttttccacgcaagagccaaatgacgcgctcgcaagcagcattggtaaaacggtgatgtcgcaaacgccatcaaaaatctgcctgcgcgatcctgatgccagccgtaaggactactccttcctgaccgatgcggagtttgaagtaatgtccaaaatccctgagcactcgcgccagtttttggttaagcaagggtcacagtcagcgctcgctacattcaacctgaatatcaacggtagtaatacgcctgaacgggatgaaatcgagaagaacaacattatcagcatcctttccggtgagccgcaaaatgccgagttggccgaggaattgataggtaaatatggtccagaacccgaaaactggatcgaagaatattggcgtctttgccgtcattaa

SEQ ID NO: 183295 - DNA, 702 bp, Klebsiella oxytoca
atgaaagcgaagttaattgctattgcactggctgggctgttaggtgcgggaaccattagtacggcttctgctatagagggtactggtgttgtggtctacgatccgactggcgtggctaaaatgcttgaccaaatagaacagttaaagcaacaactggcaacccaagaggcgacttataaaagtctgacaaaaactactgatattgggaatttgttgggttcgtctacaagtgccctcgctaaaaatcttcctgacgactggaagaaagtttatagcgatgccatgaactcatcatcgtccgtaactggtgatgttcaaagtatggttggtgactttaattcggaagttgatgatatgaatccttctgatgcaattaaagctctaaataaaaagttggccgagaaaggagcatatgaccgtgttatagctgaaaaggcatataacaatcagatgcaggaattaagtgatatgcaagcactaaccgagcagatttccacaactaaagatgtaaaggaagttgctgatcttcaggctcgcattcaaaccgcgcaaggcgcaattcagggcgagcaagcgaaactgaagctcatgagtatgcttcaggaatcacaagataagttgtatgaagctcaaagagaacgcgccgtaggtaattttatttatggttctgatggtggtcataaccccgctccattgaaataa

SEQ ID NO: 183296 - DNA, 1038 bp, Klebsiella oxytoca
atggcatttaatactgttcagcagatatttgacataattgatgatctgataaatatgatggttgataccaacgtaacaaccatcattgcaaccgtcacaccaacggttgcaatatttttgaccatcaagtttatggctcaaggtgcatattccgctcttagccccggagggggcggggaggcgcttggggatttaattacacaatatatgaaagcggctgttgttttgagttttgcaacggctggcgggttatatcaaaccgaccttgtgcatttggctttaaccctgcctgataattttgcttcaatattggtgactcaaaataaaacctcaagcacagggatggcagccattattgatactggggtagaccagtctataacggcaatacaaacagcgttcgaaggggctggcattagcgctaacggcataatgagcgcagtaatcggactcattctaatagcagcgaccgtagttctttgtgggttgggttctgcctttgtaattatggctaaagtgctactggctataagcctgtgtttaggtccaatagctatattctgtctcctgtggaatccaacaaaaggcatatttgctaagtggatggggaccgttattaattacagcttggtcatagttcttttggctctcgtatttgggttgttaatgagcctctttacaaaaatgatttccggtcttaacggcagcgaaggctttgatgccttatcaacggctattggactggtcattctcaccattgtttccgtctatgtgttgttccaggttccagcggtagcgtcgaatttcggtagcggtgtttctgctgatatagcttctgcggcccgccatgcgggccactcgatgaatacgatgggtaatgttgcctctaatgggatttttggtggagcgaagccttcagcaagaccttcagcagctggcggcggcggtggacaaagcgccagcagtagcggcaatgcaggggctggcggttcaggtctgacaggaaaggcgcgtggtagccggggaaaagcagcataa

SEQ ID NO: 183297 - DNA, 696 bp, Klebsiella oxytoca
atgagagagaaaaagaaagggctgaccaaagaggccatcaaagagttcaacgaaagccgtaaagggctggaagtggacgttatgaacgaagtgttatcttcacgccgcacggcgtggatagtcgccgcggtcgcatccgttgtagcggttgtggcaatcggtaatgctacctttgtgaattaccgctacagccagccaataccgccgttcctgttgacgctgaaccccagcaatcacgaggtatcacaggttaagctgacgcgtgacgatgccacctatggcgacgaaattgataagtatttcctgactcaatacgttatccaccgagaatcctacgatttttattccctgcaagtggactatgacgccgtaggtttaatgtccacgccgaacgtggcggaagcctacctttcccggttcaagggtaagcaagggattgataaggtcctgggtgacagcgagacaacgcgagtaagcatcaactcaaccattctcgatagagagcatggcgtggcgaccattcgctttacgaccgttcgccgctctcgtagcaataactttgacgatccaccgaagcgctggattgccatcctgggctacgagtacaaatcgctggctatgaacgcctcgcagcgctacatcaacccgctcggcttccgcgtcaccagttaccgcgttaaccctgagtcgaactga

SEQ ID NO: 183298 - DNA, 888 bp, Klebsiella oxytoca; identical to SEQ ID NO: 39585

SEQ ID NO: 183299 - DNA, 1134 bp, Klebsiella oxytoca; identical to SEQ ID NO: 39586

SEQ ID NO: 183300 - DNA, 1002 bp, Klebsiella oxytoca
atgaatcaatcatcggcttattaccagctggggccgctgcgggagtatttcgaagatccgggcgtatttgaagtccgaatcaaccgttataacgaggtggtttgtgacacattcgaaggccgcaaaatcatccagaacgacagcattaccggcgcgtttatcgataacctgactgcggcattaaccagcgccaataacgtttcgcgccagatgattaatgacgtggtgttaccggacggttccaggggaattatctgtttaccgcctgcggtgatcgataacaccgccgctatcgcttttcgtaaaaatatcgcgctggataaagacctggcgacgttaagccaggaaggtatctttgagttttgccgggaaattgacagccataagcgcgagctggacgacgacgatctcctgctgaaagagttataccgggctaaacgccgggaagaatttttgcttactgcggtacggaaaaagcgaaccgttgtcgttgtgggagaaaccgggtcagggaaaacggtactcacccgcgccctgctcaaagccattagcccgcaggaacgcgtgataatcatggaggatgctcacgaagttgaagctacccacctggaagaagccgtttatatgaaatatggcggtaaagataaaccagggctggctacgccgacgcagtgccttaaagcctgtatgcgcctgacaccagatcgtatcttcatgacagagctgagggatgatgctgcatgggattaccttcaggcgttgaataccggacaccctggcggtttaacctccacacatgctaactcggcgatggatgccttcacccgtatagggttgatggttaaagctaccgaagtgggccgtatgctggatatttctgacattatgcgcctgctgcactccactattgatgtggtcgttttcatggcgaaaaggaagattcgcgaaatctactattcgccagaatataagtatgagtgcatgaatggagggataaagtga

SEQ ID NO: 183301 - DNA, 528 bp, Klebsiella oxytoca
gtgaaaaaaggagcaatcatattcctgacgggggttctggccttttcctccctgccctcaatagccgccgattcgccatcggtacaggtcgggttttctcctgaaggtagcgctcaaacgttggtaattggcgctatcgactccgcgcaatcctcgatccgaatgatggcttatagctttaccgcgatggatataatgcaggcgctggtcaaagctaaaaatcgcggtgtcgatgtgaaaatcgttatcgacgaacgcggcaatcgtaatgacgtaagccaccgtgcgatgaagtacattgtgaaaaacgagatcccgctgcgggtggatagcgactttcctatccagcatgacaaggtgatgattattgatgaacggtcagttcagacgggcagcttcaactacaccaaagcagcagaatctaaaaactcggaaaacgcggtggtgatctggaacatgccccagctggcaaaaccttatcttgagcactgggaggaccgttggaatcgtggggaggactataaatga

SEQ ID NO: 183302 - DNA, 363 bp, Klebsiella oxytoca; identical to SEQ ID NO: 18414

SEQ ID NO: 183303 - DNA, 666 bp, Klebsiella oxytoca
gtgatgttctggaaccgaaataagaaagaaaaagccgctgccggcaatgaaaaaaatcgcttcgatcacctgctttcggtggccgaaaaattacccgttgaggcgctgcctgatctcattcgcgctatcgtgcggccagtgcagagtgatttcctgctggcggtagccgaggaagggactgatgcccgcccggatatgaccccgcaggagttcttctttgaggggcttatccaggtgcaatcttacgagaagatgaaagaaggcgagctggacggcgctgattatccgttgtcgctggcaagtgaaatggtgctgccgtggccctggagcctgacacgctatatcgataacgtttcgcacattggaacccataagggcaggccgtggaagcaggataaaatcaaccactatgttgacttgtggttgccctggcgcattggctttgtgcgcggtggcaaccattccataacggcgggcattctggccggagaagggaccgtgataccggatcacgtttacgatatgtcctacctttttgagctggtccgaacggacggtaatcactggttcgttgacggccagaaggttgaggcggtgaaatccgggcggtcagcggctgttttcgaaattggccgtttacttacggaaggagcaaaaaatgggtga

SEQ ID NO: 183304 - DNA, 3219 bp, Klebsiella oxytoca
atgcttgatattacgactatcacccgtatcgatattgcgtcagttgtaggttactacgctgatgcaaaagacgattactatagcaaagacagcagctttaccgcgtggcatggtcagggcgctgaagcgctgggcctttccggcgaggtcagttctcaacgcttcaaagagctgcttgtcggggagattgaccctttcacgcagatgaagcgctccagcggtgacgcgacgaaagaacggctgggatacgacctcacattttccgcgcctaaaggcgtatcgatgcaggcgctgatccacggcgataaggcaattatcgccgcccacgaaaaagcggttgccgctgccgtccaggaagcagaaaagctggctcaggcccgcacgacccacgcagggaaaaccattacgcagaataccggtaatctggtagttgcttccttccggcatgaaacatcacgcgcccttgacccggagctgcatacccacgcctttgtcatgaacatgacgcagcgcggggatggtcagtggagggcgcttaaaaacgatgaactgatgcgggccaagatgcacctgggggatgtctataagcaggagctggcgctggagctgacaaaggccgggtatgaactgcgttataacaacaaaaacaacacctttgatatggcgcactttacggatgaacaaatccgtggattttcgcggcgttctgctcagatagaagaagggctggcggctatgggactgacccgcgaaaccgctgacgcacagaccaaaagccgggtatcgatggcgacccgcgacaaaaaaacagacgactattcgcgtgaagatattcataaagagtgggttaatcgggctaacgagctgggaatagatttcaatgatctgtcctgggcgggcaaaggcaaggacggcccgcaaacgtcaatgaattccgtccctaacttcaccagcccggaggtaaaagccgaccgggcgatccagtttgcgcttaaatccctttcagagcgcgatgcgtcttttgaccagtcccgattgctggccgtggcaaataaaaaggctatcggccaggcatcaaagcaggatattgaagcggcctattatcgcgctgtggcaaagggagccattatcgaaggtgaagcgcgatacaccaccacgactgaccagagaagcaaagacgcgccgccgctacctgccatgaccaaagcggaatggcaggcgcagctgaccgacaaaaaagggatgaacaacggccaggcgaaggcgttagttgctgaaggtatcaagtctggccgcctgaaaaaaaccagccatcgggtaacgaccgttgaaggtatacgggtagaaaaagcggtgctgaatatcgaggctcgcggtcggggcaaggtgatcgccgcgctgacaagcgagcaagtcaccgcgcagctggtcggcaagacgttgaaggccgagcaacagaaaagcgtcgtagatatttgcaccacgacagatcgctttgtggcggctcacggcttcgccggaaccgggaaaagctatatgactatgagcgcgaaggccgttctggagtctcagggctttaacgtcaccgcactggccccctacggtacgcagaaaaaatccctggaagatgaaggtatgcccgcccgtaccgttgccgctttcgtgaaggcaaaggacaaaaagatagacgagaaaagcgtggtctttatcgatgaagcaggcgttattccggccagacagatgaaggtgctgatggaaaccatcgagaaggccggggccagagcggtattcctgggcgacacctcacagacaaaagccgtagaggcgggcaagccatttgaacagctgatcagcgccggaatgcagaccagctatatgaaggacattcagcgccagaaaaatgacgtgctgcttgaggcggtgaagctggccgcagagggccacatatccggttcgctggcccgactcagcaatattagcgcggagaaggaccaggataagcgactggaggcggtagctaatcgctggctgtcattctccccggagcagcgcgaaggtacgctgattatttccggcacaaacgaatcaagggtaatcctcaacagtcagattcgggaggcgttgcagctgcaaggaaagggtgtggaagtgaattttctggagcgcgttgactccacgcaggccgaacgccgggacagtaaatactaccaggcagggcaaattatcattcccgaaaaagactataaaaacgggcttcagcggggcgaatcttaccgcgtactggatacaggtccggggaaccttttgactgtggccgggagcgacggccagaaaatcagcttcagcccgcgtacccataaaaatctgtctgtttataccagcgtggccgccgagctggccgtgggtgacaaagtgatggtgacgcgtaacgataagacgctggatgtggcgaacggcgaccgcttcaccgtgaccgggaccaccgagaaaggcacatttacgctgaccaacgcgaagggccgggaaatcgagctggaccagaagcaagccgcctatctttcgtatgcctatgcaacgaccgtccataaagcacaggggcttacctgcgaccgggtgttgtttaacatcgatacccgttcgctgacgacttccaaagacgtcttttacgttgggatctctcgcgcccgtcatgaagtcgagattttcaccgacgataaaggccgcttgttgagcagcgccagccgcaacagtcctaagaccacggccagcgaaatagaccgctttttagggatggaggaacgttacaaagacgtaaaccggagctatggccatgacgatggccaacaggcaaaaagctatggccatgaagctggccaacaaaccggagagaaggaaaacaccatgaaaaatgcgacagaagccgcccatgatggccccgatacttcaggtactgaaaacacgtctcaggatttgcgccagcgtgagcaggaggaagtcaacgccgctatccggtacgagcagaggcaagaagctacaccggaaatggaggcgaacccctaccacgactatgaacggtatgctgacgaaggcccggactatggcgacatgcaggactacagcacgtatgaagaatatgaacgtgcgcgtgacgtggaactaccgcagcatgagcacgaaaatcatcaacatgaccacgacaaggagggctacggcctgtga

SEQ ID NO: 183305 - DNA, 1533 bp, Klebsiella oxytoca
atgacggaacaagaaagaggaattatatttttatgctcgttgctggggccgataccctttgtatggtttattactgcaaagtttgtttatggtattaacagtgaaactgcacactatcttgtaccctatttgctaaagaacacgtttagcttatggccgttatgggtggcgattgttgcaggcgcggttatagggttgtgtggcttcattggattcatcatttacgataagggaagggtgtataaaggaccgaaatttaaacgtgtactccgtggcactaaattagtcagagcctcgtctttggccgaaaaaaccaaagagcgcggtcataagcaattaactatcgcaggtgttcctgtccccactgctgccgaaactttacacatttcaattggtggcgctacgggggttggtaaaaccacaataataaaggaggcaatatattcaagcctgaaaagaggctcggataagcgcatcgtacttgacccaaatggtgagtatgtggagacgttttatcgtcctggtgatgtaattctcagtccttatgataagcgttctcctggctggtctatgttcaacgaaatacgcgatgactttgactatgatctctatgctgtatctattattcaggaaagtaaggaacgttcggcagaggaatggtacagatatggtcgtcttatttatcgcgaggtatcgaagaaattactcaagataaaacgcaatccgacaatggaagaagtaatgcactggtgtaccattgttgagaatgacaaattaaaagaatttgtaaaaggcactcccgcagaagccctgtttattaaaggcgcggagaaagcaacaggtagcgcccgttttgtcctgggtgacaaattagctccacacctgaagatgcccgctggcgatttctcgctgcgtgactggctggaagatggtaaacccggcacgctgtttatcacctggcaagagcagatgaaaaagagcctcaacccgctgatttcatgctggctggatattctgttttcaagtctgctgggtatggggaaacgcgatcagcgaacgttgttttttatcgacgagctggaatcactggaatacctgccaaaccttcaggacttactgactaagggccgtaaaagtggcgcgtcagtatgggcgggctaccagacgtactctcagttggttgagcgctacggcatcaacatagcggaaaccctgttgagtaacatgcgatccggtatcgtcatgggggggagtcgtttaggtaaaggaacccttgattttatgtcccgcgcattgggcgagattgagggcgaagtggagcacaaacaaggcaacccattccaggcgggcattggtaacaggccacgcatcgaaacgcgcaccgtcagagccgttactcctacggaaatatcagagctgaaaaacctcaccgggtacgtctatttccctggtgatctgcctgttggcaagttcaagactaaacatgtgcaatacacgcgtaagaacccggttccgggcatcatcatgaggtag

SEQ ID NO: 183306 - DNA, 423 bp, Klebsiella oxytoca
atgccgatcatcacatgcaaggtaacggacgaagaaaaagagcttatcgacaggctggccggaacgaacagatcggactatatgcgccgttgtttgttggccggatcaggtggccggataggtggattgagtcaggttacggaacagataaatgaagtaaatcgacgcctcgatattctgtttgaccaggtatcagagacagacatgagcgcgttttcctcggagctgaaaggtctggtcaagcagctgtcacaactcaagttgccgcctcccggtcagatgatgctgcacgaatccctggcaatcgagacggtgatcctgctgcgttcgatggcaaccccggccaatatgaaagccgcctggggagagctggaacgtaacggatataaggtatgggaaagtaaacaagagaggaaggaataa

SEQ ID NO: 183307 - DNA, 432 bp, Klebsiella oxytoca
atgaagcccaaaagcatcagggcagcaattcagatgatgttgccggaagtagaagaaatgctgtcgctgggagtctccagagaggaggttttcaaggcggtatctgaacgcttcggcctggagaatgtgaacgtccgaagttttgatactgccctgtatcgggccaggcaaaaccgggcgaaacataccgcccctgattctgtattgcacaatacagaatcagccggagccagtgagcaacagaagaaacctgtattgcacaatacagaaaaacccgcgaagtctgagcaggtgaaaaaagatgtattgcacaatacacaaagtgcgaccgagggagacgaaacgaaacagtcaccgggtatcatcggaaaggaattttttgacgaggcaagagccgagttcgatcctaatgagttcatcaaaaaatattga

SEQ ID NO: 183308 - DNA, 717 bp, Klebsiella oxytoca
atgaaagtagcggttattaattacagtggcagcgttggcaaaactttagtttcaacttaccttctcgccccacgcctgaaagatgcgaaatttttcgcggtcgaaaccattaaccagtcagcgtctgatttagggattgaaaatgtcaccagttttaaaggtgatgatttctcccgtctgattgaggatgtggtttttgaagatgcagcgattattgatattggcgcgtcaaacgtggaaccgtttttaatggcaatgtcccgcttcgatggcggcgcaaatgaatttgatatgtatttcattccggtaacaccggaagataaagccatcaaagaaagtatgaaaacggcgcacacgttaagcaaggctggcgtggataacaaaaagattatctttgttccaaaccgcgttaatccgggtgatgatgttgaaaatgttttcagcccgattttcgacttcgtgaagcaaactaaagtaggccgcattaataaaaactctgcgatctataatagtgaggtgtacgaatatcttgcgcatcacaaaatttcgtttgaaacgctgaccgctgaagatgcggaagaatttaaagcccgcgctaaagcatcagctgacgcagacgaacgccgcaaaatggcgcgtcgttatacttacatgaaacaggctattccggttaaaagtaacctggataaaacattctccctgttaatcggagattaa

SEQ ID NO: 183309 - DNA, 369 bp, Klebsiella oxytoca
atggataagcagcccgataaattagacgtattgatggactggtttttgggagacgcgaaggaaattgtagaagccatgaagcaagtgaaggttgaacaagccgacatgcttcagcagctgggcgaactcaaaagcgcacttgaattgacggcagacgattcgagagcggaaatcatcggcagcctgagagacatacaggcagcgatgaaggaggaaaacaaagcgcggtcagactttctgacgcgctggcaatcactccagcacaacaacgccagcaccatcgttaaccgcgtcgtgatcatgacggctgtttgttccatcgtcggcgcggccattggcgcggcgctgaccttactgatcctgaagtaa

SEQ ID NO: 183310 - DNA, 204 bp, Klebsiella oxytoca
atgggtaaacaaccctattcaccaaatgagtttttccagctgctgctgatccgcaactggcaacagtgggagaaagaaaaagccgcgctgggtacatgccagcactgcggaaaatcaaaagccggtggcggctgcggcggggagtttcaaaaggaaacataccaatgctggctggcgcaggacgcaaacgcgcttaacctttag

SEQ ID NO: 183311 - DNA, 183 bp, Klebsiella oxytoca
atgacaaaaatcacaacaccgtcccagctgaaagcagagctggagagccagaaaacctaccttctcgaagcctgcctgatggccttcaatcagttacctaaccagcgaacaaaaggcgcgttcccgtcaacatacgcgcttgcagcaaagattgattacctgttgcagcaggaaaaaaaataa

SEQ ID NO: 183312 - DNA, 207 bp, Klebsiella oxytoca; identical to SEQ ID NO: 39587

SEQ ID NO: 183313 - DNA, 678 bp, Klebsiella oxytoca
atgaaactgactcgcgaagcaaccacagcagcaaacccggatttacgcggccgcaaacatcatttcatcatcgagagcgccacggcggcagagctggaagcgatggacgagatcctgacgctggcaggctgggaaaatgacagctgcccttgctatgaggacggctttggttgtggttactggatcgacatttccgaagtggcttgtttcaaagcggcatacaaagcagcgaaaacgggcctgaaaggctatatggcagttgaagcggagaaggccgcagcagtgcgcgaagccaccgcagaaccagccccggaacatattccggcggcaagcctggacgattacaccgtgtacacattgcatgaacctattgaagcggaagaaggcaagccatacgcagagaagcgcgtaactcgcgcctacgttgcccgcagcatgacccgcgccctggcgagccaggagaagcatgtagagaagtacaaagcgcaggatgttatctggctggcggaacacaacgcagaccacgcttttagaatgggcgttttaagcccggaagagttcacagagatctatcacatgatacgggcagagaacgcgcagcccctgcttattctggcggccctgcgtgatgccctgctaaccggagcgccagcacttgccgccgcccgtgcggcataa

SEQ ID NO: 183314 - DNA, 498 bp, Klebsiella oxytoca
atggctgaccatgacgacgcaccggaaaaaattaagtgcctggagtgcgggaaggagttttctttcctggcccctcatttgagtaaagcccaccagatgaacgccagacagtaccgggaacgctggggcataccactacacaggccgcttgccagtgccgagcattcccgccagtgtcgggaaaatgttttgcgccgtatccggcggggcgaaattcgccccgctgaccagctcgcgctcatggccgaaggccggaagaatgctcctgaacgtgcgaccagcaccaggttgcataaagtggcggcggcgaacgtcgcgcgggtacatcagatatggaagcattctccggtggtgaaggtcgttcctgatacgctcagggatgaagccgtgcagagaatgacggccagaaaggtgactggtgagaaagttaaggatattgctgccgatctgaatctgtcggttgggtgtctgtacaaatgggtggcgagcgctaaatag

SEQ ID NO: 183315 - DNA, 201 bp, Klebsiella oxytoca
atggaaaaaggaaaactcgcccagcaacagggttttgacctggagttgcagatcctgaaaagccagaggggctattacattggcacggcgaccagtgagggctacccggtatcaagggaatcagctgaatacttcccggatagcagcaccgcgcagcaggctttgacggataaccgctggacacagcgagaggattgttaa

SEQ ID NO: 183316 - DNA, 270 bp, Klebsiella oxytoca
atgaactatctgatcatcatcccaatcgcgttgattctcgccgccgccgcgctggcccttccgtggtttatggttcgccagggctaccgcgaacaagtccagctgggcggtgcgtgtactaccgtgctggggctggccgcatcaacaggcgtgtttagctatgccgataatatgccgctggcgctgctgtacggctctgcgtcggtcgtttcattcctgtatgcgcttgattgcttcctgccgctttacctgtcacgtaaatctcactaa

SEQ ID NO: 183317 - DNA, 792 bp, Klebsiella oxytoca
atgactactttaactgtcggccagtgcctcacctcttttaaaaacgagtatgtagtaagcgcggttaatctggctgacggcaaaatcagctataccatcctcggcctgaatgccccaacctgcgccccgctgctggaaacttccctgcgcttttaccaggtgatcgataagacccttccactcgatgaactccgcgcccgccgtcaggttgtgcagagtgtgaccgaccagcgcgaagcgagacaccaggcgaaagaagatgcccgccagctggcgaacgaacgcgccagcgctgacccggaaaacgccggattgctgaccacggccaccgaaagcaacaccaccaagctagccgctaaaaacatccgtattctgctgaaaaagcatttccccggagtgaagttttctgtccgtatgcgtgactataacgcgctctatgtttcgtggacggatggcccaaccaaagaggctgtagaagcgattacagacaagtttgaggaaggtagcgttaactcaatggaggacatttacgaatacaacattacgggcttccaccgtgtttatggtggcgtgaaatacctgttttgctcacgcgacctgaccgacgcgctgatcgctgaatctatcgaactgctgcgcaaagaatacggcgaaaccaccatcccggctgatgtaacgcttgaggcgtacaaatccggggcgctggcggggcgcgggcatgactgctttacctgggggcttgcagcgcaaatccgcatcaatgcgggaaaggtggataaatccagccgctga

SEQ ID NO: 183318 - DNA, 516 bp, Klebsiella oxytoca
atgaaaacaaccgtatttgttacccatcacaacattcatctgtcccgtgttaactcggcgctggcaaaaagtgcagcatcactgcccgatattaatgtgcgttatctgtatgacatgtatccggatggtaaaatcgacgtggccgctgaacaggctgcactggaaaataccgatcgtattgtgctgcagttcccgatgcagtggtacagcacgccgccacttctcaagcagtggcttgacgatgtactgacctacggctggtcacatggtggcgaaacacaggcgctgcgtggcaagcaactcatgctggcagtttcgctcggtggtgctgagtctgcgtatcagcctgatggcgcagccggtcatacggtaaacgaatatctgctgtcctttgaaacaatctccgggtatctgggtatgcattatctcaagccttttattaccggcggcagtgcgacgatcaccgacggagaaattgcggcacaggctgaacgctataaagcggtattagtctga

SEQ ID NO: 183319 - DNA, 966 bp, Klebsiella oxytoca
atgaaaatgagaaggttggggagccaggggcttttcgtatcggaaatgggactggggtgcatgggcatggatcatggctatggctattcagttgaaatccgtgaacgaacaaagctgatagataaggctgtggagctgggttgcaaccttttcgacactgcccctatttacggttttgaaaatgaagaacttctgggcattgcgctcaaaaaacacagggacagcgtcgtcatcgcgaccaagttcggcgtaaccgggatggaaactatcgatggtcacctggtgccagtcttagacagcagtccggcgtctgtcagaaagcaactggacggttcactcagtcgccttcaaaccgaccatatcgacctgttttatcagcatcgtgttgatccaaaagttgagccggaagtcgtggcgggcttaatgaaagagctgatcgcggaaggcaaaataaagtactggggcctatccaatgcgccagcgtcttacatacggcgtgcccatgcagtctgcccggttaccgcagttgaagatcagtattcgatgatgtggcgtaagcctgagcaggatctgtttaaagtctgcgatgaacttgatattggctttatggcatacagcccgctgggtaatggattcctgagtggtcaggtgacagttaatacaacctacggggaaggcgattaccggggcatgatggggcgctttaaacctgaagttatggaaaataaccagtcgcttcttaatctaatcgctgacattgccgatagaaacaacgcaacttcggcacaggttgtcctcgcatgggaactggctcagaagccttatatcgtgccgatcccgggaacaacgaaattacaccggctggaagagaattttcatgctgcaaatgttcagctcagtaacgctgaattgaatgacatcaatgaagctttatccaggattcaaattgacgaaacattcttttaa

SEQ ID NO: 183320 - DNA, 894 bp, Klebsiella oxytoca
atgaataaactagatgcgctgaaattttttgttgccgctgcagaaacgatgaattttcgtgaagcagcggtcagactggccatttctccttcagtggtgacgcgcactattgctgaactggaaaatcagctcggcgagccactttttaagcggaatacccgatctattgtgctgaccagctttggtgagctcttcttgccgggggccatgcgtttgcttgaggattcagaggccctgtttcagacggccagagatgacaatgagatgaaggggattgtgaggatcaccctgtttcgctttcccgggcacgaacaggtactctatgagcttctgactgcgcttcgtccttatcctgagctgtttatagactggcggctggaaatgatgaagctggataccgttcagaaccgcattgacatggggatccgtattgagcgggagccaaatccgaactttattatcaggcccattacgcttgttcatcacgcgctgatggcatcacccgggctcattgagaggctgggggcgccggaaaatttcgacgatctgcgccagcgctatcctttcagtggcctgttgaatcctgaaaccggcaaagtattcgaatatatgctcgatggcgtcgatacttttgtaccacgacatcttgaatttattactaccgactcccagtctgagattcaggctgcattagccggtaaagcagtgatccagtcgagtaatctggcctgcagggaatatctcgaagacggcaggttggtgaatgttttaccggaactaaaactggaaaactggcagctttatctttaccgcccctatcagacccttgtgccgcaacgcatcaggaccgtttttcacatccttgaagatattttactcagacatttcagttaa

SEQ ID NO: 183321 - DNA, 888 bp, Klebsiella oxytoca
gtggatcgcattcaggctatgcaggtttttttaagggtggctgaggccggaagctttgtccgggctgcggaaacactgtccctgccttcctctactgttactagcacaatcaaaaacctggagaaatatctgcaggtgcgtctgctcaaccggaccacaaggcgggtcagccttacgtctgaaggtctgcaatacctggcgcaatgcagggaaattcttgccttaattgaacatactgaagccagtctggctgattcgaacaggcgcccccgtggccgcttacgcgttgatatgcccgggggtatcacccatttcatcgttatgccaaatctgaaagaattctaccgccggtatcctgatatttacctgatgatcggtgtcagcgaccggcaggtcgatttggttcaggagggtgtggattgcgtgatcagaaccggagagttgcttagctcaacacttgttgcccgtccgcttgggcagttccgctggatcacctgtgcctctcccgattatctcagaaagtatggtattccactgtcacctcaagatttatctcatcacagggctatacattatttttctgggcaaagccgacgtacagacgaattgcgttttgtgcagggaacggaaacgctgtccgtatccgtcagcgggcaggccgccgtcaacgagacgggactctatataaaaatgtgcctcgaagggttcggactggcgcagcttgctgaaaacgttgtagcagaacacctgcagaaaggaacgctggttgaagtcctggccgactggcaaccgtcgtctgttcctgtcacattgctttatccccatcagcgttttctttcacccgcagtacgcgcatttgcagactggatagatgaaatctttagttga

SEQ ID NO: 183322 - DNA, 1398 bp, Klebsiella oxytoca
atgaccaattacaacagaaatattgttaagaaacagacggaaaacccgccggtaacgctgattcgcggcgcaaccatactgagtatggacgatagcgtcggtaacattgagcgcggtgacattctcatcaacggctcaatcattaccgccgttggtcagaaccttgacgcgccaggtgctcgtgtcattgatgccaaaaatatgattgccatgcctgggatggttgattctcatcgtcacgcctgggaaggtcagctacgccgcatcaaccccaacgccacctgtctggacgactacagcaacgccacgcatttttcgttcgctaaatattaccgtcctgaagatatctatgtcggcaacctgctgacggcgctgggcgcgattgacgcgggtatcactacgatgatcgataactcgcataacagccgtaccgcagcgcattccgatgctgcagtcgaggctctgcttgacagcggcattcgcgccattcatgcttccggcgcaccggttgcgggtgaatgggatcgtgcacactggccaggtaactggcagcgtctgcaggaaaagtatttcagggataatcctgagggtcttgtgactttgggggttatggctcagttggagccagaattatgggccgaagcgcgcaggctggggttgccgatcgtgaccgaattctttggtgctgagatggccgccgagcttgaatctctgcatcggcagggtctgcttggcccggacaatatattcaaccactgcacggcactgcctgataatggctgggaaatcctgcgagaagccggtgtccgggtgaacgtctgcccgcgctcagattcccactatggtatcgaaagcgggatgtttgcaatagaggccgctcggcgtcatggcatcaccccgggcctgagcgtggacaacgaaacgtcctacagcaccgatatgttcatggaaatgcgcgtcgcgttctatctgcaacgagtaatgggtatgcatcagcagcgctgctgtgattcagcacattcgctgaccacacttcccgctgcgcagttgcttaaatcggcaaccgttgatggtgcggtttgtgccgggctgcagaacaaaacaggaagcctgacgccaggcaaacaggctgacctgatcctgattaacgtggctgacctcaacctctatccaaacgggaatgcgtttggcacggtggtgcatgctgctgaacgcagcaacatcgataccgtgatgattggcgggcgcatcgtcaagcagaacggcaaagtgctgggtgtggacagcgagcgccttcgcgcagccattgatgaatcacgcgaacacctttttgcggcagcaggatatgaaccagatatctttgcggaaaaattcctgccgattattcaggcaaactga

SEQ ID NO: 183323 - DNA, 474 bp, Klebsiella oxytoca
atgagcgcgatttattacgtgatagcttttgcagcaggtctgggtattaccctgcagacgacactgaacagtcagcttgcaaaagggctcggcggggatccagtcaccgccgcgttgttttcctttacggcgggggcgttcagcctcggaatttactcattgctgcgaggagggttattcacctcacttgccgccattccttctcagcctgtatggagcctggcgggcgggctgatcggtgcctgtgcattatttagctatgttgtactggcaccgaaaatcggtttttcagctctgctcgggctggcgattgtcggacagctactctcatctcaagtgatcgaccattttggcctactgggcgcggtaaggcggccagtctcgttgctaagactgggaggtatgctggtcatgctggccggcctcgccatcatgctatttggcgatcgactttctgaacgtttcatgaattaa

SEQ ID NO: 183324 - DNA, 951 bp, Klebsiella oxytoca
atgacttgctcgttgaggacgtcagccctgttgcagacgtccttatatttttctaaacgcaacacgtactgtttccagactggggaaaaaatgttttcaattgcagctaatgtcaggaattcgctaggtgagtgcccgctctggtgtgaaagaacacgcagagtttattggaccgacatcgaaggcagtgaacttctcgccttagaggagggatcaggtattgtgatgcgatggtctctacctgaacgactaggatcctttgcttttaccgaaaaagatgatgtgctattgatggggcttgcatcccggcttggcttctatgagctcagtacaggtagtttcactaaagttgcagattctccaggggattcgggcactcgtataggtgatggtcggtgcgaccgttttggtaattttatatttggaaccatggatgatagttatcctgttaaagccgtcggtcaatttcacagactcaattcggtaaaaatgagtatcgagacactttccctgccaagggtggctatccccaacagcatttgttttagccctgacggcggcacaatgtattacagcgactctatgcagggccgtatattctgttgcgactacccctctctcaacaaccagcgagtgtttacagaaacagagggtaaaggggcgcctgacgggtcatgtgtggatgcaatgggctatttatggaatgccgaatggggaggtaatcgtcttgtccgttacaagcccgatggaacgactgacactatactgccttctcccggaatccagagtacctgtcccaccctggcaggtgaagaattcacaacgctttattgcactagcgcaagcgtgggccttcctgaaccatcaaaacatgatggcgcgttgttaaaggctaactcagcagtattttccggtttacctgagagtcggttttcaacatatgaaatgtaa

SEQ ID NO: 183325 - DNA, 234 bp, Klebsiella oxytoca
atgtccggccatgtcttcatcttccggggccacagcggcagtcaggtaaaactgcactggtccactggtgacgggcggtgtccgctgaccaaacgactggaacacggccgctttgcctggctgtcagcctgtgatggcaaagtgttcctgacgccggcgcagctggcgatgcttatggaaggtatcgactggagacagccgaagcggttactgacattcctgaccatgctgtaa

SEQ ID NO: 183326 - DNA, 885 bp, Klebsiella oxytoca
atgacaaatttaccgaaagtcgcggttcttgggctgggagctatggggcatgcttttgccggcaatcttctgcagaaagggttcgtggtccaggcctggaaccgctccccggagaagggccgcgatttagtcgccagcggtttgacgttgtgcgccacgccgcggcaggccgttgctcatgtcgatgtgattatcagtatgcttgctgatggcaaggtgacgctggaagtgctggaggaaatcgcgccggtctgtaaaaaagaggctattttctgccaaatggggacgattggtgtacagcagacgacggactctattgaactgttgaaaaagctacaacctgcgatgatttttgtcgatgctccggtatccggcactaaggggccggcggaaaatgcgcaaattttggttcttgccagcggcgaacgtgaaaaatgcgctgccgccgaggccgtcttttctgctattgcccgcggcactcaatggttcggggaagcgggaaacggccagaaaataaaactggttctcaactcatggctgatatccatgatgcagggagtggtcgagagcaatatgttggccgccaggctgggtttcacttccgtgcagttctgggatgctattgccggcggcccccttgccgctccttatgtacaggcaaaactggcggcgattgagaaaaatgattatgctccgcaaatgcagttagttcatgcgctgaaggatgccaaactcgccctggaattatctgaccccggaacgatgcctgttctgcatacaatcgccgatgtctggggaaacgcagtcgaggacgggtttggtgaaaaggatttgtcatccatcgcaatgtggatgagcgtaagcgtacagcgggaaccgtattga

SEQ ID NO: 183327 - DNA, 750 bp, Klebsiella oxytoca
atgaatacagtggaacgagtgaccgcgagcttaatacgtggctggcaggaaggaaggcggcaatctgctgacggattgagtctggatacagctgcccaggcctatgaagttcaacagcgagtcgctgatcgcatgggttggtttaatggcgctcctgccagatcgtggaagttagggggtaaaccggatgatggcctgataagtgctgccagagtacctacagatgctgttcatccctctggttggcaggtgcctccaggatactgctccggttatggtatcgaagccgagatctttgtgcgcttatcacgagatcttaatgaacacactgatttggacttagcctatgatgctgttgaagcatggatgccgggaattgagctatgtgatacacggtggctagaaggggagaaggccgatccgttgctacggttggctgatcagcaactcagtcgtgccctgatcgctggaaaacctcagttgttcagaaaatccctaaactggaatgagcagaaagtctctttgttagtcaatggggtatctcacatcttcggaaaagtaggtcatccttttatcgatccattgagttctctcccctggcttgccagacatgccgtcgcgtactccaacccgctacgggcaggagacttagtggcaaccggaagctggaccgggctatgttgggtatcagcgggttcccgtgtggaagtggcattcgatggtcttggggaagcagtattgtttacctga

SEQ ID NO: 183328 - DNA, 1437 bp, Klebsiella oxytoca
atgcatatttttgatatggttattcgaaatgccagagtggtgaccgctgctgatattttctatagtgatattggtattcgtgatggacgaatcaccgcgctaggattacaactgccagccggagaaaaggagattgatgccgcaggtcgttatgtcacacccggggggatcgatagccacgttcatttcgatcagccgagtgaagacggctcaattatggccgatgactttctcagcggtactgtttctgcagcctgcggtggaacgactacggtgatacctttcgcctgccagcaaaaaggcaggagcctccgcgaggccgttgacgattatcaccaccgggtaggagataagccagtcatcgattacgcttttcatttgatcgtgactgatccgactccggaagtgcttgagaaagagcttccggcccttatagctgaaggctatacctcttttaaaatctacatgacctacgatgccctgaaactgggtgaccgtgaaattctggaaacgctatctctagcgcggcgtgaaggcgccatggtgatgctgcatgcggaaaacagtgattgtatcgcttggttgaccgaccgactgttggctgccggattaagcgcaccacgctaccatgcggcctcccgtcccatgatggttgaacgtgaggcaacccaccgtgctattgcttttgctgaactggtggatgtaccgattttaatcgtgcacgtatcggggcgtgaggccctcgaacagatccgctgggcgcaaaatcagggattgaaggtttatgcggaaacatgtccacagtatctgtttttaacggcagattctttggggtgcgatgacagttttgagggggccaaatgtatttgcagtcctccgcctcgggatgctgccaatcagcaggtgatatgggatggtctggaaaatggttcctttgagatcttttcctctgatcatgctccttttcgctttgacggcccgaacggcaagaaagctcatggagataatgcgtcctttgacaaggttgctaatggcattcccggagtggagactcgtatggcattgttatggtctgaaggtgtacgtaaaggacgtatttcaccgcagaattttgtagcgctcacttccacccgtgctgctgaaatgtatgggctgtatccgcgtaaaggtagtattgctattggtgccgatgccgacctggtggtatgggatgatgaccgctctttcactctcaaaaatgaaatgctgcatcacaatgtcgattacaccccttatgcgggcatgcatttaagttcctggccagcgatgacgatctcacgtggggagattgtgtgggatggcaaactgcgcggaataaaaggtcgaggccagtttctggcctgtgaacgaccagggcctgcacaggctcgccgccggaaaagcgaactaccgttatga

SEQ ID NO: 183329 - DNA, 726 bp, Klebsiella oxytoca
atgactaagcggattcggctgggagtgctgacgccatcgtccaatactgcgcttgaaccattaacccagttattgcttactgagttgccggaggtcagcgttcatttttcccgatttggcgtgaccgaaatagcccttaacgatagcgcgttagggcaatttcaatgtgaacggattctggatgctgcacgcttgttggccgatgccaaagtagacatcattggctggagcggtacgtccgcagggtggctggggtttgatactgatgtcgaactctgtgcggctattttgaaagcaaccggaataccggcgaccacttcggtacttgctctgaataaggcgctggaagcgtatcgggtgcgtcggctcggtctggttacgccttatattgctgatgtgcaggaaaaaatcatatctaattatacgcagttaaacattgatgcaagttgtgaaagccatttgtcattacagaacaatttttctttcgccggtgtcgaccagcttactcttgagcaccaggttgcctctgtggttgcggccggagcagaagcggtaacgactttttgtaccaatttgcaagcggctcattatgttgaacagtgggagcatcaattttctgtgccagtgttcgatacagtcgtgaccgtggtctgggatatgttgcgggcagtgggcgtggatacacgtcgcgtaactggctggggccagctaatgaagggggcctga

SEQ ID NO: 183330 - DNA, 798 bp, Klebsiella oxytoca
atgatatcagaacctgttaatcgcaatttatccatggcggggaaggtgtgtatcgtcactggagcggcttccggaattggtcgcgcgatttcccgccaactggctgccaatggcgctcaggtagtggtggcagatatcacgaccgaagtcattgaaggtggagtccctactgccgagcttatcttggaggtgggtcataaagctgtatttattcatactgacgtggcagaaacgacccaggttgatgcattgatacaggagaccgtatcgtgtttcggtcgccttgatgtgctggtcaataatgcatgtataagacatgcaaggtcgttactggatatggaagaaaaagactggaatcgtgttcttgacgtgaatttaaatggcgtatatcgctgttgtcgggcagctattcgccagatggtacagcagtcccttgtggatgaaacccgtggtcgaattataaacctgtcatcacagcatggcatgatcgccgcacctcaggatcttgcttatggcgtgagcaaagcggcaatcgattatctcacgcgccaggttgctaccgattatgccagtcagcagatagtctgtaatgctgttgcgccaggtaaaattcaaaccggggccggtggccgggctatcgatcccacagtcattgaaagggcgactcgtcgtacaccctggccgcgtctgggacggccagaggatatcgcccgagccgtgctatttctggcaagttcggaggcgagctttattaccggagcgaccctgatggttgacggcggatggatggcggcataa

SEQ ID NO: 183331 - DNA, 999 bp, Klebsiella oxytoca
atgaggatccttataaccggaagtagtggtttcgtaggggtagcgctgagtgagcaccttttagctgctggtatagacgttgtcggttatgacctcaaccctgtctctgctcaggtgttgatgactttttctgcgctccctggccgtttttaccaggaaactggtgatgtaggcgacagtgggacattacggaatgtcatgagtcagcatcgcccgcagcaggttgttacgttagctgcaattacggcagatgcgatccgggaacgactgactccgcagataatctttgaggtgaatgtcggaggcgttttagcggtgatcgatgccgcggttcactgcagcgtatcccgattactgcatatcagctctggttccgtatacggcgcgagtggacgaatgaagggggtactcaatgagtcggaaacattgcttgctcctgaaggactgtatggtatgtccaagagagcggcagaagaggcagcacaacggctggcaacattacatggattacctttaacgattgcgcgccttgggacatgctttggcccctgggaaaccgatactggcgtacgagataccttgagtgctcccttacagcttctgacgcttgctcgttccggagtcaatgccattctgccacgcgatagccaccgtgactggttgtatgtgcgggatgccgcagaggcgatttcctgtctgcttaaccttcctgaatggaaatccggattgtataacctggcagctgggtttgagtggccattgagtaaatggtgccactatttgcaaatggattaccctgagtttacctggcatgtggcgcaagaaggcgaggcgccaaatattgatctctatgctgattacgatcgctcaagtatgagcatacagcgactgttaggggataccaggttcgaaccacgctttggtctgactgaagcttattatgattatcagcaatggcttgcagatatgcgtcgttttgaacaagaggtgcagcaatga

SEQ ID NO: 183332 - DNA, 777 bp, Klebsiella oxytoca
atggcactcattactgttgatcgcgtatcacgggtgttcgatgatcctaaacgttctaccggcgttcgagccctggataatgtcagtctgtcagtcgcccgtaatgaattcctttgtctccttggtcccagcggctgtggcaagtcgactttacttaatatgatcgccgggtttgaccatccaaatgaaggttcagttattgttggcggtcaggtcgttaccgcgcctggttctgatcggggtgtcgtttttcaacaggctaacctgatgccatggctaccggtctgggagaatgtcgcttttcatctgaaaatgcgcggatttggcagaaatatccgtcgggaaagagcgcagaaatttattgaaatggttgggcttaaaggtttcgaaaaccacttccccagcgaactctccggaggaatgaaccaacgcgtgggtattgcccgagcgctattaatgaatcctgaagtcatcctgatggatgagccttttggcgcattagatgaacagaccaggatggacatgcatggcgagcttattcgtatctggcgtgaaagcaaagcaactatcgtttttgtaacccacggtattgatgaggcattgtctctggggactcatgtggccgtcatgtccgcacgaccgggtcgtattcgggaaatgctgccaattgacttggaacggcctcgtgatcctaccagtaccgtattcaacaactacaaacggcacattctctcattactgcgtccggagccagtagagggggaatcattactatga

SEQ ID NO: 183333 - DNA, 861 bp, Klebsiella oxytoca
atgaaaagctccgtcattaacacgcgttcagtgagccataagtgtggcccggcactggcaggtcgattctacaagcgcattgagcgggcgattgttccactgttgttagtctttggttgggagctattttcccgttcgggaattttaccacgggccttacttccggcgccttcccaggtcattgttgcctgggctgactgggtgtttactactgatggtaatactcaaacctacagcgggcactggatctttgatgtgacttccagtgcgtaccgggtgttctctgggttcgctatcgcagcggttcttgggattggtattggtatggctattggttggtctcgaacggtggaaaatctttttgaaccagtattacagatattacgtccggtaccgccggtttcgtggatccctttggcgatcatctggtttggtattgccgacaaacccgcaatattcctggtattcatggggtctttttttcctgtgctattgagcacaattcatggagttaaaagttgcgatcgcaatctgctaagagcgggggcaatgaccggggggactcccggtaagttgctggtacatattgttttccctgcggctttaccaagtattttttccggtttgcggattgctatcggctcagcgtggatgcttacggtaacggctgagatggttgcggtaaaaagcggcgttggctacgttctctgggattcatactacttccttagatacgacatcgttattgcttccatggtcagtataggtctgctgggctttctcagtgattacgtaattaaacgtctgggatctcgcctgctgcgatggcagcgtggctcaactttgcagaaggaagattaa

SEQ ID NO: 183334 - DNA, 1026 bp, Klebsiella oxytoca
atgttgactatccgttcctcattccagggcatattacatgcagccacattactactgcttagtttcagcatgttgccagcggcaaacgccgacgacacgccttcgatcaagttaggttatgcaaagtgtgctcactgcacgcctttgtcgctgactccggcgaatgccacaggagtaaagctgcaggctatcccgttcaacacgggaaacgatgtactgacagcgctgttatccaaaagtattgatgttgctcaggtgacttatctgcactatgccactgcccttgataagggatttgatgtggtggctatttccggacagatcaatggtggttcccagatattgattgccaataatttgccggtaaaggcgggtgactgggaagggctgaaaaagcttattcaggaatacaaagctgaaggcaaaccatttcgagttgccgcttcacgtggaaatgctcaggatattcacatgcgaggatcatttctgaagcatggtattgatatcaataaagatgtgcaatttatcaatattcctaacccttccgaccatgtacaggcgttgcgtcgtggagaagtggaactggtcacgtcggtagagccttttgcgacgcaaattcagcaggtaaaagcggcaaagttctttgattatccatacgaccaggcagcaggtaaattgactaatctgattgttacccgcccggatgttattaaaaacaaccgcactggcgtactggaaacggtgcgtgcgattgtgaaagttaacgaattaatgtccagtaataaacagctgtttatcgatactattcagaaagtcaccggccttgataaagcggtggcgcaaggagctgttgccaacctgtatcccgattatgacatgcatcgtgcttcggcggtggcagttgcacagatgatgcgcaatctcaagtacatcaatactgatgtctcggaaaccgtcgaaaagaatatggattatagcttccttgaaacggttacaggcaagccaaaatctgagctggggtactga

SEQ ID NO: 183335 - DNA, 732 bp, Klebsiella oxytoca
gtgtttaaccaagacaatgaaacatcgcgccctcgtaaggcacgcaataccggtcagatcctcggaacaggtgacgaacgcgatgtcatttatgaacgtatactgaatgccataatggaacatcgtctgcttcctggtaccaaactggttgaagaaaaactggcaaatgtctttcatgtaaaccgtacccgaattcgggaggttctggtccgtttagcctacgaaggcatagtaacgaccttcccgaaccgtggtgcttttatatccagcccatccgtagaagaagcgcgctatatcttccaggcccgacggatccttgagccagcattgattcgtactctgatagcaaaagcagacaattcgctgttctcgcgtttacatcatcatgttgggctggaaagagcagcaagagaggctggcgacaaacatgccatcattcggctgtcaggtgaatttcatcttttaattgccaagatggtcgccagtccccccctgatcaaactcatgcgagagcttgcgtctctgacatgccttattattctgctttatgactcacccaacgtgccggcctgtccgaatcacgaacataccgctatcgttcaggcaatggagaaaagacaagaagaagaagccattagcctgatgcttgatcacctgaatcatatagaagctatgctggatctctcaccaggcgaagacagcgaagtcgatctggaagaaatctttggttag

SEQ ID NO: 183336 - DNA, 738 bp, Klebsiella oxytoca
atgcgactattgataattaaccctaatatttcccaaaacgtgacttcgcttattgaagcagaggcaaaacgtaccgcagctgcgcaaacacaaatcattatggccacagcgcgaagcggagtcgcctatatagaaacgcgttttgaagcattattgggcgggcatgccgcggctattatcgctggagaacagtcaggcaattatgatgcgttactcatcgccgctttcggcgatcctggcttatcggcgttgaaagaggtccttgatgttccggtcgtcgggatgactgagtcggcgttaatgaccgctgcgcagttaggtcaacgtttttcaattattgctatctcacctcgcataaccagctggtatcgtgagtgtgtggcacaaaatgggatgctttccaggctcgcaagcattcgttatttagatagtccattatatgatgttggtaatctacagaatgattatgccaggcagttgctcgaacttagcaaacaggcagtgcaagaagatggcgctgacgtgctgattatggctggcgcgcctttagcaggtttagcccggcaactcagaggaaaaatcccaatacctgtggtcgatggcgtgtcttgtggtgttgctcaggcccaggctctacacctgttgaatctggcagcaccacagcaaggcagctttgcccgcccccccgtgaaatcaaatcatggtctggacgccgggctacaagctcttctgagttga

SEQ ID NO: 183337 - DNA, 234 bp, Klebsiella oxytoca
gtgatactgaaggatgtccgccaggaggtggatgcagcagcatgtgaagtcgatgccgtacttgatttcctccggggcgacagttcggtgcgtgtcatggaaaccatgatgaagctgtgcatcgatcccatctgtcccctcacctggttttacgtcgatccgatggcttgcgaagtcgcagccattcatggcgtcttcttgcgctcccccagtcaactggttactcaacaatga

SEQ ID NO: 183338 - DNA, 513 bp, Klebsiella oxytoca
atgaagcgtcgcatcgcctgtctctttgctgtggtcgtcggtctttccgccgcctgcactgccctgcttgtgactacgcgcaacactgctcaatctaactcgtctgtggccgcgccggtggcattgacggttaagcgcaccgtcgccagcacacagcaatggccgcagacactgaacgctacaggcagtatcgccgcctggcaggaagtcgtgatcggacccgaaattggtgggttgcgcctgtcgcggctgctggtcgacattggcgatcaggtaaagcaggggcagcttctggcacagctcagccccggcacgctggaagccgaccttcgcgccagccagtcggcgcttcaggaggcgacggtcagtgccgcagaggcgcgccgtacagccgatcgcgctcgcaggctgcaaggcaccaaagtcttgtcggagcaggccatggaccaggctctggcgcttggcgatgccgcgcaagcacgtctggccgcagcccgcgcgcgcgcaagctga

SEQ ID NO: 183339 - DNA, 654 bp, Klebsiella oxytoca
atgccgcgcaagcacgtctggccgcagcccgcgcgcgcgcaagctgattcacttcgtctggcctatacccaggttcgcgccccgtacgatggcgtgatcagcgcccgctctgctactgagggggcgctcattcaagaaggggcggaaatcatgcgcctgcaacggcaaggtcgacttgaatggcgcgccgaactacccgggcccgaactggcacggatagcaccagggcagaccgcgcgcataacacccagcggcataccgcccgtcgaaggccgcgtgcgaaaagtcgcaacgcaggtcgatccgcaaagccgcaccggcatcgtgtacgtggatctcaaaccctcggaccaggtgcgatcgggccttttttcccggggcgagttgctgctggcacagcgttcggtgttgaccttgcccgatagcgcagtcctgctacgcgatggtttcagctacgtcttccgcatcgaaggcgacaaggtgaagaggcagaaggtgacggtgggtgttcactacggtgaccgggtggagattcgtgaagggctgaatgccgacatcgacgttgtcgagtctggcgttgggttcctcgcggatggcgtgagggtgcgtgtcgcctcaggcactccgaataccattactcaatcgactcactga

SEQ ID NO: 183340 - DNA, 3063 bp, Klebsiella oxytoca
atgaatttttctgcctggtcaatccgcaaccccgtaccggctatcttactgttcgttatgctgactgtcgccgggctgtttgcattcagcaccgccagggtccagaacttcccagacgttgacctgccgattatcaccgtcgtggccagcctgccaggtacttcacctgcccagatggaaaccgatgtggtacgcaaattggagaacgcgatggccaccatgaaggggctccgtcacctgcactcgacggtacaggacggtgtagccactgtctcggcggagttcagtctggagaagccaccacaggaagctctggacgacacccgtgctgccgtgacaagggtgcgggccgatctgcccgcgaccttacgcgacccaattatcagcaagattgagttcaagaatgatccgatcctgacctacacggtggcgtcgccacgcatggacgatgaagcgttgtcgtggttcgtggatgaccaactgacccgacgcctgctcgctgtacccggcgtcggggccgtcacccgcgtgggtggcgtgaaccgtgaagtacgcgtggaattggatccggaccggctgctggcattgcgtctgagcgcggccgatgtctctcgccgacttgtccaggtacaacgagaggcacctggtggccgtgccaggctgggcagcggcgagcagaccgtacgcacggtcgttgacgtcccttctgccgacgcgctggcggccatcgagcttccattgcccgatggccatgttgctcgcctggatcaagtggcctctgtgtccgatgcactgaccgagcgccgcagtgccgccttccttaacggcaagtctgtggtgggtttcgagatactgcgcaccacagatgccagtgacatcgaagttgccaacggtgtgcgccaggtgctgactaccttgacggcggaacagccagacattgaactgactgaggcgttcaacgccattgatccggttctggagaactacgagggcagcatgtcgctgctcatcgaaggtgccgtgctcgcggtactcgtggtgggactgttcctgcgcgatgtccgtgcaaccttcgtcagtgctgtggcactgccgctgtccatcattcccaccttcctgttcatgcaatggatgggattcacgctgaacaccatcaccctgttgtcgctgtcactggtggttggcatcctggtggatgacgccatcgtggagatcgagaatattatgcgccacctggcacaaggaaaggagccactggaggccgccctcgatgcggccgacgagatcgggctggcggtgatcgcaactaccttcacgcttatcgccgtcttcctgcccactgccttcatgaaaggtttggctggaaagttcttcgtgcagtttggttggacagcgtccatcgccgtgttcttctcgctcgtcgtggcccggctgctcacgtccatgatggcggcttaccttttaaagaagccgacccggccacatgctgaaccattctggatgtctgcttatctgaaggttgcgcgctgggcattcacgcacaagggtgcgacgctggtaatcatggggggcctcggaaccggcagttgcacaccgctacttaccggcgcaatcaagggagacttcatgccgccttcggatctgagccagacccgtatcagcatcgagctgccgccgggcagcactttcgggcaaacgcgtgccattgccgatgaggtccgaaccaccgtggctgcacatccgcatgtaacgatggtttacaccgctgttggcgggggcagttccggggacagcccggtgcacaacgcggccgaggtacgagcggcgaatttgaccctgaatctgacaccacgccaggagcgccctagcctgagccagctacgcattgagagcgagctgcgttctcgcctgcaggacgtggccggtgcacgcatcagggtatccgcaaacgaaggatatacgctggtgctctctggcgaaaacagtgacctgctggcgcagcatgccgcaacggtggagcaggaattacgtggacttgcagggatcggcctggtaaccagtagctcaaaccttcagcggcccgagttgatcgtgcgccctgacacggcacgcgcggcagaccttggcgtgagcaccgaagccattgcagagaccgtacgggtggccactcagggcgactacgatcagttcctgcctaaactgaacctgagccagcgtcaggtgccgatcgttgtgcggctgccagacgatgcgacgcggaaccttgaactgctgcggcaactcacggtgccgggcactcgcggcccggtggcgctgcgtgacgtggcagaggtcgagatcgcgagtggacctgggcagatcagccgtcttgaccgcctgcgcaatgtgaacttcgaggtcgaactcaacggccttgcattgggtgatgtgcaacagcgcgctgctgcgctgcccagcctttcacaccttccacccggtctgttcaagaacgatatcggggaagcggaaacctccaacgaacttggccggagcttcctgctggcgatgggcactggtgtggcctgcatctacatcgtgctggtgctactgttccatgcctggttgcagccggtgacgattcttggggcgttgctgttgtcaatccccggtgcgatcctggcgttgttcgtgaccggtaccaacctgagcatgcccgccatgatagggatgattatgctgatgggcatcgctaccaagaactccattttgctggtggagtatgccatcgtggcccagcgcgatcacggcatgtcacggatcgatgcgctgctgaacgcctgccacaagcgcgcgcgtcccattgtgatgacgaccctggcgatgggtgctggcatgactcccatcgccctgggtttcggtgccgaccccagctttcgtgcgccgatggccatcgtggtgatcggtgacctcatcacctccacatttttgagccttctggtgatccccgttctctacgaagttgtggatgacgttgttcaacgtttcacaccgagacgctggaagtcgaaaaggtacgaagcctga

SEQ ID NO: 183341 - DNA, 1035 bp, Klebsiella oxytoca
atgtcggcgcgcgtgatgaactgcctggaggtactggcccccagggtagaacagtattcaattgatgagatgttcctcgacctgaccggcctggagcactgtatggggcttgaggacttcggccggcagctgcgtcagcacgtgtatgactgtacccgcctgaccattggcgtgggcaccggaccaaccaaaaccctcgcaaaatcagcccagtgggcctcaaaagagtggaaacagtttcgtagcgtactcgctctgaccaggggaaatccgcagagaacgcggaaactgctttcactgcaaccggttgaagaaatctggggggtgggtaaccgtattgcacgcaagctgaatgtgctgggcataaagaccgcgctcgatctggccctgacgaacccgaccttcatccgcaaaaatttttctgtggtcctagagcgaacggtacgtgaactgaacggggaaagctgcctttcgcttgaggaagcccctccgacgaaacagcaaattgtctgcagtcgcagttttggtgtgaagatcaaggagtacgagtcgctccgccaggctatctgtcagcacgctgagcgggcctctgaaaagctgcgtaaagagcaccagtattgccggcatatttccgtttccatcaaaacgtctccgttcgccgttaaagagccttactacggcaacgtggccacggagaaactgcttacacccactcaggacaccagggacatcattgctgccgccacaacggctctggagcgtatcaggaaggatgggcaccggtatgccaaagccggagttatgctgaatgatttcaccgggtctggcgtttcgcagctgcagctgttcgacgaacgcccgccacggcctcacagtgctgagctgatgatggttctggacgggatcaacaactcagggctgggtaaagtatggtttgccggtagaggaataggcccggaatggcagatgaaacgtgagatgctttcatcggcatataccacccgctggaaggagctgccggttgcccgtttctga

SEQ ID NO: 183342 - DNA, 213 bp, Klebsiella oxytoca
atgaacaagcgtggcaactgccaggataatgcggtggccgaattgttcttcagttcactgaaaagagaacgcattagtaagagaatatacaaaaaccgggatctggcccgggcggatgtcttcgattacattgaagtgttctacaatcgggcccggcgccacagtcaccccggcggcgtcagtccggaggccttcgaacaggcctcgtcgtga

SEQ ID NO: 183343 - DNA, 123 bp, Klebsiella oxytoca; identical to SEQ ID NO: 101486

SEQ ID NO: 183344 - DNA, 339 bp, Klebsiella oxytoca
atgacttcagaaaagagtgctaagccccatcacgacgatatcaacgacggccggatcgtttcctcccgccatctggtgtcggatcgctgcccggagctgtcggagctggaatatgcgctaattatgaccagcaacgcattcaacaaatggatggtgcgctgcatgaccgcagcgggtgaacctgacatgggcgcctttgacgtctccctgctacatcatatgaaccaccgcatttcctcaactctcgccttacggtcaggtttttatcatctggagaaaacgggatgggcccaaaaggtattcggccagacggatgctgacagcatcaggactggctga

SEQ ID NO: 183345 - DNA, 723 bp, Klebsiella oxytoca
atggacggtactacactgttgccgctgatcgggataccgatcgtggttattggttttgcattgcgcttcaacccgctgctggtggtcgtggtagcggggctggcgacgggtttgctggtcggtatggatttcggcatgctgctggaaaccttcggtgagaagttcgtgaacagccgttcgctggccaccttcattctgatcctaccggtcattggtctgctggagtattacgggcttaaggagctcgcccaggcctgggtggcgaagatcgctagtgccacttcggcgcgtattctgatgctttattttgttgcgcgtgaagccacggccgggctggggctgatgtcgttgggcggccatgtccagacggtgcatccgctgctggccccgatggccgaaggagcggcgctgaacgaatacggcgaagtcccacagcatattcgcgacaaaatcaaagcccatgccgccgcgtgtgacaacatcgcagttttcttcggagaagatatctttattgcttttggcgcagtgatgctaattgacgcgtttctgaaagagaacggcattcagggtatcgaaccgctgcatatcggcctgtgggccattccaaccgccattgcggcattaattattcatattacgcgcctgctgagcctcgatgccagcatccgtcgagacatcatggcatggcgagcagagcagaggatgcaggagcccacacaatga

SEQ ID NO: 183346 - DNA, 318 bp, Klebsiella oxytoca
atgatgacgcttatcaccattaaccgtgtgtattacctgattggttttgtcgtgatgctgctggttgtcatgacccttcgcgatcgcgccaatccaaagcgttttacaaccgcgttgttctggtttttgtttggcaggatcttcctgtttggcgacctgatggtacaggaactcggtaaatccttggcgtaccgcatcatcggcggcggcgtcatcgctatcgccctgctggcgggatttagcctagtcgggatagggtactataaaatgtccaccaaggaggcgcgagttgcctcttcgaacatactcaagaactga

SEQ ID NO: 183347 - DNA, 681 bp, Klebsiella oxytoca
atgatcccgatggtgacggttatcggcaccctgttcctgaaaggggggtcgatcggcggcgtgttcctgctcgatcaaaaacagctcaccctggcggcgctttccgttgcctgcgttgcggcgatcctcaccggctggtggcttaccaaaggaacgccgctgcatgctgttcgtcagtctcgtcgtcttgtagatactatcggctgggcggtgatccttccgcagatgctggccatgcttggcggggtctttatggtggcaaacacgggcgactcggtgcaaaaggtagtgagcctgtttgtgaacccggataaccgcttcatgctggtgatcatttactgcgtggggatggcactgttcaccatgatcatgggcaatgcgtttgcggcctttccggtattaagtgccggtatcgcgttgccgtttctgatcaacgttcatcacgtgaatccggcgcctctgttagcgtttggcatgtacgcgggctattgcggcacgctgatgacggccaatggccgcaaacttcaacatcgttcccgccgctctgctggagctgaaggacaaatatcaggtgatcaaaatccaaatcccgaccgcgttaaccctgctggtggtgaacgtgttcttaatgtatttcctcgtgtttcgctaaggagctgtcatggaattaacgcaagataa

SEQ ID NO: 183348 - DNA, 996 bp, Klebsiella oxytoca
atggaattaacgcaagataaggctgacgcgtttgcccgcattcctttgacctatttgcgcctggaatacccgaaccacatcatgcacctacttaatgatgatggcgacgtgctgctgcctcgtgaactgcacccgattttttacggttgttttgactggcattcggcggtacacggctactggctgctgctgcgctgcgtgcgtctttatccccacttaccgtgccagaaggcgatcgttgagcttttcgaccaacacctgaccaaaaagaacgtggcgaaggagctggcctatttcaccgcaccgttccgcgactcgtttgagcggccgtatggttacggctggctgctggcgctggcccaggaaatgaaacagtcgtcgctgtcgcaggccgcaggctggtatcagacgttggagccgcttacccagtatattcgcaaccggctggtggattaccttgctaaactcacctatccgatccgcatggggacgcactacaacacagcgtttgctctagctctggcgctagattatgcccgagctgtagaagatagcgcgcttgagcaggctattctgtcctctgcagagcggttttatcttgccgacacgcgctatccggcccactacgaacccggcggcgatgagtatatttccggcgccttgacggaagcattattgatgagcaaggtgtcggcggactttcccgcctggtttgacgcgtttttgccggatgtcggctccgttgcggaacttatgaacccggcggaggtgagcgatcgtaccgatccgaaaattgcccatctcgacggattaaatctcagccgtgcctggtgcatgaagcacattgcgaaagcgcttccggtcaaccatccagcgcagcaggtgctaagtgatgcggtggcgaaacacctgacggtgagcgtcgagcatgtggtgggcagccactacagcggctggcactggctggcgagctttgcgttgctggcgctggagtaa

SEQ ID NO: 183349 - DNA, 189 bp, Klebsiella oxytoca
atgacactcactgcatattaccaattaaggaatacaaagtcctcaggtcttggtttcgaattgctgaccagtgagccgggagcctttattgtgctggaagaatgcagttatgagaaaccgtatgaattgcccgttatgggcataacgggagtgcaggcgatcgttcgactgcgttcagctgcacgatga

SEQ ID NO: 183350 - DNA, 753 bp, Klebsiella oxytoca
atgcggatggttcccgttcgcctcagtgccagaggcaaagtcaggttgataaaaaaacgctcagtgaagcccagaaggcctaaacagtaccgcccggtaaaaacaggcgaactcatagggatggacgcgattgaactcagaatgggggatctgcgccgctatatcattaccatgatcgacgagcacagcgactacgcgctcgccctggcagttccttcactcaacagcgatatcaccagccatttcttcagcaaggccacaaagctctttcctgttgctatcaaacaggttgtcactgacaacggtaaagaattccttggaaattttgataaaacgttgcaggaagcctcgattaaacacatctggacctatccgtacacaccgaaaatgaatgcgacctgtgagcgatttaaccggacacttagagaacaatttattgaattcaatgaattgttgctttttgaagacctgaatttgtttaatcaaataatggctgaatatctggtgctgtataacagcaaaaggccacataaatcactcgaactaatgacaccagtggactatattttacgtgagagtaaaaattgcaatatgtggtggacccatacatctccttgccttacggcagctaagaggctacgctgttggtgtctagtcaagcagatggcctcgtgtggttggttaatgaaaattaacgtcctacggggctttcttctttctgcctcacaacaacaaaacactcaaatatcatga

SEQ ID NO: 183351 - DNA, 399 bp, Klebsiella oxytoca
atggacgacaaaaaaccagtgcttctgacattacatgaagcggtgcgcctggatttgattgaggcctatgtggcgcgggaaattacgctggcagaagtggcggaatccatggagctcacctgtcgtcagtgctcccgcctgattaaacgctatcgtgagctggggccagctggtctggtcagccggcgccgtggaaagcccggcaaccatcagttaaacaccaccatcagagacctggccctgcagcttattcgctcacgcggccggggtatgaatccgacagcaatctggcgaatactgaccacagaatacagtgtccggatttcaaaagagaccgttcggaaactgatgattactgagaaagcctggcatccgcgaccatcctccaggcctgactaa

SEQ ID NO: 183352 - DNA, 1200 bp, Klebsiella oxytoca
atgaccgtactgaatacgcaggaattgagcattattcaggcttttgcttcttctaatgtccccgagcgggtcatgcgggagagtaaaatcagggagcttatccgtgatatgactgtggcacagagttctgtgcagtcagactccgatcgcctagaagcgctacgtaaagagaaaaaagagggaaatgtcttcagtaactggttgtataaccgggacgacaaagtgcaggatgcgcagctcgatctgaataaatccattggacgtctgacacagacatcatcgcagctactgattgtcaatactgcaatctcaaaggtactaaacgatcagcaacacattctgttagaacagcagactatgttgaagagtcaagctgacactcttggagagcaaaccaatcaaatccttcttcagcaaaagcttcttgaaaaacaacagaatgaaataaagcaggcaaatcaggggctactagaagcaaaggggatcacccaggaacaagcgctgcaattggttggctgcgtgaagatggttaaggaggcagaaagccgcatcagtactgccaaccagacactgaaacaggatattgataaaaaccttgaagaagccatcaagcaatcagcaaaagacctagaccacgctgtcgcagagcacaagaaccagcaggagacgtttgaacaacagctcatcggtcagttgacggcattctcccaacaaactcaggatgagttacagcagataaccgcagaggtcgccgaaaacagaacggctgttgaggagcaattgacatcgctagggtcagcccagcagcaatacgcggcaacccttgagcaacaactgctacagacgttatctacccacagccaccatattcagtctgaattcgaacgaattatcgctgagaatagcgttgttcaagccagtcttgaacaacagctacagatacatagccaagcagtactggagaaaatctctcatcaggagactgtggcactgcaacagagccaagcgattgtactgatcgaaaaccggttaaacagtatccagaatgaatacgataaaaggcagggtaatgcagaagctctgctactatctcagcttaaagcagcacatcgtcaccgtctgataaccgccctagtggccactctgtcactgctctctttaggctggcaggcagcattacattttggagtagtgcactaa

SEQ ID NO: 183353 - DNA, 1668 bp, Klebsiella oxytoca
gtggagcaaaagataactgaccagcgggagcaacgcctgcagaagcttttcgatgattgccaaaaacaggttttatcccagatcattggaccttttggattgtcaacagccatgttcgaggataagaatggtggcaacgtcactacgctgcataattttgagcgtacagacgatgactatattgcaaccgactctgaccgagcactacataagcaatcgcgcaaagagtacagtcctaaggtcaggtcagagtatgaggttgatactcaggctaaggcgggagaagcggggggcaaaacgtgggaaaaaaaacgtgcagacaaaatcagtcaggggcgtgatgaatacaccggaaaaagcgtttccgctgatgggacaatcgagcttagcgatgggcacatcgtccgtgctgagctagatcatgtggtttccgttcatgaaatccatacaaatcccaaagtacaccttgcgctgggaaaggtaaggaaaaatgcggaaacaggtgaactaaacgttgatgtcagccgtattcgcgaccttgccaatcatgatgaaaatctggctctcaccaaccaaccgctgaatggttccaaaagcgatcaggacctcaaggaatgggctgagaaaaaacggaaagacggcactacaaataaagagaaattcgacactgagaagtcgctgacagaggagaagcacgatcaagcgcatcaacatatcgataacacggtggagcctgccttactgataaaacagacgacagaactcctgcaaaccggcggcaagcaggcagcattaatggggatgcgccaggccttcggcctgctgctaacagagctggtaaatagcttgtttaatgaattcaaattactcataaaacagggtattgcaacaggaaaaactctatttgaagagattcaacagcggctttcacgagcgattgaatcagtgataaaaaaaattccagaagctgtcgggcagatgtttcaaggcggtgtcagcggctttatgagtaacctgctgaccttcctgatcaataactttctctccactgcaaaacgctttgtaacagttatccgtgaaggcattataggcctgttccgcgcctttaaaatgattttctttcctcctaaaaatatgacgcacgaccaggcaatgcaggaaggactgaagatcctgaccaccgttgttatctcatctgttggcatcctgcttaccgaaacggtctctgccttcatggcaacaatacccttccttcaacctatctccggcctgatcacacccgtgctaatagggattattaccggcctagcatcagcttttctggcctatcagatcgactgttggttcgatcgctatcaccattctctgagcgaaaagttcatggacgagttactggctgacgccaggcggcgtgatgagtttgcccgtgagctggtctccctgtctgaaagttcgctgagtaatatcgaaaactacgcgaacgcaattggaacgtatcagcacataggcatagctcttggcaccgcaagtcttgcggctggtaccacactagctagcatggagagctgcgttgcggaaaccggtcagcagataaaacgaagtttagcaatgatagactttattaatgaaagccaatcggaaatcgatgatttcctgaaaaaccactga

SEQ ID NO: 183354 - DNA, 510 bp, Klebsiella oxytoca
atgaaaaagcaatgggaaaagctggaagcctggcttaggatcaatcatccttcactgttgggtgatctcaatcccccggctagcgatgcagacatcctggagctggagcagaggctcggaatggcattaccaacggattatatcgcctgcttgaaaattcataacggacagaaaggaagagacgggtggctgttcaataacagggagtttctgtcaacgcaacaaactttgatgagctggtcggcatggaatgacttactcgatgaaggagatctggatgataaagtttctaggccagacgcgagtatacagtcaggttggtggcgaaaagcgtgggtcccctttgccacagacggctgcggtaattatctctgccttgacctgagcccgtccgcctctgggcagtatggccaagtcatcaatgtctttcacgacgtccaggacagaactcgggaggcgaccagtttcaccgcatggtttgaaaatttagtcggtaataagcaggattga

SEQ ID NO: 183355 - DNA, 267 bp, Klebsiella oxytoca
atgagcgaatttacgggatcggcagcttcacaggctgactttatttggaagaatgcggaagacctttggggggacttcaagcatacggactttggcaagatcattttgccgtttaccctgctgcgtcgcctggagtgtgcgctggacccgacccgcgaggcggtgagagaagcgcatgacgctttcaaggatgccgatgttgagctggataccattctgcgctcaaccgctgattacagggttgtgcctcgtcccaaccagggctga

SEQ ID NO: 183356 - DNA, 831 bp, Klebsiella oxytoca
atgagcgtgtcaaatcaacgttgtgcaggcatagatgtttcaaaaggtactctggatattgcaatcagcaatattgccagccagttcactgtaccaaatggaactgacggttttactcaagttctcagagagttaaagcgaaatgaaacaaggttgatcctcatggaggcgacagggggtctggagtcatgtgtggcttgttatcttcaatcagaagggtttgacgttgtcgtcattaatccccgccaggctcgagattttgctcgtgcaatgggctatctggcgaagactgatcgtatagatgccagagtattgcttcagatgtcggaagttattaaccagcacccagaacgggaaagatacattcgtcccttacctgatgcccacaggcagattctggctgcgatggtggtcagacgcagacagctcacgatcatgcttacagccgaacgaaaccgattacatccctcgcatcctctgagccatgcaagcatcagatcaattatttcggccctgaagggcgagttggcgcgtattgaaggtgaaatggcgattcacatcaaggagcatttcagtgaattatccgagcttctgaacgcagttaaaggagttggctctgcgacagtcgccgtactactggcagaagtcccagaacttggctcactgtcacgacgagaaattagtgcccttattggggttgctccagtaaacagggattccggtacgatgcgcggtcgccgaactgtattcggagggcgagcttcagtccgtacagctctctatatgtcagccctggttgggacgaggcacaaccctgtaatcagcggttga

SEQ ID NO: 183357 - DNA, 270 bp, Klebsiella oxytoca
atgggcacaccacgtaaggaagaagccgtccgtcagataacggaacgcggttattccgttgccgaagtatctgaccgtctgggtgtttctgcacacagcctctacaagtggctacgggctatcaaacctgataacagcgaacagcatgcccgggatttactggaagccaaaagcgagatcctgaaacttcgggcgcagctaaaacgtaccgaagaagaacgggatatcctgaaaaaggccgcgcggtactttgcaagggagcccgactga

SEQ ID NO: 183358 - DNA, 663 bp, Klebsiella oxytoca
atgacgatgtgtcgggtactgcatgtcgcccgggccgggttctacgcgtggctgcacaacccggtctcggcgcgtgataaagataaccagcgtctgctgacgcttatccgtgattcatattcactgagcggaggcgtatacggttaccggcgggttcatggcgatctgaacgaaatcggggaaacctgcggcaaaaaccgggtgggccgtattatgcaactgaaccggattaaagccgtgcgtggctataaagcatcacggcgtatcgccggccgaccttcagtggttgcccctaatcgcgtacagcggcagtttaccgttgtccgggccaatcaggtctgggtcaccgacatcacttatatccggacctggcagggatggttgtatctggcggtggttatcgacctctttgcccgtaacgtggtgggttggtcgatgaagccgaccctctcacgcgaactggcactggatgcgctgatgatggcggtctggcgacgtaaaccggacagcgaggtcatcgtgcactcagaccagggcagccagtacggcagcgacgactggcaacggttctgtcgggccaataacctggcacccagtatgagccggcgtggcaactgctgggatactcattctaatatactttcaaataccggatcggactga

SEQ ID NO: 183359 - DNA, 837 bp, Klebsiella oxytoca
atgctgccgcgacacctcaactacttcattgccgttgctgaacacggcggctttacgcgagcggcagccatcctgcatgtttcacagccggctttgtcgcagcagattcgacagctggaagagacgctgggagtacggctttttgatcgcagcgggcgcaacacttgcctgacggacgccggcaaggtctggttaatttatgcgcgccgggctttacgggaactggccgaggggcagcgcgcgctccatgacgttgaagatttgcagcgcggtaccctacgtgtagcgatgatgccaacctttacccattattttatggggccgctggtggcttcgttttatcaacgttacccgaatataacgctggatatacaagagctggcgcagaatcgaatggagactctgctgctcaatgatgagctggatatcgggatcgctttcgacggtagcgattcacgggatattgtgtctcagccgctgctctctgaaaccctggcgctggtggttggccgctctcatcctctggcggcgacccgccgtgtggcgctgacggcgctcaatcaggcgtcactgattctgctaagcagcgcttttgctactcgcgagcaaatcgatcgcgactgccgacagcgcggtattcaaccgaaagtgcagatggaggccaactcgattagcgcagtgctgaccgtggttgaacgcacgtcgttggcaaccttgcttcctgcagccattgttcaggggcgtgacgatttaaccgcgatcgaactcgcgccatcattactggaaagaaccgcgtgtttgatacagcgaaagggtgacctgctccccgttgattaa

SEQ ID NO: 183360 - DNA, 2334 bp, Klebsiella oxytoca
atgctggacaagaatgtagcagttagtgttttaaacactcaagccctggccagagcgaaaattaacgctgaaaattttaaaaatggcatagataaaaagcttaaatatggcgagtcaaaatgtgcccgctatgttaaaaaagcattaatcgctggaggggcatctgcaaaaaattcaggaattgaatcagctaaaaattatggcccatggctgcttgaaaataactttaaagttgtggataacgctacaacagtgcgtactggcggtgtattcacaatttctggtcagcaagtgggggatgttgtcgtaatccaggcagcaccacatcatgtgcatggtcatatggcgatgtttaatggtacacactgggtatctgattttgtccaggaaagggggttctatcctgcccagatatatcgtgatcaaaacataccctatgcactttatcgttatggcgctaataccacatcagagcagaacgccacggctatccgaaaaggaaaaatcaaaatagtctggccgatcccctccaacagtcggggaagtgagttcaaaaatcaggaagagatcctctctcatattgggggggaatccaccgggcagtatatgattggtcgcagtgggatgtggcatggcgggatccatatcacggaagcaacgaccccgtggtgtgctctgagtggcaagtctcctcttgaagcattagatttcccagttccctttaaaggtgagcaggctgtgcgatgcatggctgacggcgaagtggttgcttatcgtgtctgcaaggattatctgacgcttgcatgggaatccggcccactgagcttttctggttcgtttgttctggttaaacactttattcaaccgggggagaaagaatccagcgggctgcatttctacaccctgtatatgcatcttgcgccgtattcagcttatgaggctgaagcagaaaatcagtgggccattcagaatactctaagagcatattctgaaatggactggctgacggcaaaactgacttcagataaaacttctccacaaattgcagggcacatacctaaaggggcaagagtggagtgggacccggcagacagcaatcttaacgccacaggaaataacaagcgaaaatatggtcttgtaacactgaaaggattaccagaagaaaccagcagtaccctcacacctggtcagcgctattgggttgttgtggataacaacaatattaagccagcgccgggggctggtccaggctggtggcggcatttgcttcctcccgcaaaggaagtcatggtattcgataagacagtaagtctcagttttccatttgctattaaggccggtgacccgattggccacatgggctactatcaggcaccaaaagatggtggttatgaggcacgataccaggtacatatcgaatgcacgagcatggatgataatctggagaatttcctgaccaacccagaaaaagtgggggagaaaaacccgctctggttgaagtattctcctggccttgctcttttcacaaaagatgttgcgaagggcactttcgcaaagggctcgacgtcgacaacgcggacaggcattctaccgttgagtaaggtcacaactgaaactgatacctcaacaaagcaagaatactggcagctgcgaccagaaaatgcttacgtccccaaaggtcaggcggaacctcaactcttgtcgcagtatgatctggcaaagctgggcttcagaactgaaacctcagagcctaccagttttgattacttggatggaaaaaaccagcctgttggattcttccgcagccttatcaactcgctctatgaggttgcgaccagtgatacgcgaaccagtcatgccctggttaagcataattatcagcgcctgctggataaaattgatagtggaagcgaccgttactctccgatggaatactggagagcacttcataatcccgactatcgtgacaccatccagaaaacaatcgtaaaacatcccagcgattggtacttcaaaaaagatgatgctatctggcaacctttcctcaatgcgctgaaaaaagaagccccagaatggaagaaatatagcgaagattttcttgataaaatggcatggatgcaggatgtgtccactgagaaactagggccttcactgtggcatatgcatcctatcctttttttgggtacgttaaaaagtgctaaccggattactatcgtctacaagaattacgattatactttagattatgccttgaacaagcaaatgtcacttactggcgatagtgttcctacatatggtgacctgcccccaggattagatacaaccgtcagttag

SEQ ID NO: 183361 - DNA, 471 bp, Klebsiella oxytoca
atgttgaagaagattatttttgcttgttgcttattctgcgtggccaatatagcctcagcttcagcaaacgatagttcaatgcctcgggaaattgttgcaaaattttatcatgattaccttgttgcgtctgaaacgcctgatatggaatcagctgataaactaactcaaaaagctatttttgaatatacaactgagcatctcagaagtctgcgggataatgatgaatcgggtgctgattattttgtcgatgctcaggatatttgtgaagaatggaaagacagcattaatgtggaaactgtttcagagaatgaccaggtcgcacaagtgaagctaacattaggatatggtaagggcgtatccctgtatgccgttaacctggttaaagaaaaagggaactggttaatggattctgttaagcccatatctcatagtagtatttattgccctcgacaagcagaggggggagaataa

SEQ ID NO: 183362 - DNA, 543 bp, Klebsiella oxytoca
atggatccattaattcctcatatgcgtaatgtgtttttatttgcatttttgctttgtttatcaaattttacacaggcatccgagcaaacaagcccagaaagcatcgtgtacaatttttataagtcatatttgaaagaagaatcatcggacaacagtcgatttctcagtcaatatgtttttgatgaattaatgaaaagcattaacgactctatgatgtgtaattatgattctgatgattcagcgtcggcagaagaactcgaagggaaatgttcacaaaagcgcgaatgcaagcagtttaaagggcgttatatttgtaactggcatggtgcttgggttgatactgatgttgattattttacaaaatcacaagatgtttatccttcatggaaagcaagtataagtacctttgatgtatatcggaaagagaatgactcttcagtcaacgttattttaggagcaggttccgagcctaaagttaaatttaaggttgtgctagaaagaattgatgagaagtggaaaatcaccagcgtaacggaacaataa

SEQ ID NO: 183363 - DNA, 2358 bp, Klebsiella oxytoca
atgaacggatcacggatgaataaaggactcagtctgacagaaaagctgatcggccagtcacggtattgtgttgacgttcatggctgcacggaatttctggatgtgttgcgttacaacgccgttgaatcactcagccagccatggcgctatgacgtggcggtcacctgctcttctgcggatattgcctgtgacgcgttactgttgaagcccgcgtcatttactttccagaccccgatgtttgacggaacaccggccctgccggtcaggacggtattcggcgtggtggagtcgtttcgccgcgtgtccacctcgaatgatgagacccggtacgtgctgacgatcgttccccgtatcgcccttctggactatacgaaagggagcgagatctacctcaatcagtcggttattgaggtggttgaacaggtactgcgtaaacacggtctggaagggcctgattttgagttccggctctcccgggagtatccctcccgggaactcatcacccagtggcgggaaactgaccttgagtttattcagcgcctgctggcggaggtgggcatttactggcgctatgaaatggacagccgtcttgaacaggacgtggtgatttttcaggacagtcagcagcagtatgaatttggcgtcacgctgccgttacgcaaccaggccgggatgagtgacagcgggcaggagagcatctgggatattcagaccgcatacaatgtggtgagtggaagtgtggccacccgtgactacaactatcgcgacgcgctgaaacctcaggacagcactgaaagcattttcagcaaggaagggatcactaccggggaaacgtaccattatgcggaacccttcctgacagcaggtgacgctgcaagcactgaaaccggggcctacttcgcccgcctgcgtcacgaacgcattctgaacgcgcagtatcgcgtcagcgggcattcctccagccctcatctggctccgggtcaggtactggaaacggacggaacgcttcccgatgccgtcagggaaggcatcgtcatcaccacggtgcgcaccagtggttcgcgcaaaagtagctttacgctgacgtttgagggcatcccctacagtgaaaccgtctgttatcgtccggcactgctcaatcgaccggtgatatccggctcgctgcctgcccgggtggaaagcacacagaaaggcgacacctattcctggctcgacccggacgggcgataccgggtaaaactggacttcgaccgtaacagtcctgaacagggttatgcctatttgtggctgcggctggctaaaccgtatgccggtgatacgtacggattccactccccgcttatcgacggaacggaagtggccgtcgtttttgacggcggagacccggatcgtccctacatcgcttatgccctgcacgactcagaacatccggaccatgtcaccagtgacaatcatacgcggaacgtgtggcgtaccccggcgaacaataagttgcggatggaggataagcgccaggaagagcatatcaagctcgcaacggaatacggcaaaacgcaactgaacatgggacacctggtcaatggccagcgtgaaaaacgcggggccggttttgaactgcgtacggacgagcatggcgcggttcgtgcggcaaaagggctgttcctgacggctgatgcccaggccaaagcccagggcccggtgatagaaatggcccctgccatcaaccagattaaccaggccaacagccagatgcaggccctgaacagcgctgctgaagccgccggagccctggtctgtgacatcaatacccagattagctttgtgaccgacaaaatcaaagacctccagtcttcggtcctgctgggtagcgctccgcagggggtggcactgacctcaggtgaacaccttcagctcagcagcacccgcaacaccatggtcaatgccggtcaacatcttgatataggtgcgatgaaaaatctgtctgtaacggtagaaaaagccctgggtatgtttgtccataaagaaggggcaaagctggttgccaaccagggagatatcgagattcaggctcagcacaacacgatggcactgttttctgaaaaacagctgacggtgaccagcagtgaagacgaaattattatcagcaccccggaaaccctgacgctaaacggtggcgggtcttacctgagactgagtaagaacggtattgagcatggttcatctggtgagttcatcatgaaaacgtccgactatctggtaccaggcaccggcgcgaatctccccaacgaaacacctaatttcagcctgacggatatcacccaggaaaataaaatcagcagcaaatcttttaatgactaa

SEQ ID NO: 183364 - DNA, 147 bp, Klebsiella oxytoca
atgtgtggctttattttggggttgtccttattgatttcttctttttatgcactagctaaagccaacatagcgcaaggaccattcaaaattcattttttaattcttttgttgttttttttcttttttgccaaagatagccatttctga

SEQ ID NO: 183365 - DNA, 201 bp, Klebsiella oxytoca
atgccggaatggatgcagaaggctaaacaaaaaggcgcttttgactctgtggtgctaacgggtgaaacggaagaatggaaggtcagtgccggaacgcctgtcggctttatgggatgcatggaatcacccggcgggggaaataaactcgtggataaagagtggcttgtgcatctggaggtgctgaatgcagatccaaattag

SEQ ID NO: 183366 - DNA, 429 bp, Klebsiella oxytoca
atgatataccaattgtatcgtaataaacaagcattgttagatgacgattattctgtttttaccttaggtagcgatggtgagtgtgatgtttttgttaattccccatgggttgtatacaacaataaagaattagagggggttgaaattatgagtgagagaatttcagatggtaagattgcactaaataaattagtcccacataaagtcgattctaatgaatgctcattatatcctgcgataaatgtcataaaacttaaatcctatttttatgactcctcgtacaaaataaagaaatcttaccttgttaaaggagataaggttaatttgttatctattagtgcagatggtaaatggtgtaaggtaaactatattaacattaaaaacatatctactaataacatcatgttgtgtgcggatctaagtatttag

SEQ ID NO: 183367 - DNA, 504 bp, Klebsiella oxytoca
atgaataaatatatttttttgttggtgttttttttaagtggatgttccatgctaagttttgcggatggctcaataaattatggctatgataaatcaaatcatttaatttatgcaaaaaaagacggcaaagaagatgtgttgaaatttattgaagattatacaggtaatccatcctactcatttgattttttttcaggttcccctgcgattatagctgatagtagatctcttcatgattctaccgtttatgcgacattgaaatataacgacaataaattcattattgattgtttgtatttgaatgtgaaaagtaaaaagaacggagtcttggttaaaaagggtttttgtagcttagatatgtcgccagcgaaaaattacgctgattttatagaggagaaagtaggtaaaactgaagatgacatggattctatagatacaggcttaatcttaagtggcaaaaaaattatctacccattgttatttataatagtaaaaataaaatga

SEQ ID NO: 183368 - DNA, 2361 bp, Klebsiella oxytoca
atgaaaatcagttaccccctcagggacaccagcgataaagaatttcgctcactggaagatgttatgcggcttatcgacggggaagcgcacgggacctggctgctgggggcgaatggcctgtggcatggcgggatccatatcagcgatatctctaatcccttttccgccctcaatccagatgcgactaataccggggagcctgtaccgcttcagtttatggcagacggtattattgtggcgtaccgggtaaacaaagaatacctgacagcaccctactgtggacaacagctgcgctacagcagcagctttgtgctggtgaaatcgcagtgtaaacctgatccacaaaaggaaaagagctggctggagttttacagcctgtatatgcatctggcaccggttgctgattacccgaaatctccctgctataaagtcaggggcggtcacagtggcatactgttacgccagtataaaaacgggcaaaacgggttgcccgagggggagccggacaacggtgaggccgggacatatgctgctccggcaaaaacgaaaaagagcctgaaggcgggggatcgttttgtctcctcccggacgaggcgtttttacgtcacgaagaatggcaaagccaccctgacaacctttggcctggtccgtttgctgaaagagaatattccgggcaaagtacagtactgggtgacgctggatccagaactgatggagccggatggtgaaatgcaggcgctgatgcctggatggatgcagagggcaaaacaaaaaggcgcttttgactctgtggagctaactggcgaaacggaagaatggaaggtcagcgccggaacgcctgtcgggtttatgggatgtacggaatcgcccggtgagggaaataccctgctggataaagagtggttcgtgcatctggaggtgctgagtacagacccgaacatgccgggatttttatctaaccctgaaaaagtgaacggtgataaacgctccgttctggcagcaaagggaaacgccctgtttatccggcaggatacgacgggacaacccgtctttaccgcgacatcagcacgactgagcgcacagtgcctgcttcctcgggagtcagcaacgccagtcggggatgaatcgcaaaaatggtggtataagatcagcggaagtggctggctaccgcaaagtgatgtggaagaagtgagtcagtacgacctgctgaaactcgggtttcaggcgctggaggaaagcagcggcggcgatgtaatgaacagcccgtatgaaagctggatacctcaggcgtttgggacgataagccaatcagcggagcagggagccgattatcagtacggcctggtgccgccgttttatcgtgacctgatggcggagatggacagcaaccgtgacgggaaagtgacggcagaggaaatcaggcaggcgctggcagtgcgtgatccgctggtgaagaatgtggtcaaccggctggtggtaaaacatcacagcgagtggtgcggtggacgttcgacggggcgctgggaagggttttataaggatctggacttgctggaagtgaaatactgtgagaaatggcaggcggatctggaatggatgagtaaggtgccgccatttgataaggatgaggcggtgtggcattttcatccggtaatttttttggattctctgaaagataaatcagagctaattaatgttgatgcttttattgcccagtatgaaaacgaacatgtttcctttgctccaggtacgctgattctatcccaaggttcaaaaaataatttgcgaaaaattttggaaagtataaatgaattttaccctcaccatatggagtatgtgccgaatttatatggaatttcgtatatgctagctacagcgaggcatgagacatattatttcccaaccggcgagtattttagtgaacaaccagaagtaggtggtgtgatttattttaataaatacgatccagtacttgctgcaacacaaaaattaaagaaaagagcaatagctaacggcaatacgcagcagggggatggatataagtatcgaggtagaggttgtgtgcatcttacctggaaaaataactatcagaaagcgaaagataaatttggagtagattttgtgaatcaaccagaacttgcggctgattttaagcatgctgtgccaattatgatttggggtatggaggaaggtatattcactgggaaaaaactttccgcatatatgattaataatggaatggattatgagggtgctcggcaaataattaatggcaatgatcaaaaaagtctaatagcttcctatgccaagaagtttcaatcaattttagaaaacacatcctctcttttcagtgggctttaa

SEQ ID NO: 183369 - DNA, 2358 bp, Klebsiella oxytoca
atgagcggttccctgatcaacaaggctaccagtgtggtgcaacagctgtcagggcagtcacggtaccgggttgatgtgcatgaatgcagtgatttccttgatgttctgcgttacagcgcggtggaatcacttagccagccctggcgctatgatgtggcggtcacctgctcttctgcggatattgcctgtgacgcgttactgttgaagcccgcgtcattcactttccagacacacgtgtttgacggggcaccggccctgccggtcaggacggtattcggcgtggtggagtcgtttcgccgcgtgtccacctcgaatgatgagacccggtacgcgctgacgatcgttccccgtatcgccctgctgggctatacgaaagggagcgagatctacctcaatcagtcggttattgaggtggttgaacaggtactgcgtaaacacggtctggaagggcctgattttgagttccggctctcccgggagtatccctcccgggaactcatcacccagtggcgggaaactgaccttgagtttattcagcgcctgctggcggaggtgggcatttactggcgctatgaaatggacagccgtcttgaacaggacgtggtgatttttcaggacagtcagcagcagtatgaatttggcgtcacgctgccgttacgcaaccaggccgggatgagtgacagcgggcaggagagcatctgggatattcagaccgcatacaatgtggtgagcggaagtgtggccacccgtgactacaactatcgcgacgcgctgaaacctcaggacagcactgaaagcattttcagcaaggaagggatcactaccggggaaacgtaccattatgcggaacccttcctgacagcaggtgacgctgcaagcactgaaaccggggcctacttcgcccgcctgcgtcacgaacgcattctgaacgcgcagtatcgcgtcagcgggcattcctccagccctcatctggctccgggtcaggtactggaaacggacggaacgcttcccgatgccgtcagggaaggcatcgtcatcaccacggtgcgcaccagtggttcgcgcaaaagtagctttacgctgacgtttgagggcatcccctacagtgaaaccgtctgttatcgtccggcactgctcaatcgaccggtgatatccggctcgctgcctgcccgggtggaaagcacacagaaaggcgacacctattcctggctcgacccggacgggcgataccgggtaaaactggacttcgaccgtaacagtcctgaacagggttatgcctatttgtggctgcggctggctaaaccgtatgccggtgatacgtacggattccactccccgcttatcgacggaacggaagtggccgtcgtttttgacggcggagacccggatcgtccctacatcgcttatgccctgcacgactcagaacatccggaccatgtcaccagtgacaatcatacgcggaacgtgtggcgcactccggcgaacaataagttgcggatggaggataagcgccaggaagagcatatcaagctcgcaacggaatatggcaaaacgcaactgaacatgggacacctggtcaatggccagcgtgaaaagcgcggcgccggttttgaactgcgtacggacgagcatggtgcggttcgtgcggcaaaagggctgttcctgacggcggatgcccagtccaaagcccagggcccggtgctggaaatggcgccagcgattaaccagattaaccaggccaacagccagatgcaggcgctgaacagcgctgctgaagccgcaggagccctggtctgtgacatcaatacccagattagtctcgtgaccgacaaaatcaaagatctccggtctgcggtcctgctgggcagcgctccgcagggggtggcactgacctcaggtgaacaccttcagctcagcagcacccgcaacaccatggtcaatgccggtcagcatcttgatatcggtgcgatgaagaatctgtctgtaacggtagaaaaagccctgggtatgtttgtctataaagaagggggtaagctggtcgccaaccagggagatatcgaaattcaggctcagcacaacacaatggtgcttatggcaaagcagcaggtggcgataaccagtagtgaggatgggatttccatcagcacgccggaaacgctgacgctgaatggcggcggatcgtatatgaagctgagtaaaaacgggattgagcatggttctgaagggatgatggtgatgaaagtggctaactacctggttacccgtaccggggcatcattgaaaggtgtcacggaggcgttcaggaaaactacactggaactggttcctccccagcggcgtggaaggatttcaaggtaa

SEQ ID NO: 183370 - DNA, 2643 bp, Klebsiella oxytoca
atggaacatcattcagcagtcctgctacgacgacttaacccttattgcgccagagcgctggagggtgcggcttctttatgtcagacccgagcccacgccgaaattctgccggagcactggctgctgaaactgctggagcagggcgaaggtgacctgacggtgctggcccgtcgctatgagtgggatatggacagtatctggcaggatttgctcggctggctggatacccttccccgctcagtgcgcagtcgcccgcagcttgcagaccacattcagaccctgatgcaggaagcctggatgattgcgtccctcagcggtgaagcgcacatccgcagtgtgcacctgctgatggcgctggttgaaaaacaggatctggtccgctgcgatgggctgtggccgctgttaacgctgggccggagccagctggagcgcctgcgtccgctgctcgatgcgcagtcggacgagcgtccggaagtacagcagcaggctgagctggaacagggcggcgaggtgccgcttgctgatacaggagcaaaagacggtgaacgttcacctgcgctgcagaacgcgctggataaattcaccctcgacgtcaccgcccgcgcccgcgacggtaaaatcgacccggtgttcggccgcgacacggaaatccgccagatggtggatattctctcccgtcgtcgcaagaacaaccccattctggtcggcgagccgggcgtcggcaaaaccgcgctggtcgaaggtctggcgctgcgtattgctgaaggcaatgtccctgaatccctcaaaccggtcatcctgcgcactcttgacctcggtctgttacaggcgggcgcgggcgtgaaaggcgagtttgaacagcggctgaaaaacgtcatcagtgccgtgcagcagtccccggtaccggttctgctgtttatcgacgaggcgcacaccattattggcgccggtaaccaggcgggcggcgcggatgcagccaatctgctgaaaccggcgctggcgcgtggcgaactgcgtaccatcgcggccaccacctggtccgaatacaaacagtacttcgaacgcgacgctgccctggagcgccgcttccagatggttaaagtggacgagccggacgacgacaccgcttgcctgatgctgcgcggcctcaagtcacactacgcagagcaccacggggtgcatattaccgatgaggcagtaaaggcagccgtcacgctctccagacgttacctcaccggtcgtcagctgccggacaaggcggtggacctgctggacaccgcctccgcccgtatcagcatgagcctggatacggtgccggaacaactgacctgccttaaagcgcagctcacggcgctggatatggagaagcaggcgctgctggaagatatcgcggtgggcaacagcgctcacggcgaacgtctggccgccaacgaacaggatgaaatccgcattatcctgcagctcgacgagcgggaaacgcagtacggccaggaactgaagctgaccgaagaactgctcgcctgccgcacggatatctcccgccaggcagaaattagtgacctgcagacgcaactcactatcgtgcagcgaaacaatccgctgctgggcctggacgtggatgcgcgaaccgttgccacggtcatcgccgactggaccggcgtgccgctctcctcgctgatgaaggatgagcagacggggctgctgcgcctggagaataacctcggcaaacgcgtggtgggccaggatgtggcgctgaatgccatcgcacagcgcctgcgtgcgtcgaaaacaggcctcgccccggagaacggtccgcagggcgtgttcctgctggttggtccgagcggcacaggcaagaccgaaaccgcgctggcgctggcggatgaactctttggcggagagaaatcccttatcaccatcaacctctccgagtaccaggagccgcatactgtctcccagctcaagggttctcctccaggctacgtcggctacggtcagggcggcattctcaccgaggcagtccgtaagcgtccgtatagcgtggtgctgcttgatgaagtggagaaggcccatcgggatgtgatgaacctgttttatcaggtctttgaccggggctttatgcgggacggggaagggcgtgaaattgatttccgcaataccgtgatcatgatgacgtccaacctgggcagtgacccgctgatgcagttactggaagaacaaccagaggctacggagagcgagctgcatgagttgttacgtccgatcctgcgcgatcatttccagccagcgctgctggctcgcttccagacggtgatataccgcccgctggcaatggatgccatgcgcatcatcgttggtatgaagctggcacaggtgagcacgcgcctgcaacgccactacggtatctccactcacactggcgaaagtctcatcgacacgctgacgacggcgtgtttgctgccggataccggcgcccgtaacgtcgacagcctgcttaaccagctgatcctgccggttctgagccagcagttgttaagccatatggcggcgaaacaaaagccgtcctcgctacagctgacttgggatgatgaagagggcatagtgctgacatttgatgaacaggcagaaggagatccgtcatga

SEQ ID NO: 183371 - DNA, 492 bp, Klebsiella oxytoca
atggcaatccccgtttatctgtggctgaaagacgatggcggcgctgacatcaagggttccgtagatgtgaaagatcgtgaaggaagcatcgaagttgttgctcaggaacacaagttgtacatcccgaccgataacaacaccggcaaactgaccggcacccgtattcacacgccgttcctgttcaccaaagagatcgactcttccagcccgtatctctacaaggcggtgaccaccggccagaccctgaaatccgctgaattcaagtggtacaaaatcaacgacgcaggacaggaagttgagtatttcaacaccagactggaaaacgtcaaactggtgaaagtcgcaccgaaaatgcacgacatcaaggatgcctccttcgagaagcataaccaccttgagcagatcgagttgcgctacgaaaaaatcacctggacctacaaagacggcaacatcattcattccgattcctggaacgaacgtaccacggcgtaa

SEQ ID NO: 183372 - DNA, 1680 bp, Klebsiella oxytoca
atgcgtagaacagtcattattccggtagtcctgcacgccttagcagccgttgccacattgctgtggctgctgtggtatttcatcccgacaggcaacgtttttaaaggcctggccactctgctgatcctccttctggcaggctggactgtctttaaaaactgtcggcgtcaggagcccgcatccggtgctaccgtctcaactgttgaactgccattacccgacacccggggcccggttgtactggtgtgtggtgacatgccggatgcgttgtttcagcgaagccctctgcgtaaaacagcccagggatggtggctacggatcggtgacgtcagccggttaactgacgttgtccgcaacatacagacgcagttcccgcgccaggtcggtcagctctcggtgatgtaccgctgcctgccagaccatcatcaggatgaagccgttcttcgttccgcactgaaaacgctccgccagcagtgtaagcagattcagtccctgacgggcttcacactgccggttgtattgagtgccgaattttccgggcctgaaacgccgtggataatcgttcggggtgataagccggttgtctgtccggttaatgattcgcctcaggcattcattgactggcagcaggcggaagacaatatcctggcactgccagcagtcagcgaggcattctcctttatccgtaatacgctggctgatgagctggagaaacctgaccggttaacgccgcccgtgcgcgcattttccgtgaccatgcgcctcggcgttgtcaatccagagactcagtcagtctggtccgcctggctctgttcccgcacctgcctgcagttttcccgaaagttagggcagacagccccggcaagcttgttcccggatgcggttctgccactgctggcaccgtttgcgtcgacggtacaggggggccagcgtacccgtcttctggttctgctgatgtggctgtgtgtcctgaccgcgttgggcatctccgcgctcaataatcgtgaccttatccatcatgtcggtgccagtttacagcgctggaatgctattccgatgaatcactaccgtcctaaagcagaatcactggccgcactgaaacaggatgcgctcctgcttgaacggtggcagcgccagggcgagcctttacgttacagcctgggctattacccgggacaacgcctctggctggccctgcagcaggctatcgatacctggacacctccacccgctccgaaaccagaaccagtaccgaaaattgtacgactcgacagcatgtcgctgtttgattccggcaaatcggcactcaaagacggctccaccagaatactcgtcaacgcactggtggggatcaaagccagaccaggctggctcatcgtggtcagcggccacacagacaataccggcagcgttcagctcaaccagaccctgtctttgcaacgcgcggaggccgtccgtaactggatgcgtgataccggggacgttccggaaagttgctttgccgtgcaggggtatggtgacagccggccgattgcatcaaacgatacgcctgatggccgtgcgcataaccggcgtgtcgagatcagtctggtaccgcaggctgacgcctgtcgtctgccaggcgcaaaacatgcgtcacaggatgtacgtgacgtttcaactgaagaaatggagaagtaa

SEQ ID NO: 183373 - DNA, 690 bp, Klebsiella oxytoca
atgagacaggatatcgatatcgaccagctgatgacggagacgtggcttaccgtcaccatgcttaagaaaggcgccgtcacgcttaatggccctgcgctttacaacaaatgcgttaaacaggttgaaagtgtgcgggaagcgctggagcgtgccggttatgacgacgccagtgtggagcatatatcctacgcacaatgtgccctgctggacgaaacggtgatgagccgtaagcctgaaaaaagtgaagaaggagaggagccgaaagtggatgaaggccaggcggcctggcgtaaagcgccgcttcaggcccgtttttttggctcacttcgggcaggtgaagcgctatgggatcgcattgcagaagttctgcatcagccctcaccgaatccggccgttttgacctgctatcaccgtgtgatagcgctgggctttcagggattatacagcctgaaagcggtcagccagtcgcagcgagatgaggtagtgaaagccctttctgagcgggtttctccacctgatgcaggcctgtccctggttgttcaccggatggggaaacatcgctggagtctgatgcgctcagtctggttctggatatcgctcgccgtcattcttaccggggttatctggtggggtggccatctgtggcttcaggctctgttgtcagcacaaataccggagctgcatggctaa

SEQ ID NO: 183374 - DNA, 1350 bp, Klebsiella oxytoca
atgaaaatttatcgtccactgtggaacgagggggctttactgtcccctcaacagttccagcagcaggctgaatgggagtcttttcgcagtgccggtgcatcagcgctggcatccccattcccctggggtgtggaaaaggttgagtttaatgacagtcttctctcgtccggtctgatccagattacgcagttacgcctctggctggaagatggttcgctgattgacgcgcaaaggagcgatctgcctccggcaccgcgtgagttagatgccagccagctggcaggtcgtgatgcggtcactgttgtcatcgcactgcctcacatgcagccgggtgttgccaacgttgaacaggaaggcgtcagagcagaccggccgcttcgctatcgtgaagagtgggtgacgttgcaggatgtctttggctctgaagaagaatccatggccgttgcccggtttaatctcaccatacggtttgcccatgaaagcaatgattcctggaaagtctgcccggtagcaagactgatccgggacgggcaaaatgcgtggcgacaggatccgtcttttattcctcctgttgcgtcatttgcggcaagcccggttcttcgcgaacgtctggtgctgctcaatcgccagttacgctcccgacgccagcgtctgatgacgatgcgtcgtgaaagcaacgaaaggctcgccgattttgccgtcgccgacgtttcccttttctggttgctgaatgcactgaattctcacgccagagtgctgacagaatacgaacgttttccttcccgtccgcctgaacaggtgtgggcggagctcgctcgtctggcaggcagtatgctgaccttttccctggaccatgatcttgatgccataccgggttatgaccacgaggaaccggccagtgcgtttcctccgctctttgacctggtcacagagctgctggaagcaagtctcccatcccgcgttatcgcgctggagatgtcccgatcggacggacagacctggaaggccagccttcatgatatccgcctgcgtgaagaggccgacctttatctctctgtgcgctcggatatcccggcctggcaggttgcggagaaattccctgcactctgtcaggcgggttcacctgacgatgtccgcgagatctatggtgcggcactcaaggggatccctttgatcccggtgagcagggtcccggcagcgttacctgtacgcatggaaaaccagtactttgcccttgatatggaaagccccgcagcgcatgaaatgcagcagcagggggtgtgtatgttctatgtgcctgagttacttggtgccctggaacttgaactttttgcggtattgcgctcatga

SEQ ID NO: 183375 - DNA, 1047 bp, Klebsiella oxytoca
atgaaaaaaacagtacttgtcgcgggagctgtaggcgttatcggacgcagcgtattggcttattatgaagataaggacgttaatcttatcgccatctctcgaacaaagccggactttgcaaccagggccacccatctccccctggatttaatggacccgtcgtcctctgatgactactccgcagtgctctcttccgttacccatcttgtattcgccgcctatcaggaaaagccaacaccagctgaactggttgacgtaaatatgctgatgctccagaaccttgtagaggcacttgagaatcactctcctggttttcagcacgtcacactcatgcagggcggaaaagcttacggatgtcatatcggccctttcccttcgccggcgaaagaatcagatccacgccatatgccgcctaacttttactacaaccaggaagatttcctgcgtgaatacagccgtggaaaaaactggtcatggacagccctgcgcccggaggctgtgatcggtatggccgtgggcaaccccatgaacctgctgatgaatattgcggtatatggttcgattgcaaaagccctgggcgtacctatgtccttccccggatctcgcgcagcatatgatgcgttgtaccaggttaccgatgcgcgtgttctggcgaaagctgtggactgggctggttcaacaaccgcatgtcgtggcgaggtttacaacatcaccaatggcgactatttccgctggtcgaggatctggccgcgtattgcgcaattttttgatgtctcccccggcgaacctttcccgttgatgctcgaaacaatgatggcggataaagctaagctttggggagagatcaccgctgagcatagtttgaaggagtatccctacgaaaaaattgtcgcctggaaattcggtgatttcatttttaaaaccgagtttgacaatattaccagtaccatcaaggcccggcagcacggcttccaggagtgcattgatacagaagatatgttcatagagatcctgcaagaactgagagaccagcgcttcattccttga

SEQ ID NO: 183376 - DNA, 888 bp, Klebsiella oxytoca
atgagccacctgacgcacctgcggacatttattgaagcctacagaacggggtcgctgtcgcgggctgcagagcagcttggcattactcagcctgcagcaacattacatattcaggccctggaggcactggtaggtaaaccgctctttatcagacgatcacggggtgtggaaggcactgttgccgcggacgaactcgctcgttcagtatcttctttacttgacgggctggagcttaaaatatcctctttgcgcgcgggttctgcgactggcggaaccgtgcatcttgccggccctcccgattttgttcactccagcatggctgcattactggtgccgctgatggggctggggtaccagatacggtttcagccgggaaataagcagcgtatttatgagcttttgaccagcggtactgtcgatcttgcgatcaccgcatcgatgcctgatgaaaaggtctttggttttgctcatctcgtcacggaaaggctgttactcgttcattcaccgttattgtccaatatcattggaaccgatcctgatgcctcgaccctgcgtagccttccgctcattgcatacgatgaggagctaccgatgataaggacattgtggagtgcgatgttccagacgagtcctgatatgcaggccgcctttaccattcctgatttgcgaattattcgcgaactggtcatggaaggacacggatggtctgttatcagcgatatccattgtgctcagaatctcagggacggaacgctggttacgccaacccgtattgaaaccgcgccaaccaataatctgtatctggtctggaacaagagaatgatcagtaacaataaggtggcgcgggttaaggaagtgatcctcagcaaattccccaggcagctttaa

SEQ ID NO: 183377 - DNA, 699 bp, Klebsiella oxytoca
atgctaacccgtaaagcactcctgaacggcgactttgttgatgcccatgcgcatctggtagccagtaagcaatgcctgagccgggaacagattcttgactccatgacgatcagtttaaaggagcgtccggcaggcgctcctgtctggatttttgcgtacggttcgttaatgtggaatcccctggttaccatcgaagaaatgcaccgtgccaggttgcaggggtggagtcgactgtgctgtatccgacttatttccggcagggcaaccccggcacagccaggcagaatgctagctcttgataagggctcggaaacggaaggcatgatctttcgcctcccggagcattgcctggagcaggagctggaactgatatggacacgagaaatgatcgggggattatacattcccgtctgggctgatgtgctgttgagtaacggtgatacagtcaaagcgctggtttttgtttcggaccaggggcatccttgttacgaggccgacagtactgtctcaacggttgcaaaaatcgtctctcatgccacgggcagtattggttcaaatgcttcttatgtgacgcaacttgatacaacactttcggcctgggcaatcagggatgactatattcagcagattgcctcaatactaaacaacaaatattgggacataaatgagccacctgacgcacctgcggacatttattga

SEQ ID NO: 183378 - DNA, 1200 bp, Klebsiella oxytoca
atgccactcgttatttatgtatttaccatcagtgcttttgcattgggtcttgctgagtttgttccaattggattgaccgatgttattgcccacggactgaatgtcagcctggagcaggctggaggagcaatcacaacttatgctcttggcgcgacattcgcagcgcctgttctgaccgctttgacatcaggctggagtcgtaaaaatgccatgctagtgacgaccattattttcactgcaggtagcttgctttctgccctggcgtttaatctcacgatgctattaaccgcccggtttgtggctggtatggggcacggcttattcctggccgtagcggccagtaccgccgcgcgtctggcaggttcaaagcgtgcgggtagtgcggttgctgttgtctttggcgggttaacccttgcaatggctataggtgttccgctgagcacctggattggtggtatcgtgtcctggcgacctgcaatggccattatcgccgcagcgggagcgattggttttcttgggcttctgttcggcatgaaggacccattgcctgcaacggaaactgagaagcaaggtggtgcgttaacaggtctttctgtcttgttgaacggtaaattacttatggctacgctggttactgtactcgcttacgccggttcatttaccgcctatacgttcatcgcgcctgttcttacggaagtcaccggtgtcagctctggtacagtcagcctctttatgctggtttacggtgtgatggcggcggtaggtaatgttctgggtggaaaattaactgacaggacaggaataagtcgtgcaaatggcatcattatcatcggtattactgtagtcgtcggtgcgatgtggttgttgtccagctcagcgattgcaatggcgatcctgatcggtttacttggcatgttgacattcggcgcggtgccagcgttacaggcccgactgatggggattgcagatgaacatgttccacacgctcagggtgtcgcgtccggcctcaatatagcgggtttcaattccgggatcgctcttggctccgttatggggagtctgacaatctcatgggctgggatttcatggacgggtatgaccgcagctatcatcgctctggcaggtctgatgctatttattagccaacgccgtcagcatggaaaagccgattttcgtcctgctaccagttcaggacactaa

SEQ ID NO: 183379 - DNA, 1185 bp, Klebsiella oxytoca
gtgaaaaaccaggatattgacctgttaattgtagtggggatgtttttaaccgggtttgacgccccgaccctgaacaccctgtttgttgataaaaacctgcgctatcacggactgatgcaggcattttcgcgcactaaccgtatctatgatgccaccaaaacctttggcaatatcgtgaccttccgtaatctcgaacaggccaccattgacgccatcactctgtttggtgataagaacaccaaaaacgtggtactggaaaagagctacaaagagtacatggaaggttttaaggatatcgtaacaggtgaaacgaagcgtggctttatggatgtggtggcagaactggaacaacgtttccccgatccaaccgccattgacagtgaaaaagagaaaaaagcgtttgtgaagctgtttggtgaatacctgcgggcagaaaacatcctgcaaaactacgacgaatttgccaccctgaaagcgttccagaacgtcgatattaatgatcccgtcgcaatagaaaccttcaaggccgaacattaccttgatgatgaaacacttgctgaaatacagattattcgcctgccgccagagcgaaaagtccaggattatcgttcagtgtacaacgatattcgtgactggcaacgccgtgaaaaaatggtcgcggaaaaggacaaatcaaccaccagttgggaagatatggtatttgagatcgatttgctgaaatcccaggaaatcaatctggactatatccttggcctgatattcgagcacaacagaaagaataaggacaaagccaccctgaccggggaagtcagacgcctgatccgttcaagcctgggcaaccgtgcgaaagaaggtctggtggttgactttattcaacagacaaaccttgatgaactgccggacaaagcagggatcattgatgcgttcttcacctttgcccaacgggaacagcagcgggaagccgaagcgctgataaaagaagagaaccttaatgcagaagcagcgaaacgctatatccagagttccttaaaacgggagtacgcgacagaaaacggtacggagcttaatgaagcgctgccgaaactcagcccgttgaatccgcaatacaaaatgaagaaacagactgtttttcagaaaatcgttgcttttattgagaagtttaaaggggtgggtggtcagctttga

SEQ ID NO: 183380 - DNA, 348 bp, Klebsiella oxytoca
atggaaccagattgtaaaatatccattatcacctcgacacacatcgccaacacaattctgcctattttttacgcgaaagatgataaaagaggcatatcggcaaaacgcatattaaaagaaaaatactcaggaaaggaaaccagcgtgaatcagttggtagccgttgcgattaccatagaacctgataacgatctattggcaagcattgccgaatgcttacatcagtgggcagcaacgcatcaagatcacacgatgcgagcgttagattttaaaaccaaaatcatttacttatctactgctgatatattcagacttctgttaatgtccaggaaaatctgcctgttttaa

SEQ ID NO: 183381 - DNA, 1179 bp, Klebsiella oxytoca
atgcaagataatattcataaaggaaccaccgccatctggggcggcgaagccgaagcctttgccgaaggcgcaatttgcgttccggttttcaactccgttaccttcaattacgatgatatggccgaatggttcgacgttgcccttggcaaaaaagccggccatatttattcccggaatactaacccaaccgttcgtcccttagaggaaaaaattgccctgctcgatggcggagaagatgccaccagtttttctaccggtatggctgcaatcagcaataccttattttccttattaaaagcgcatgatcgtgtcgtagcgattaaagatacttacggcggcagcaataaaatttttatcgaattcctgccacggcagaatattgacgtaagcctgtgcgataccacggattttgataccattgaaaatgaaattaaaaaaggctgtcaggttctgtatctagaatcgccgactaacccgacgttaaaaattgtcgatatccaacgtctggcaaacgtcgcccatgaacacgggggtatcgttatcgtcgataacacgttcgccacgcctatcaatcaacgtccgttgacgttgggtgcggatttagtggtctacagcgccacgaaatatctgaatggccattcggatgtcatgggcgggctggtggtcggcaaaaaatctctgatccgcaccatctttcattatcgggaaattaccggcgccacgctccacgcccattcggcctatatgatcctgcgcggcatgaaaacgctggaattacgtatgcagagacataacgaaaacggcatgaagatcgccagctggctgtcggcgcatccgaaagtcgaacaggtcttttatcccggactgccgacgcacccgcattatgatatcgcgaaaaagcagatgcacggttttggcgggatgatgagcttctctcttaaagggggatttcccgccgtgattaccgttctggaaaacatgaagctggctcataaagccgccagtcttggctcggttggcacgctggttggccctccctgtacaaccagtcacgtggaattaacggccgaggaacgggctaacgccggcattcccgagggattgatccgctattccgccgggattgaaaatctcgaagacttgattgaggatctgcgccaggcactggatcgggtttag

SEQ ID NO: 183382 - DNA, 999 bp, Klebsiella oxytoca
atgtcagctaaaaatccaatatcttcgaccatcgactttgctgctgatggtattcatcacggttatttaaaactgccttattcctgtgaccaatcggcctggggtacgattatgatccccatcaccgtcattaatcatggtcaggggaaaacggccttattaaccggtgccaatcatggcgatgaatatgaagggccggttgcattaagtaaacttgccaatactatcgatattcagaatgttaacggccgcattattattgtgccgttcatgaatacaccggcatttttggcggcaacccgcacatcgccgattgatcatggcaatatgaaccgcagtttccctggcgtccctaacggtaccgtcacacaaaaaattgctgattatttccagcatactttattgccgttagccgatatcgtcattgatattcattccggcggtaaaaccctcgattttctgccgtttgccgccagccatattctgcaagataaagcgctgcaacaggaaaccgaacaattagttgcggcgttctcggcgccctattcgttgcaaatgctggaactggattccgtcggtatgtttgacaccgccgttgaagacgccgggaaaatttttgtcaccaccgaacttggcggcggcggctccagttccgcgaaaaccgtcgcgattgcggaacgtgggattaccaatgtgcttatccgtgcgggaattctgaatggcgaattacaattatcgcctaccgtatatttgaaacaagatgatagcgtttgtttcattaccagcgaacatgacggattatttgaaatttgtcatgaccttggcgccatggtgaagaaaggtgatgtcgtggctcgtgttcatgatatgaaacgtaccggcgttaagccaatcgaatatacagcaaaatgctcaggactggtaaccggtaggcatttccccggggtgatccacagcggcgataatatgctggttattagtgaaatcgtcagcgcgtaa

SEQ ID NO: 183383 - DNA, 1191 bp, Klebsiella oxytoca
atgaccgaggctaacatccagcttccctttacccgcgaagaataccagcggcgcttagccaaaacccgtgcagctatgcaggataagggaatcgaattactgatcgtaacggacccatcgaacatggcctggctgaccggttatgacggctggagcttctacgttcaccagtgcgtgctgttgccgctggaaggcgacccctattggtacgggcgggggcaggatgttaatggtgcgaaacgcaccgtttatatgcaggaagatcacctgattggctatcccgatttctatgttcagtcgcctgtccgccatcccatggattatctgtccaaagaggtgattgcggcccacggctgggagaaaatgaccattggcgtagaaatggataactactatttcagcgcgaaagcttttgcctctctgcaagcgcatcttcctgcagctcgctttgtggatgcgacggcgctggtaaactggcaacgggcagtgaaatcggcacaggaaatcgaatatatgcgggtcgccgcgcgtattgtcgaaagtatgcatacccggatttatgaacgtatcgagccgggcatgcgtaaatgcgacctggtggctgaaatttatgatagcggtatccgcggcgtcggcaattttggcggcgactatccggccatcgtcccgctattgccatcgggaaaagatgcctccgcacctcatttgacctgggatgattcgccgatcctgaataataccagcacctttttcgagatcgccggttgttataaacgctaccattgcccgatgtcgcgcaccatttatcttggcaagccgccgcaatttttccttgatgcggaaaaagcggttctcgaaggtactgaatgcgctctcgacgtcgccagagctggcaataccaccggggatatcgcgcggacattcttttccgtcttagaaaaatatggcattcataaagataaccgttgcggttatccgatcggcatcagttatcctcctgattggggcgaacggaccatgagcttacgtagtgatgatcatacagaacttcagccaggcatgaccttccatttcatgacaggactgtggatggatagctggggtttagaaattactgaaagtattttaattaccgatactggtgtcgaaactttctgcaattatccgcgtaaactctttattaaagattaa

SEQ ID NO: 183384 - DNA, 1410 bp, Klebsiella oxytoca
atgaaatcatggggtacggcgctcagcaaaattcgtcctggcgagttcaaatttaaggtgcttgtcgacaccatcatccatgaaattgagaccgggaagcttgtcgatgggcaacgccttcccccgcaaaggaaagtggcggatgatctgaacattggtattcaaacgatcactaatgtttataaggaattaaaaagacagggattgattcgtggagaaaccggcagaggcagttttgtcacccggcgggctaccgataatgtcaattacgacatattggatcagcaacagcaaaccatgctggacttttccaatgcttgtcttatccgcaatgccgagcaggaaaaggcatggcgagacacctgcctgcaactgagccaggaacagtttcaaccctggattcatacgttcaggcccatcgccggtcttgagcctcaccggcaagccgccacccagtggttaaaggagaaaaccgggcttgatgtcgaaaccaaatccctactcatcaccaacggttgcgcagaagctatcgatctggcactgtcatcgctggcggggccgaatgatcttgtgctgtgcgaaaggcttaccgatcatggcgttatcggtatgtcgcaggtgttgggatttaaattaaagggtctggaaatagatgaacacggcattattcccgatcattttgaagagctgtgcgacgaccagaaagtgaccgctttggtctgcacgccaaacctcaataaccccaccggagcgattatgccggagcaccgccggcggcaaattgctgaaattgccgcacgttacaatgtttatatcattgaagacgatgtctacggcgcgctattaagccagcaacaacgcccgcgccccatcgccacctgggcgcctgatctcactttttattgcaccagcttcaccaaaacggtccttaccggattacgcattggctacctcgtcatgccgccgaaactggccttacgcaccgaaagtatattgcgcgtaaccagctggatggcctcgccgatactggcggaaatcgcatcccgttgggtaatggatggcacggcaaaccatcttattgaaggacaaaagaaattaatcagtaaacggcaggcgctggtcaggaaatattttgctaaatatttgtcaggcggcagccctcaggcattgagttgctggataaacatccccgaacactggcagcccgatcatctcacggcagaactacgcaaaagacaggtcgccgtttcgtcatcctcgcccttttcggccgataaaaccgccatcactcatgccattcgggtatgtattggtgcagactgcagcgatgcgcaattcgagcaagggctattgacgatttacgacttgttcaaccaatatccgcagatacaacctgccgacattgtataa

SEQ ID NO: 183385 - DNA, 855 bp, Klebsiella oxytoca
atgaaaaaatggcttaagaaaacacaacgaaccgccttggggattggggcgctggctttattcatcaacttttcctgtcatgcagatacggccctcgacaagctaaacaagacaggcgaaatctccatcggttattccaatgaagagccattcgcctatgcggatgcgtcaggaaaggtgactggcgagtctccggaaatcgcgaggatcattttcaaaaaactcggcgccaaaaaagtcgattccgtgctcacggaatggggggcgttgattccgggcttgcatgccggacgctttgatgtgatcgcggcagggatgtatatcactccggaacgttgcaaacaggtgctgttcaccgacccgcaatatcagcttggcgatacgttgttggttaaacccggcaatccaaagaaactgcatagttatgctgattttgccaaaaaccacgacctgcgtcttgcggtgaccgccggtacggttgagctgaaatatgcccgggacagcggtattgctgatgatcagattattcaggtgccaaataccacggcgcagttgcaggccgtcaaggcgggccgggctgatgcggcgataggtaccgcgctgaccatgaaggatctggcgaaaaaaggcggatcgtcggtagaggcgaccacggattttgtggacgatccttcgcacatcggctatggcgcgttggcattccgtccgcaggataaggaattaagagataaggtgaatgcggaattgaaaaaatggttgggttcggaagaacacctgcggaccgtggcgccatttggctttgataaaagcaacatcacccataaaaccgccgctgaaatttgtaagggctcgtga

SEQ ID NO: 183386 - DNA, 690 bp, Klebsiella oxytoca
atgattttagtgaaatcagcgggtgtgtttatgcatgaattattgcctttgctatgggatggcaccttagttactttgcaaatcaccgtgtttggatcgctgctggcggtggtggtggcgctcgtcgcggcattaggcaaactctcccggtggccgggagtgaaatggctggctatcggctttatcgaactgtttcgcggcacctcgttgctggtccagctgttctggctgttttatgttttgccgctgccgccgtttaatatcacgttgacgccgtatgtcgtcgctattattggtcttggcttgcatattggcgcctatggcgcggaaattcttcgcggcgcgattcttgcggtccccaaaggccagaccgaggcggcattatcgctgaatatttctccgttacagtgctttacccatgtcgttttaccgcaggctatcatccatgcgattccgccggggaccaatcttcttatcgaactgttaaaaaatacctcgttggtttcattaattaccctgtcggatctcacttttcgcgccgggcaactcgatcagctcaccggcaatacgctgcaaattatggggctgacgctgctgttctattttgtcatggcgcaaatactggtggcggtgatgcgcctggttgaccggcggtttcagcccgggcgtaaaaagaggaaggcggcatga

SEQ ID NO: 183387 - DNA, 657 bp, Klebsiella oxytoca
atgaacttatttgactggcaatacacacgggaaattttcccgctgatgatgcaggcgtcgatcaagacaatttatatcaccctcatcggctatgtcatcgcgttagtgctggggttatttctggcgatggcgcggcgtagcgcttaccgctggctggcattcccggcgaccggggtgattgagtttattcgtagtacgcccttattaattcaggtttactttatattctatgttctgcctaactatggcctgaatatttcggcaacccaggctgggatcatcggtatcgggctgcattatgcctgttataccgccgaggtctatcgttcaggatttaatggcatcccgaccgggcaatgggaagcgattaaagcgctgaatatcccggggcgagccgcctatctggatatcattttcccgcaagttatcaggccggtagtgccggcgctgggtaactattttattgcgatgtttaaagataccccggtgttatcagcaataaccgttgtggaaattatgcaagaagcaaaaaacattggttcagagaatttccgttacctcgaaccgataaccctggtggggtgcttcttcctgaccattagcatcgtgctggccattctttttaataagatagaaaagaaagtcgccttaccataa

SEQ ID NO: 183388 - DNA, 783 bp, Klebsiella oxytoca
atgaatgttgcacaaaaaccagacagccaaccgttagttcgctttaatcatgtcgataaatattttggcgacctgcgggtattaaacgatctcaatctggcggttgccccggcggaaaaactggcgattattggccccagcggttcggggaaatccaccgtattacgcgccttgatgaccctggaaaaaataaactccggaaccattgaggtggagggggagttactgacgcatatccacaaagatgggcaactggtgaccgcgccggaaaagcatattcggcagataagaaaaaagatcggcatggtgtttcagagcttcaatctgtttccgcatatgaccgttatgaaaaacgtcatcgaagcgccgatcaaagcgttgggcttatcgaaagcggaagcggaagaacgcgccgtcagtttgctgcaaatggtcgggttgatgggtaaagccgatttgtatccttcgcagctttccggcggacaacagcaacgggtggcgatcgcccgggcgctggtcatgcgcccgaaaatcatgttgtttgacgaagtgacatcggcgctggacccggaattatgcaacgaagtgctgaatgtcattcggcaattaggcgaacaacataagttgacgatgattatggtgacgcatcagatggggttcgtgaaagagtttgccgatcgagtctgttttttttgccatggcaatattctggaacagggaacgccggatgacctattcaatcgcccgcaaagcgaacggttacagcaatttctaaatgaataa

SEQ ID NO: 183389 - DNA, 147 bp, Klebsiella oxytoca
atgaagaagcgtttttccgacgaacagatcatcagtatcctccgcgaggctgaagccggggtttctgcccgtgagctctgccgtaagcacgctatttccgacgccaccttttatatctatggactacctccgttttgcaagtactga

SEQ ID NO: 183390 - DNA, 492 bp, Klebsiella oxytoca
atgcgcagaacaattgccgagctctatgatctctttaacgatctcgagcgtcggatccatttttttgataaggaaattgaaacagtattcaggcaatcagaagcctgtcagcgtatcgccagagttaaaggcattggccctaaaacggccacggccgttgttgctgctattggcaaaggaactgaatttaagaatggccgccactttgctgcatggctgggtctggttccacgccagcattcgagtggtgacagacaggtgctgatgaatatgacgaaaaaaggcgacaagcatctgcggacactttttattcatggtgcccgcgctgtcgtcagggttgccacgaataacaatgatggccatatgaatcagtgggttaaccagttaaaggaacggcgcggatttaataaaacgaccgtggcggtcgctaacaaaaacgcgcgaataatctggtcgatgctgagaaatgaaaccgagtatcaggtagtgtga

SEQ ID NO: 183391 - DNA, 192 bp, Klebsiella oxytoca; identical to SEQ ID NO: 92451

SEQ ID NO: 183392 - DNA, 336 bp, Klebsiella oxytoca; identical to SEQ ID NO: 183185

SEQ ID NO: 183393 - DNA, 234 bp, Klebsiella oxytoca; identical to SEQ ID NO: 183184

SEQ ID NO: 183394 - DNA, 135 bp, Klebsiella oxytoca; identical to SEQ ID NO: 183183

SEQ ID NO: 183395 - DNA, 231 bp, Klebsiella oxytoca; identical to SEQ ID NO: 136900

SEQ ID NO: 183396 - DNA, 426 bp, Klebsiella oxytoca; identical to SEQ ID NO: 138614

SEQ ID NO: 183397 - DNA, 1272 bp, Klebsiella oxytoca; identical to SEQ ID NO: 138613

SEQ ID NO: 183398 - DNA, 783 bp, Klebsiella oxytoca
atgagcggcctcttatcatattctcacccgcagcagtcggcgcaaatgccggtggccattgactatcccgccgcgctggccctgcgccagatggcgctcgttcaggatgaactaccgaaatacctgctgtcgccggaagtgagcgccctgctccattacgtccccgatttgcaccgcaaaatgctgctggcgacgctgtggaacaccggggcgcgtattaacgaagcgctggcactgacccggggggatttttcgctggcaccgccgtatccgtttgtgcagttggccacactcaaacaacgcaccgagaaagccgccagaacggcaggccgtgctccggccggtagtcaggcacatcgcctggttccgctttccgatcaccagtacgtcaaccagctgcagacgatggtggccacgctgaaaatacctctcgagcgtcgcaacaagcggaccggccgaactgagaaggcccgcatctgggagattaccgaccgtaccgtccgcacctggttgaatgaagccgttgacgcagctaccgctgacggtgtgacgttctcagtaccagtgacaccacacacgttccgacacagttacgccatgcatatgctgtatgccggcattccgctgaaggttctgcagagtctcatgggacacaagtcgataagttcgacggaagtctatacgaaagtgtttgcgctcgatgtcgcggcgcgccaccgtgttcagtttgctatgccggaaaccgatgcagtcgcgttgatgaaacagctgagacggggataa

SEQ ID NO: 183399 - DNA, 924 bp, Klebsiella oxytoca
atggttaatgatggcagatcagacaatgaagccgatgatggtacggtttcgtataccatcagaaatattccgggctatcttgattatattattaccagccaggcggccagtgccggcaaacccaaaacaacctggctgcgggagctcctggtggacaccttccgcgatgatatttcaaatttcatccgtaagagtggtctggtagcttccctggatgcagagctttttgaatacctgagagccagtgcagaccctaacgggtactcaggactgctgcctggcatcaacgagggttacatcagttttctgaacctgaagaacgatgatgatctcaagcgtatcctttttaataatgcgccttatctgcgggatatggcaagagtaggaatggccgggatcagttacttcaggcgggggctgtcgcttgaactggccctgtttgcagagctggccgctcaggattgggctgttatcagaatggcctgggaaaaggctttttactccactcagcctgatgcagaaaatcagttctataaaaatatcgactccgtcaggttgcttaaaaatctgtcctctctggttcccggctttgttacggaaggttcgttcgtgactttatacagttaccgcccggcgagttacggcgaatcagcatggcgggtgcaggtcatgctgaaagacggccataacggagcagtaccagctccggttcccaggtttcccggatgggtcatcattgctgacccgggatacaccacgtcactcagttcgccaggtggcactggtccggcctatttcttccgcaataaccggtgtgaatttcatgtctatgcctggcatgccggagagtttgtcacggatgaaaatgtcgagatcgggctgacgcagcagctgctggcctgcattgaaagccagatggtataa

SEQ ID NO: 183400 - DNA, 291 bp, Klebsiella oxytoca
atgagtaatagcagaaacagtcgatatgtctggggtaacgtttccttttccttgatcgcgaagatggcgcccgggcaggtggtctgcctggcgctgaacctggacgaaaacgatgccctgcgtgaagcatcaaagtccctgaaagctgccttttccagggccgggcgcagatgccgcctgacgtcaggaactgctgcgggcgaatttacccgccgccgggcaggaacagcgacacacctctatgtcagagtttatgagacagccccggtggggcagggagcaaataactga

SEQ ID NO: 183401 - DNA, 345 bp, Klebsiella oxytoca
atgaaaaatacgtccgacatcgtgggaatgcttgcattcccgttccagactgaaatcgcttttgttgtcgcgattttcaccaccgctcaacgcctggtcgtcagtgccagggaccacatctgccagaagcgatactggagcgcctgtctctgcgccctgcttcttgtggcttatgtgggacttactgccggggtggtctgggctgtagtgccctggcttaagacctttttcctggtgaaacttgccatttcgccattctgggtcatgccattaagaagcttgctactcaggggtatcggtaagatggttacagccatctgccgaaagttaagcctgcataactaa

SEQ ID NO: 183402 - DNA, 267 bp, Klebsiella oxytoca
atgcgcaaagcccgattcactgaacaccagattatcgccgttctgaagtccgtcgaagccggacgcaccgttaaggatgtctgccgcgaggccgggatctctgaggcctcgtactacaactggaaagcgaagttcggcggcatggaagcctctgatatcaaaaagatgaaagaccttgaggatgaaaaccgccggctgaaacagatgtttgcggacctgagtctcgagtgccgcgccctgaaagacgttattgaaaaaaagctttaa

SEQ ID NO: 183403 - DNA, 705 bp, Klebsiella oxytoca
atggcgctgaccgtggcggctgaacgctatccgcgatacggatttaaaaagctttttcaggtacttcgcaggcagggtaatacctggaaccataaaagagttcaccgtatttactgcctgctgaaactgaattttcgccgtaagggaaaacagcgcctgccggtgcgtaatccggctccactggcgacgccagaggcgatgaaccagagctggtccatcgattttatgcatgatgcgctggtgtgcggcagacgcttccggaccttcaccgtggtggatgattttaaccgtgaagcactggctatcgaaattgacctggatatcccggcgcagcgggtcgtgagagtgctggacaggatcgtggcaaaccgcgggtatccactgaagatgcggatggataacggaccagaactggtctctctggcgctggcacagtgggcagaggagcatggcgtgatgctggaatttatcaagccgggaaagccaacgcagaatgcctttatcgagcgttttaaccggacgtaccggacagaaatcctggatttttatctgttcaggacactgaatgaagcacgggaaattactgagcgctggttgatggaatataacagcgagcgacctcatgagtccctgaataacctgacgccggaagagtaccgactgatggctgataaaccggaactctcaaaaagtgcgtggaactaa

SEQ ID NO: 183404 - DNA, 213 bp, Klebsiella oxytoca
atgaacaagcgtggcaactgccaggataatgcggtggccgaattgttcttcagttcactgaaaaaagaacgcattagtaagagaatatacaaaaaccgggatctggcccgggcggatgtcttcgattacattgaagtgttctacaatcgggcccggcgccacagtcaccccggcggcgtcagtccggaggccttcgaacaggcctcgtcgtga

SEQ ID NO: 183405 - DNA, 186 bp, Klebsiella oxytoca
atgccgcaaggcaaggagaagaaggccatgaaactgccgcgaaacactctgctcgggtgcgtattaatagtgtgcctcacactgctgatattcacttacctcacccggaaatcactttgtgaaatccggtacagggacacgaacagggaggtggcggcttttctggcttacgaatccgctaagtag

SEQ ID NO: 183406 - DNA, 357 bp, Klebsiella oxytoca; identical to SEQ ID NO: 139216

SEQ ID NO: 183407 - DNA, 213 bp, Klebsiella oxytoca
atgaaagtatacggccatcaacacttatcagaggttttctcccgggaaacttccccatcctgttttgaaccaaaagcggaaaaggtgatcgcttttcatggaaaggatgccagttacgcctataacgtgctggccgatctgaaagccgcaggtgcttcatatacgcgccggaatatcatcgccgatatgttccgccgtctgggtgtggaatga

SEQ ID NO: 183408 - DNA, 225 bp, Klebsiella oxytoca; identical to SEQ ID NO: 95261

SEQ ID NO: 183409 - DNA, 321 bp, Klebsiella oxytoca; identical to SEQ ID NO: 95262

SEQ ID NO: 183410 - DNA, 279 bp, Klebsiella oxytoca
atgaaatataaaacccttagccaggttcataccgaagcaatgaacgatcatgagtacagcgcggcattcgaggcagaagaagcctcggagctacttcgggaaaccttagcaacatggagaaaagaagcgggtttgacgtcggcacaggttgcagaacgtatgggcatcaaagcgcctactatctcacgtatggagaagaacgcttcgcgaatgagtattcagacgctggttcggtacgccagagcatgcggtgttaactttaaaattcagcaggtttga

SEQ ID NO: 183411 - DNA, 414 bp, Klebsiella oxytoca
atgattagcgatgccaataaagcggtgaatgacctggcgagtattgtccctctgctgggtggcagttcgtcccgcaaagattacgaagatgcacgtaaactcgttgagtatcttctggaacatgacccggacagcccgctggttgatatactgactgcccgcattgatgcctgggaaaataacgcggtggaatttgaagaatttaatacgcgcatcgaagctggtaaaaacggtgtatcgttgctgcgggttcttatgcagcaacgcgggctttcacagtccgattttgaaaacgagataggcaacaaatcactcgtcagccggatcctcagtggtgaacgcagtctgacccttgatcacatgcgggcgctggcaaatcgatttcaaatcccggtctcgatgtttgttgactga

SEQ ID NO: 183412 - DNA, 216 bp, Klebsiella oxytoca
atgcgggcggcgcgtcagcgcggcccggttttcccggcgccgcaggcgcgcggtctttcgaggcgcggccagacggggaccgatgcccccttcgcctgctctgttcccgaatcagtcaacaaacatcgagaccgggatttgaaatcgatttgccagcgcccgcatgtgatcaagggtcagactgcgttcaccactgaggatccggctgacgagtga

SEQ ID NO: 183413 - DNA, 348 bp, Klebsiella oxytoca
atgaacttacacctgactgaatcctcagcccatccgggaatgctggctacagcagaagcagagcgcgaatactggctgaaccggcagaaagcagcggtgaaagccccctcagaaatcgatgtccacacgttccatgacgcgctgggcctgatgtacccgctcaactggtcaacaagtgagaacggcgagtgggaaacgttcatgctgcaggaaatggtctgcggtgacgtgacagatatctatgcccgctacggagccagatatttccggctgcgggatgtgtgcaacctgagccatgcgcagatcacaacgcgcattaaggagggatttaacctgttccagaaatga

SEQ ID NO: 183414 - DNA, 147 bp, Klebsiella oxytoca
atgaatttcgacccgcaaatcgtcgcacaggcgaacgcgtttgtaaatgcccttcgcagtggtcagcgcgcccgcgttcccgctttaaagctggagtactggcagcagttcatgaccgcggtttacgctggcctcggcctcgcgtga

SEQ ID NO: 183415 - DNA, 834 bp, Klebsiella oxytoca
atgtcacaactgagttttgccgatgtgttcaatatggccagagaagccgctgataacagccctgtcattcaggcagggcagcagatcgcggaaacggtgcccacggttcagcgtatgatgagcgagcagtacagccggagccgttttatccgcgtatttaaggatacgggccgccatctggggcgctgggaagtgttcagtgattttctgtcgcttgccgccagtgagctggatatggcccggatacgaacgccggagagcatggagcactgccggaaaatctgtgcccggtacggggccaccgacatcgcgaacatgcaggaaatgttctgcctgatggtgtgtgcgctggaggcgaaatttcatgatttcctcggcgccatttttatggagctggagctgggcgataattttcgcgggcagtattttaccccgtattccgtgcagtgtctgatggcacggatgctgatgccaggcgtcagagacactatccgccgggaagggattgccaccgttagcgatccggcgtgtggggctgccggaatgctgatcgcctatgcagagtgcctgcttgaagcggatatcaacccctccatgcacatgttcggcagctgcattgacatcgatccggtggcggcagatatggccttcatccagatgtcactgctcgggatagcggcggaagtggtgacgggcaatacgctcacgatgcagttccggcgggtgaggtataccccggtttactacctcaatgattttgaaaaacgactggccgatctgcggcggttcagggccatgcgggactttatgcgcggaatacaggaggccgcgtaa

SEQ ID NO: 183416 - DNA, 291 bp, Klebsiella oxytoca
atggccgctttggctaaaacagaacgtatggagttacgcatcagccccgacgtaaaaagcgaaatagaaattgcggcacaattgagccgtgtctgcgtgtctcaatttattgcagattctgcggtacaacgcgcggaaacagtgatcagcgaacataaccgtattaagttgtccgaagaatcatggaatgccgtcatggaggcgcttgaaaatccacctgcgccgaatggtcgtcttcgccgtgctaccgcacttagtcgcgaggaatctacctgggaatggaatcgctga

SEQ ID NO: 183417 - DNA, 522 bp, Klebsiella oxytoca
atggaatcgctgaaactgaagatcgtgaagtatacgacaggcatgcaaatgaatgtcgaatccttcaactacgggcgtccagatctggacgaatttctgaaaaagcatcttgcgaagcagcatgctggcaacgtgctgaaagcatatttgcttgtcattgacgagttgattcctcaagtaatgagtttttacaccttatctggtggaagctacgcaaaatccagcatgacacgacaatatcagaaacaagtgccgtatcgcgaaacttcctgcattactcttggacacctggcggtagatgagcgcttggccggaaaaggatatggtacccaactggtgatccatactcttcgcgtggcgtattacgcttcggatgctgttggtatctatgcggtcatggtggaagctaaggatgagcaagccgctgggttctaccgcaaaatggattttatacaattaaaaacggaagcaggtgaatacaaattctttttcccaatagcgagtatagagccgctgctttga

SEQ ID NO: 183418 - DNA, 246 bp, Klebsiella oxytoca
atgaaaaatggaagggaagcttataccagctttaattttctgatgtcagaatggttcttgttaaaatggctcatcgctgcctctattgaactcaaacctggctttaccgaagatggtttggttaatatcgtttatagctatcacagcatcaccagacatgaccaatatgcggaagatgcatttctggcagaaattgaaaagttaaaaatcaaagataatatttcattagtttatctgttgaaatag

SEQ ID NO: 183419 - DNA, 732 bp, Klebsiella oxytoca
atggtaagagtgaaacgcccgacagatgaaaatatgcaagctgcggccacattgtgtgccagggatcgcagtacggtatatgagacgttaatgaatgcgatctcagagcatcgccttaaacctggcaccaaacttactgaagagaagctggcttccattttcaaggtatcacgcactgtcgtcagagaagcgctccagcagatggccttcgagcgtgttgtcgaaatcctgcctaatcgcggcgcgtttattgccagcccgacgattgccgaggctaaggaattctttcaggcacggcgatatgttgaagttccgatattggaaaacatctgccagcgcgtgacggcgcaggaaattaagctattacgccagcatgtcagggaggaagaacacgctcgccactccggtgatcggcgtaaaatcgttcgtttgtcgggtgaatttcatgtgctgctggcttcgctatcaggtaaccgttttctggagagagcggtgcgggggctgcaattgctgacctgcctgacgattcttctttatgataccccgacagatgtcacctgccagcacaatgaacataaactcctggtggacgcgatcgaatctcgggatgttgtacgcgcacaaaaactgatgcttgaccatcttcgggagatagagaattcgctccatctggaagaatcggaagaagaggaagaagacctggaagagatcctgctcggcacaggaaactga

SEQ ID NO: 183420 - DNA, 621 bp, Klebsiella oxytoca
atggcggtaatgatccatccggactgcgtgaccgctgatcctgccaccttacgctacggcactttcttcgaggatccgatggaagtgctgctgcatgatgcgatcaaccattacggtggagtatggcagaacagcaatatccactattttgacacgctcaatcaggccatcgacgcgatgcagacgcgtgaaattgatgcctgtaccttcattgaaccggtaatcatccagcttgaaatgttgggattcaagaaaatgtgcgacggcgctgatatctggcaagccgcttatcccgatacggtattggtcacacgtcagagttttatgcatcagcacccggatacggtcgatgcggtcatcagggcacttctgcaggcagaaaagacaataaaggcagacccgacgggtgccttatcaagcgtgacgcaattttatcccggtgtttctctgccagtaatgatgcagggcctgtcacgacagccgtcacaaattgatattcgttctcttgctgacaccattatcggccggttcgatgccctgtctgcgatgggaaggctggatccacctgatgatccctattcagtgctggatttcagccgtttatccaccctgctctcgtaa

SEQ ID NO: 183421 - DNA, 1050 bp, Klebsiella oxytoca
atgtcagtaaaacgtaatttacctcgactcaacggctttgatatcaatcgccgccatttcctgaaacaaagcgcgctggccgctggaggactggcattaggtaagtacctgatcagcccccctgccatggcagccgatatcaccacctttaaagcaacccacggcactggattatgtaattgccccttcttcctggtgaaggaacgcgggctggcgaaaaacgtcgcgctggacttcgttaccaccccaaccaatgccgatatcgcttccctgttcggtgccggactggttgacgtcactgtagtgccttacaccaattttattaccctttttgcccagggcgcgccgatcaaaatcgtcgccggttcaggggtacagggttgtgtaatcgtcagtcagcaaggcatcgactcagccgaaaagctgcgcgggaaaacattaggaacatttcaggcggatacgctggaaatgctgccttacgactatctgaaaaaggcaggcatgagctttgccgacgtcaaggtgcgttatttcggcacttcgccagaactggctcaggcctttatcaatggcaatatcgatgcgatgtgccatatcgaaccgtacgcgactcaggcgtttaacgcacgacctggtgcgatacgtctctctgatggcgttgatatctatggcaagaactacagcgattgcgtactggcagtccgctcttccgtattggcggagaaccgtgatgcggtgaaggaactcatcaagggcatgatgattggccagcatcaggaagaggcagaccgcgcttcggctgtcaaagataccgtaggtaaatatttcaagaccagctacgaagccactctggatgccgccgccaaacagccagcaatgattgatcaacggcagaaccaggattttatcctgcaacgtgccaataacctgaaagagctacgttacatccagaaggtaccaggagcagaaatcttcgattggtcattgctcaatgaggtgattaaggaaaatcccaacttgtatgcttcgctggagctgaaaagcgcatga

SEQ ID NO: 183422 - DNA, 921 bp, Klebsiella oxytoca
atgaatatgaattccctgtcaaagccagcaaaagtaacgggtgtttcacccgttaccaacaatccttcggtgaagaaaaatcatcatcgcggctgggctgcttttttctcgcgcctcgcctggggtgtggcttccgtcgcgctgtttgccggtatctgggaagccatttgggcctttggcgggttgaacccgctactattgccaccgccacatatcttcctggcgaattttgcccaacaggcccagtactttatccccacggatgttatcggccaggtcagtaacgacaccgcgttattatcgttaggaaaaaccatccttgcaacagtgggacgcgtaatggcgggtctgacgctgggctttgttctgagtctggtttgcgggctggccatttgttattttcgcctgtttggcaagctggtattaccgacgattaccctgcttgcgccaatctcacctatcgcctggctgccggtcgccatctttgtcttcggcatcggcaatcccccggcgatttttatggtgttcatctcactctttttcgtcatgacggtatccacaatcagccagattgagggagtcagtaaaacacacctcaacgtagcggctgtcatgggagcatcccgtgcgcagacgtttcgttacgtcattcttcccgccattctgccatcgatattcttcgtcctgcgcatgaacctgtttggtgcatggatgattgtgctggtggctgaagcaacaggcgtgggtagcggactggggcaaatcgttatgcaggcgcgcaataccttcaattccagtctgtcgtttttcaccatgaccatcatcggtattaccggatttgttttcgatctgctgctgcgttatgtgcagaaaaagcttctctactggatacctgaaaaccgcccaggaggccaaaaatga

SEQ ID NO: 183423 - DNA, 807 bp, Klebsiella oxytoca
atgaccaaccaaactcccgcacaaccgccgctaatcgattgcaaccgggtgagtaaaatctgggttgatgctcagggtactgatgttgtcgcgttgaaggatgtcaatttacaggtcgcgcgtggcgagtttgtggtactgctcggccccagtggctgcggtaaaagtaccttgttgtacatgatagccgggctggaatcagtcagcgaaggcactatccgttgcggtggcggtgaagtgtctcaaccgggtaccgaccgtggattcgttttccaggaagcctcgctctatccctggctgacggtggcagaaaatgttgccttcggactgaagatgcaggggatgtccaaagaggcaagaatgaaacgggcaatgtccatcctgcaaaacgtcgggcttgccgatgccgcggaaaaaaggccagaccagctttcaggcggtatgcgtcagcgagtggcaatggcaagagcactggcacttaaccccgaggctcttttgctggatgaaccctttgcggcactggatgtgcaaacgcgggcaaagatgcaggatttcctgatccagatctggcggcaaaccggcgtatcaatgatttttgtcactcaccatattgatgaagcggtggcattggccgatcgcgttgtggtttttactgcccgcccaggcggtataaagaaaatcatacccatcgatctcccgcggccacgcaatcccaaagatccgatgtttcatcacttaagcgaccatcttatcgacttactgcgcgatgaagtcgatcgtgcttttgccgagcaggaggtgagttga

SEQ ID NO: 183424 - DNA, 882 bp, Klebsiella oxytoca
atggccgctcccagtctgtcggtagccgcgttgcaaatgccgccgggccacgaagatctggcattgaatcgtcgaatgctggaggaagccatcacgcaagccgtgaaagctggcgctcaactggtggcactacccgaactggcactgatgccctacttctgcgcggcaccggcaggaaaataccgccactgggccgaatccgttcagggtgaaagcagtgtctggtgtgcggaactggcacaacggctcggctgtgccattttgctgcctctctatgagcacgacagccaaaacgactgttaccacaatacggttatcggctttgaccgccagggaaaaaaactgtgcaacggagccctggccaggaagttacatctgccggttaacgattatccaccgccaggatttgacgaagccgcgcatttcacacccggcaatgagctgcaaaccttcgagatcgaaggctggcgttgcgcagtactgatttgttatgaccgtcgttttcccgaatgctggcgcgcgctgcgtcaggcaggcgttgaactggttatcgtgccggtcgctggcagtggcggtgatgatgcggcgttctttttaggggaactgcgcacccatgccaaagaaaacggcctgatagtcctgtgcgcgaataaagtcggcgatgaatggctggacggtatggtaaccgataactacggcgagtcctgcgtgatcaatgccgacggcacaattctggcgcaccgctcacgcgagcaaggcccaggggtggtaaacgctacgctggattatcagcaactcgatcaaattcggaaacagctgcgctatttcgacgatcgccgcagcgatttgtttgggccagtgtcacaccgctgggtacgttaa

SEQ ID NO: 183425 - DNA, 1545 bp, Klebsiella oxytoca
atgtcagaatcactcatattagcaggcacgttaatccaggggatcggcgacgatggcctcccgatcgtggtacaacaagccgccctttaccaaaaagacggtgtgatccatgacatcggtaaagccgaagatttgatcgccgactatcctcaggcccggcgttacggctccatgcaacatgttctgttgcctggctttgttaacagccatcatcatgtgggtttaaccccgttgcaactgggttcacccgactatgcgctggaactttggtttgccagtcgtatgggcgcgcgtgaggtcgatctgcggctggatacgctctactccgcgtttgagatgatctcatcgggtattaccacggtacaacatatccacggctggcggccaggaacactggaagcaatacatcaggcggcgagtgcggtactggcagcctatcgtgagattggcatgcgcgcttcctatagttttgctgtgcgtgagcagaatttactcgtgtatgaagccgatgagcagtttgtgagccgtgtaccggctgagatccaaatacagctggccgcacatctaaaaaaacagcggttgccgctggaagattatctgaaattgtttcgcatgttgtcggctgataatcaggggcaacacctcacccgcatccagctggcccccgccaacctgcactggtgtagcgatgacgctttacaagccattaaagcggaagcggacaacgccggcgtgccaatgcatatgcatctggttgaaaccgcttatcaacgtgaatatgcacgccgacgtacaggtggcacggcactggcgcatttgcataagctgggtttactggggccatcgctgacactcggacatggtgtctggctaaatgaggcggatattgaattggccgctgcgacaggcacctgcgtatgtcataactgtagctccaatctgcgcctgcgcagtggtgtcgcgccgctcaacgccttccgtcagcatggcctgactgttggattggggctggatgaggcgggtatcaatgatgaccgcgatatgttgcaggagatgcgtctggcattacgtgtgcatcgtgtacctggcatggacgatgatgaggtgccgtcgtgtggcgaaatagtgcgtatggcaacagaaggcggtgccaaaacgacgcctttctccgggcaaatcggccgtctggaaccaggtaaactggcagatgcagtcctgtttgactggaaaagtatcacctggccatatcaggatgatgatattcctctgctggatgtgctggtccagcgtgcgcgtagcaaggacattgaaagcgtatttattgcaggagaggaagtttgccgtcaggggcaattcacgcgtgttaatcgcatggaagttcttaatgaaatcgcgcaacgactggccgcgccacgcactgctgacgagatagcgcgacttgagctgggtaaaaaagtcttcccgcacgtgaaggatttttatcgcgattatctggcaggcgaaacggcacgacagccattttactcaccctcatcacgacggtaa

SEQ ID NO: 183426 - DNA, 723 bp, Klebsiella oxytoca
gtgacgctcagccgttcgctactgtcaccgatggacgaggcgctctcgcgctacgtgctgacggacggcaaacttcaagccgatgatacgccggtaccggtgctgctgccgggcaacgataaaaccaaaaccgggcgcttgtggacgtacgtgcacgacgagcgaaacgcaggctcggtgatggccctggcggtgtggttcgtgtactcgccggaccgcaaaggccatataaaggaggcggcctgctgggcgcacgcacggcgtaaaatccacgacgtgcacgtcaggacgctgtcggaggtgacgactgaagcgctgcaccgcatcggggagctgtacgctgttgaagccggcatccggggaagaagcgcatcggaacgactggccgtgcgccagggaaaaacggtggcgctgctgaatgcgctggaaggggggctgcgggagaaacagaaaacgctgtcgcgccacccggagctggcgagggcgttcgcttacacgctcaatcagtgggtcgcgctgaagtattacgctgaagacggctgggcggaggcagacaacaacatcgcggaaaacgtgctgcggacggtcagtcttgggaggaaaaattacctgttcttcgggttggatcacggaggcgatcgtggcgcgtcactctgccctgagagtaatctccgggtcatcctgtcaatagggttctcgctgcaggcttacgctgaagtctga

SEQ ID NO: 183427 - DNA, 789 bp, Klebsiella oxytoca
atgtcacgacgccatattttcaccgaacggcagcgagcagcgctgttcgatctgcccacggacgaactgtcgctactgaagttctacacgctgggcgatgatgacctggaaaacattaggcagcgccgcagaccggaaaacaggattggctttgccctgcaactttgtgccttacgatatccgggccgtgcactggctcctggtgagatgatcccgcgtgaagtcctttccttcgtcggtgctcagcttggagttccggctgatgcgcttctcacttatgccacacggcgccaaacccgtcagcagcacatggacacgctgcgcgaaatttacggctacaagaccttcacgggccgtggtgcccgtgatctgcgtgagtggactttcggccaggccgaagatgccagatcaaacgaggatcttgctcatcgttttattgtgcggtgtcgggaaacttccaccattctgcccgcagtatcgacaatcgagcgcttgtgcgcggatgctctggtcgccgctgagcggcggattgaaacgcggattgcggaaaatttaacagcggatgttcgcgatcacctggacaaacttctgagtgaaatgctcgccggcaatatcagtcgtttcatcggcactgttgcaaagttagcgatgaggcagccttttgtcttattcaaaggccttacatttcaaaaactctgcttaccaggcgcatttcgcccaggggatcaccataataaaatgctgaggcctggcctttgcgtagtgcacgcatcacctcaatacctttga

SEQ ID NO: 183428 - DNA, 1182 bp, Klebsiella oxytoca; identical to SEQ ID NO: 92418

SEQ ID NO: 183429 - DNA, 303 bp, Klebsiella oxytoca
gtgaaaatcgtaattgatgaaaggggcaatacggggcgcgccagcattgcggccatgaactacatagcgaacagcggcatccctttgcgtactgacagtgatttccctatccagcatgacaaggtgatcatcgtggataatgtgaccgttgaaactggcagctttaatttcaccaaagcggccgaaacgaaaaactcggagaatgcggtggtgatctggaacatgcctaagctcgctgaatcattcctcgaacactggcaagaccgctggaatcgggggagagactaccgttccagctactga

SEQ ID NO: 183430 - DNA, 501 bp, Klebsiella oxytoca
atgatcgctagcggaatagttcaaaaactgaatgcgcaaatgaatcaggagttttatacctcaaatttgtatcttcagctcagccagaggtgcagcgagaatagccttaatggcaccgcactatttttgcgtcatcaggcgcaaaatacggtgacgcaaatgatgcgcatgtacgaatacatcaaacagagaggcgccacgccggtgttacaggagcaacacgcccggtgcggtgaattttccacgctggaagatctgtttgagcagacggtaagcgattaccagaagcgcattaatgcgctgacctctttgacggaagacgcccaggcagcaaacgataagtcagcgattaacttcctgaagcgatacagaaaagaggaaatcgtggacgggacgctgttgcaaatcattctggatgaagtccgcagcgctaaaaaagcgggcatcaacatgcagcaaaccgaccactatctggttggcgtgatcgatcgctatcactaa

SEQ ID NO: 183431 - DNA, 549 bp, Klebsiella oxytoca
atgcgactttttggttacgcacgggtatcaaccagtcagcagtctctcgatattcaggtcaaggcgctcaaagacgcgggggtgaaattcaaccgcatctttaccgacaaggcatccggcagctctgccgacagggaggggctggatctgctccgtatgaaggtggaggaaggtgatgtcattctggtcaagaaacttgaccgtcttggccgcgacactgccgatatgatccaactgattaaaacatttgacgcccagggcgtggctgtccggttcattgatgacgggattagtaccgatggggagatggggaagatgatcgtcaccattctttcagcagtagctcaagcagagcgtactcgcatccttgaacgaacaaatgaaggaaggttagaggccaagtctaaagggattaaatttggccgcaaaccaacagtggataaagctaaagttcactgtcttcgtgaacaaggtcttggcgcaaccagcatatccagacagttaaagattgcacgttccacagtctacaaaattctcgctactacgtag

SEQ ID NO: 183432 - DNA, 1944 bp, Klebsiella oxytoca
atggattacgaacaactgcctagggcggcactggtccgaatgcttcaagagcatgatgcggcactagtcgacgccggtaaaaatggcatcgttatgaattacaccggccgaacagctccgtggcaaataatcagacaggtgaagcctaagctcttcagtattataaaaaaatattcttgtggtgaagagcttgctcaggctgaaaatgagatttgggatggagaaaatctttccgcaatggtcactctctataaatatagagggcagattgatctcgtactgacagaccctccctacaataccggagaggatttccgttataacgacaaatgggataaagatcccaacgaccctgatttgggcgatgtagttcctaaagacgacggttcgaagcatagcaaatggttgcgcttcatgacccccagaatttggatgatgagggagatgctgaaaccaggtggcgtgatggcgatttgtatcgatcatcgggaacttttccgcctaggaatgctcatggatgagatatttggcgaggataatcgtttagcaattattaactggcaaaagtccgcggctgcgagacctgataataaacatgtctcgacggcaaccgagtacgtactggtatacgggaaagatataacccgtgtacggacggcatcgctcgctcgtggagaggctgacaacaagagatactccaatccagacaacgacccgggaaacgactggcgtgagggaaatcttactgcaaaaagttattcagctaaggacgactatggtatccagtctccattcacaggagttgtgcattacccagctggtaatggtgcgtggaggcatcctaagaagaatgtaaaaatatggctgaacgcttggggacctgagtacgaagaacgcgatataggagatggtcgtggaaaagctttggttgttaaaggccaacaaccaggagctatcgcgagctcagtatctaagaaagcatatgcccggcttgcaaaaaataactggccatttctttggtttggccgggacggtctgggtagaccccgcgtcaaaacttatcttgaacaaataaagaaagggaaagtgcccgtaacatactggtcagataccgatcttgcctccgaaatcctgactgacattgatttaggctctacatcttgggattactcggagtcgggtcgatctgcagatggtgtggccgaactaacagctgttgttggtcaagggcatggtttttctaccgtaaaacctctcaaattgatgaccaaaatcatccaactctggtgtcgtccggacggcattgttttagatccatttgcaggttctggaactacggggcatgcagtgcttgaattaaataaagaagccgatacaaatagacgattcattttaattgaacaaggcaatactgagaaaggtgaccactatgcaaaaaccctcacagctgagcgtgtaaagcgtgtgatttcaggtgattggtctaaaactaaaaaagaaccattagtggggggatttcgatttattgagctaaagcgcgaaaaaatagacgctgatgcggtgaatacgcttgctcgtgaggaaatgatagatctattactcacaagttattgggataaagcagaaaaagcaaagtcatatctcagaaggctacctactcagccgaatcggcatctatttgcggttaactcgaaacaagaagggttcttcttaatttggggggctccagataaaccatcagccctgactaaagcagcattcagggaaatagctgaagagtctaggcaggcaggtttagccccacattatcatgtgtatgctgcccttgctccatacaccggtagtagtgtcgaattttataaaatcccagatagggttcttgagcacataggtttcagccagcgtcaggactccttcaataatgagaatgatactgatgcctga

SEQ ID NO: 183433 - DNA, 2376 bp, Klebsiella oxytoca
atgcctgattttgaacttaaagtatttcaagccgatgctgcaaagacaatcgtagaccgctacgcatttttcgctgggcatccatatcgccctagcaaagggccaaaaccgcgaccattttttcaggcattatctgcacttacaggagcaggcaagacaccagtattagcacaagccgttaccctactaagatctcatttttcttcagaacccataatattctggatgtctaaagcgaagtcagtagttgctcagacctattctaactttagtgcaggtggaaaatattcagaaatcgtagatggttttcgtatcataaatatagctcagctaactcctatgcatatcgaagatgggagcacacctttgatgatcatggccactactggtctttttaataacagagatcaatctgagggggctttaaatatatataagaaagatgctgatctattcggcgattcatctccatgggagcgacttattgcacgaaaaacaggtgctaaacggcgcccattattaattgtgtatgatgagggacataatctttctgagcagcaaacagaaattttatctgaattggaacctgatgcatatttgcttgcaagtgcgactttaaagttgccagctaattttcataaggctgttatccaaccgataaagctttgggctgaagaagcctctaatgattatgagcgctttgcggaagttagtgcactcggggctgatggtagccctgatgcacagttattcgttacgacagccattagcagtgaaaaagttgttagcgccgagttggttaaaaaagctattcaatttgacggcactaccggggcaatggaaaaatcacttgatgatcttcataaaagattagaattgataaaagctgagatttccgagcgaggtcttggattcagtccaaaagccatatacgtgtgcaaaacaaacattgctgatgacggcgaaaaagatgatcactccaagccattcatgcatcggaaagcacctcctatccgtatttggcgttatttggtcgaagagaaaggtatccccccaaatgaaattgcgatttatgcaaacttgtctttcttggatgggaacaagccagcggaggtcaatcttttctcaaagggagagaatgattttgaggattttcaggctggtaatttcaaacatataatcttcaacctctctcttcaggagggatgggatgaccctgcttgttaccttgcttatatagataaaagcatggggtcgtcaatccaagtagagcagatcatcggccgtgttcttaggcaatatggcgcacgtcattatgataatcagttaattaattctgcacacttctttctccgtgttgacaatcaaagtgtattttcctcggcaataaatgccgtaaaggataagctaaaagctgagggtgcacctattgaaatagtggataattttagcggtactgcaggcactgctgaagatcttaatttaaaagatggcatggatgttaaactccatcacgtacatgttgatgctagcgatgcgtgtattcgaatagccgaaattctaagcgattttcctacgttcgtcgaagggagtgcagatactcagggacaagctcatattgcaacacagctcgtcgagcttgacgcattggggcgagatagtaaagcaactgagtggacgcctgaaggcaatacaaaccccgttcggttaaggtggttgattaatacagctatacggacacggtcaaatagagcacttgctataactgatcttaaacatcctaaatttgatgttagagttcagatacatagttctgccgcaaggtatgcagataagttagctgctgaaatagtttcagcatattatgataactctgagctggcatatgaaagcgattctccgtttcaatttggtgttattcgagttcctcgtaacgctactcactttgagcattcattatatgaaaagtactcaggacttaataagttcgaggctccttttgctgaggctttagataggtctggttacccttggcacagaaacctgagcagtggcggttttcatatcccactattgacagagggtgatacaagctcattttatccagactttttagtatggaagtcagaccttgtctattgccttgataccaaggggggccatctattgactgatgccgtagcgcgcaagctttttaatattcatgaagatggtcggagtaagattctagtgagatttatcacagaaggaaagcagacagagctgcgcggcaaagcaacaaagggaggatatactgtatggaaaatgaaatctgggcatcctaccccaatttatgtggcggatttagacaaagctgttagggaatgtctaaaatag

SEQ ID NO: 183434 - DNA, 321 bp, Klebsiella oxytoca; identical to SEQ ID NO: 103996

SEQ ID NO: 183435 - DNA, 417 bp, Klebsiella oxytoca; identical to SEQ ID NO: 129975

SEQ ID NO: 183436 - DNA, 807 bp, Klebsiella oxytoca
gtgcgattatactcacactggcggcagcatgggagccagtgcagcccggcggccgtcaacgtcgaccggacccgcatcattatggatgcaccacagaaaacggtggccatcacgctgaataatgatgacaaaaccacgccgtttctggcgcagtcgtgggtgacggatgctgacggggtgaaaacggatgcgctgatggcgttgccgccgctgcagcgtattgatgccggacagaaatcccaggtccgtatcacccaggttcgcgggctgacagacaagctccctcaggacagggaaacgctgttctggtttaacgtgcggggcgttcccccgaagcccggagacaataatgtcctgcagctggccatgcagagccagctgaaattgttttaccggccgaaagccattatcagaaacagcagtgaccagccggaaagctgtggtgtcacgccggcccagcaaaagcttctgcaggaagtgtacagggggcacactctggcagaaatgacgggtattctgagcacagacatgaagaaaatctggcagaataaggatcgcctgttagcaaaaatgggcatgagaaaccgactgtatgaattgctgaatggcacccgctttcgtgaggatttacagcgaacggcttttatggcgcccgctgaatctgacatgatgtgcaacaccgaagccactgcggggaatcagcgttcacgttccgccagaatgaccggtcacgccaggccagaatacgcagtcagggatattgcagaatactggtgccagttgcagcgtgaaatggatgacaattaa

SEQ ID NO: 183437 - DNA, 207 bp, Klebsiella oxytoca; identical to SEQ ID NO: 129973

SEQ ID NO: 183438 - DNA, 1239 bp, Klebsiella oxytoca; identical to SEQ ID NO: 26659

SEQ ID NO: 183439 - DNA, 573 bp, Klebsiella oxytoca; identical to SEQ ID NO: 26658

SEQ ID NO: 183440 - DNA, 924 bp, Klebsiella oxytoca; identical to SEQ ID NO: 101354

SEQ ID NO: 183441 - DNA, 345 bp, Klebsiella oxytoca; identical to SEQ ID NO: 161849

SEQ ID NO: 183442 - DNA, 471 bp, Klebsiella oxytoca
gtgatcctcacgctggtgaccttccgtggcgcccgtgattcccgtctgcatgtgtcagtctggggccagccttacaccgagcgttactgtttccgcccggcggaaatcccgcgtccggaaattcacggcacgcttccggcccggtttgagagccgggagaagaacgatatatacgctcacctggatgagcaggggcgctaccgggtgaagccggacttcgaccgggagagcacggagccgggctacggctatctttggctgcggatggcgaagccgtactctggtgatacatacggctggcacaccccgctcaccgacggtaccgaagtggccatcgcgtacagcagaggcggcatcgacctgccgtatatttcccacactttacatgactctgaacatccggaccccgttacccgtgacaaccgcacccgcaacgggccacagccccggcaaacaacacgctgtggatga

SEQ ID NO: 183443 - DNA, 534 bp, Klebsiella oxytoca
atgaaggaagaatacgagaagagattatatattcttaatcagaaattagataatggaatttctcaggcagaagaacatattaccctactgagaaatgaaattcagaaatccttctcatatgatcttgcattttttatcaaaaacatgggaaatgttggcttaagtaaatgggcagctacaggtttatcatctgataatgacgacgatacggccttatcacataacccaggacaaatcgatttcctgtatttccttttatcgcacggctacctttcgactgactatatggcctaccgctccgtatttatgccgggcagtctcagtactgaagataataactttatcagggcagtgacagcggggagatcacctgatgaaacagtaaaaatgcccctcagcaacattgccaacaccgtggcaaaattacacgggctgggcatgctgatgcatgataatgcatggcacctgttagaaccatttagtaatgtcactttttatccagatagaaacgtcaccttgagtaagctaaactga

SEQ ID NO: 183444 - DNA, 894 bp, Klebsiella oxytoca
atggcaagaacgaaaaagttaacttatggggctgtgaatattactatgcatcctcactctccagaaaagtatgtagagctattcaggatggctagaaagaatgcggaaaatattaatttaagaggcgattcttatgcaactttatcattcttttatccttataaaaaaggtcaaacagcaaatgaaccttttgaaggcgaagtcttaaaatatacagatattgatgttgagggagattggttcgacatcgtaaaaaaagacgtggcttctgatgaggaaaaagataggattgtaataccagaaaatttaaaacctaatgtagcacgattctcttttgtatttttacctgcaagtcatcttttagtttatgaaatgcaggataaaagtcgaaatcttacaccaagacagatggtgtcatttataacaggtatattctccaacgaaaaaataattaagaaatttggcaaaattaatgtcactatattaactgaaccagaaagcgttcagcgaatgctttcccttaagggtattacatgtataaatatggtgactcgtcgtccaaaccctgatgatcttgcttctgcggaaagtataatgcaaaaaagatttaagcgtattggggttattgaagaagataaaacgtataaatctgagagaggccaggaaattaaaccggatgtcgaattaaagcaagatgctctaattgcatcaagaaatggtgaagtaagcatccgtagagttaatgaatttgggttagtagaagttcatgcctcaagtgacactccgcttcagcgtgttgagccttacgacccagatgtaacatcagttacagatctattattgttgagggcacgatcaattgcaggcgaatttaagaggctactgacaaggtaa

SEQ ID NO: 183445 - DNA, 624 bp, Klebsiella oxytoca
atgagcgaaaagaaagaatcaaccagtgcattagccagatactggaaaatctatggtggagctggagctatatttaaaagctgctatttttggtctgctttatttatgactatgattctttacccatcttggtctcataaaggatggtggaatgatattttatcattgatgccaaatctacttggattttcgttaggtggttttgctatgtggatagccattggtgatgaggcctttaaaaaaataataactggtgatgaaataaatgaaaaaggagatgtagaaagttctccgtacatgtcagtaaatgcaacttttgtacattttatattgttacagttattaactataattactgcactcataacaaaagcatatagttctattctcattgataacgcgtttatgtattattatattggaattggttataagtatatattgttgtgttttagtttttttgcctattttatatttatatactctgttttttcagcattagctgctgtcttggctattttcagagtttcaagctggtatgataagtttatgacattacgaaatatacaggaagaatctaagcaaaaagaaaatgaagagactatcacagaaaaatctaactaa

SEQ ID NO: 183446 - DNA, 699 bp, Klebsiella oxytoca
atgcctctgaattgcattgtgtatgaaggtgaagatcttgaaacatatcaagattataatgcactacctgacgataataaagatggaagaatatgggattcggaagaacgtagcatctgtagaattaaaaaatcaattaaagactattatattattgctcaggactatacatgtccttattgtaagcaaaggattgaggttgatcataatggagcttgggatgccgaacatataattcctaaaagcagccatccaagttttgtttttgagcctttaaatttatgtgtctcatgcaaggattgtaacaatgaaaaaagaaataaacctgtattagagaataacaacaggagaagactacctattagaagtgaagactacgttattgtccacccacattttgacgattatgaagagcacattaaagtaattgaggttgcgggttattatataccacgaacagataagggtagaaaaacaatagaaaaatgcggtttattaagatttgcatataaatatgcaaactatgggggcacttctcaggaaaacaaagagacaattcttactttagctaatggtctgttagatgctaatactccggctgatgaacatgcttttttaggtgtgatttcagatgcagtggaagctggaaagaaaatatcaaaaacagcattcctagagcaatttagcgcaagggagtaa

SEQ ID NO: 183447 - DNA, 1008 bp, Klebsiella oxytoca
atgtggcttatgaagacattactaacatcgtggtgtattaatcaacggggagcaggtcaattgggattattgaatcaaaataaatttaatggcatttatgtagagcgaatcctgtcttttttaggcgcttcatctgaagttgaatatgtatttaaagttaatcaaaaaatatttcaaaagcaaaactactcagatgataaaaatggcccagatatccatcattatcatcagaagagatttttcgggaaggatttgcacttttctgacgatgaactttatgacattaacaatgctatagacttattaatgtacttagttgatagcaacaaaaacttcaaagttcgattgaagattggtagtgaaggctacataaaaactaaagattttaccattgataatcttaatagtaagcttttaacattgcttgataatgatctcataaggttaattgactttagaatagaaaaaaaagagtttggttggatgtcgttgaggcttgcgagttcgggggagcaatgtattctattgtcgatgctaggtattgccacaaacattactgacaactctttaattcttatagatgagcctgagatcagtctccatcctgagtggcaagagagatatatatcactcctgatgaggatttttgaaagatataactcatgtctttttatcattgctactcattctccacaaatagtgtcgaagcttgatgcctatagatcatatatttacactattaaaaatgatgaactagtaagtgcttctgagtatgtgaaaagatcgtcagacttccaattagccaacctatttctagctccaggttataagaacgaatatttaacaagggagctaataacatttctcacgtccccacaagaatactatgcagataaaggcgacgctgaaataatgaaaataatctctttgagagatcatattgataaagatgaccccgtatttaagttgattgaattggctcgtaaagtaattgcggagatacaataa

SEQ ID NO: 183448 - DNA, 732 bp, Klebsiella oxytoca
atgatattaacctcgcttgtcccgattaacgctttccaacgatgtgcaatggcttctattgcttctgtagagaatcgcagatctttgggacggaaaacaggagagctggcctacgtcaaagccttttttaaagagcttacaggtaaatctcaaattacctcgaatgacttgagaaaagttgatgcgagttacgatccatttgttcgtggagaagcaacaaaatttgagtaccttcgtgctatcgatattctgattgaatctcgtggagagcgttttattctacccctttcaaggtctctggcagtctccatgtttccagggttacagaaccgggatttacagcgacgcgaacaccgtgaccggattcatgaacaaagggtggagcgtctgacaatcaaagagtctaacttgttgaattataagctggaacttaacgtatcaaaatccagactttacctgtctttctgtcttcctggtcaacataaactctggttagaggagtggcgaaacgatatccatggacaaggacttacaacgactgatatttacctgctgattaacgactggtggtcatcattctggatcacttcatacagaaaggactatatctggtgttacacactggctgatttgctggacgagattgattatgttcttagcactattacaattatggagtttaacgtctgtttttcggcactaccattatcccttatatataaagctagatag

SEQ ID NO: 183449 - DNA, 606 bp, Klebsiella oxytoca
atgactatcctaaaagtacattattcaccaactgacggaatccctttgaacaccctttatttgaaggaaacttcaaccactgagcgttcaggttcagtgttgggtggcggcatatcgggagactctgttattctgggaggcggaggttatgccggttcggaaatacagaaaacgactcgctctactgtctttgcaccacctgatgaagttactgctgagcctgacaactcaaaaatgttaacccggatctcgttcgtaattgttgggatgattgtacttgtatttattactttaataacaaatggcattgttgatagctttgccgtaaatttatctcaaactaccgcctcgttactggaaaatgcccccttctttattatcgcactatctgtattttgttctttatttgtaataggattgacagaacatgattacactcctgtattagaagagcacaaacgaaatgaagagcgtttgtctgtataccacagactacgttatgttgaagctgataatgttgtttttgaccctaaatcgatgaacggatgttacgcagagagaaagttcattactatacttgttgaaagctgtatctctaagaaataa

SEQ ID NO: 183450 - DNA, 141 bp, Klebsiella oxytoca
atgaacataaaagaaatatccatatctcatgacaaggaatttaattatgtgaccctggcacaaaatcagtgcagtgctaaatcagagatcttcgtctttccggagacttcggatgaattcagccggagtcatgtcatttaa

SEQ ID NO: 183451 - DNA, 567 bp, Klebsiella oxytoca
atgaacatgaaaacgctgaaagatataattgaaaaacaaaaaaaagaagaagaagaacaaaaattcgacccagcggaacaaatagaagaatacataagccttgttgaaaaattatatactattacattagaatctattgacgaactaatcaaagatggattgataaaacaatcaagaaaaaaaatatcaataaatgaagagtctctaggtgattatgaaatcgactctctaatactcactataaactcaagtaaaataaaatttgagccagtaggaaccatgctaataggttcaaaaggaagggttgacgtcacagggccatttggaaaagaaaaattcattctgatcagaaaaggagtcaaaagccccagcgatttaataaaagtaagagttaacgtagtcggggcatataaaccagaaaaagataagaccgatgaagatgtgaaaaagccgtcaattgatgattgggaatggaaaacaatgcctagcgatagtcgatgggttaaatttgatgatgtgaattccgagaccattacgaatattattatgagaatgataaatggctag

SEQ ID NO: 183452 - DNA, 552 bp, Klebsiella oxytoca
atggctaggattcatgcaattaaaagatctggtctacacatagacattgactatgtcgtacataaaaagatagcactcgatcgtgctgtaattctgcggtattcaacaaagaacccagattaccatgccgatttcgtcggcttaagtgagccggagattgaaagagaaaaagacttaatactaaaagaaaatgacacaacacattgccttttattgttaacagctattgaagcaatatttcgattagatgcagatcagaagtactgcaataaaaaaagagacccattatcaagaaaaataaaagagatatatgataaaacaaaaggagaaaaaataaaattagatgatgatttaataaataccagaatgaatgaagatgatgctagattaaaaaaagactacaacgatctaaaaacatgttttaaattcaggcattggcttgctcatggaagatactggcatccaaagagaataaagaatttttatttcgactctatactaatagtgatagattccattttaaactcaaccaaatacaattttgaagtttag

SEQ ID NO: 183453 - DNA, 243 bp, Klebsiella oxytoca
atgagtaaagaatcagaactagagttcagaacaaaagaactcgaacgtcaaatgaaaggtgtccagcgacgtattgaggtggttaacgccaaatacgacagccaaaccaagaagcaagaacgtcgcattcgtgatttggaaatcaaaacagcagtccagtcaggcgttacgcaacgtgaggttgcaaacatttacgaactgtcgccgggtcgcgttaatcagatcattaaaaaagtcggctaa

SEQ ID NO: 183454 - DNA, 510 bp, Klebsiella oxytoca
atggacttcacgattattcctgcacagcctgaacacttccgaatactcagagccattgaactggctgcttttgaaacattacgtagcgcgggcgcggtcactggtcacgctagtgcaaacagtctggaggaactgagtgatttcttccataacggtctgctgctagccgcctgtacacctgattcagcgcccgttggttttgctgccggtcgaattgaagacacgtggttgcatattgctgaaactgatgtgcatccggactggcagcgtcatggcatcggcagacaactcatgctgaccatcctgagtgcggggcagcaacgcgggctgacaggcgccaccctgacgacggataaccaggccgtgtttaatgcccgattttatgcctcattaggttttaagatcgtcgaaggccatgaacgcccctcacatctggtaagcctgaatgcggcagagattgccagcggttttgatccggcgcgacgtgtcacaatgaaactgactttttag

SEQ ID NO: 183455 - DNA, 699 bp, Klebsiella oxytoca
atgagtgattctgcatgtacatcaatcggactgctcctgtttcctgctcttactcagcttgatcttaccggtccgtatgaagttttcgtcagggccccaaacacacaggtccatctcatctggaaaaaccttgaccttgtactttctgatcgtggcatggctatacagccaacaaccacatttaacacgtgtccacaactggatgtcatttgtgtccccggcgggccaggccagataaaactgatggaggatgaagaagtcctttcatttatccgtttccaaagtgaagaagcaaagctggtgacttcagtatgcactgggtcgcttgttcttggcgcagcaggccttctggatggatataaagcaactacgcactgggcttctctggatcaactcgttttgttaggtgcggagccggtaaatgagcgagtagtccgcgaccgtaaccgtataaccggtgcaggcgtgacttcaggtatagattttgctttcagcgttgtgtctgaaatatatgggagcaatattgctcaggatattcaactacatatggaatatgaccccgccccccccttcacctgcggatcaccacgtactgcatcagaggaacagttaaaaaaagcgcaagaaaaaatagcggcgtttattgaagagaggcgacaggcgacattaaaagcagcgtccagactgcatagagaataa

SEQ ID NO: 183456 - DNA, 351 bp, Klebsiella oxytoca
ttgaccattattaataatgtcctttgtgctagtgacaagattatgaaaaaaaatttactgatagccgccatagtggcggcaggtattacgcccgcaatggccgacgctggccagcccgtcggtcgactgtacaaaattggcacgcacaccatagaaatggatgcggactgcatgatccgctcagttgatggctcccccgctacgcttagcgtagccgtatccgggcatatggattttaatttagccaacggaggcattgctgaatcggaaccacgaccaaaccatcatacctgcaaggtgtatgcggggagtgatgtgcgaaccattcacataaaagaacaaacccaatga

SEQ ID NO: 183457 - DNA, 204 bp, Klebsiella oxytoca
atgaccaaaaatgaatggattttacgattgaggcgctgtacttcaagggagacgctggaaaaggttattgaaaaaaataaatattctctttctgattctgaacttgagtattttaactctgccgcggatcatcgcctggccgagctgacaatgggaaaattgtatgacaaaattcctacaggcgtatggaaatttgtgaaatag

SEQ ID NO: 183458 - DNA, 1533 bp, Klebsiella oxytoca; identical to SEQ ID NO: 33455

SEQ ID NO: 183459 - DNA, 1428 bp, Klebsiella oxytoca
gtgatcctcacgctggtgaccttccggggcgcccgggattcccgtctgcatgtgtcggtctggggcatgccttacaccgagcgttactgcttccgtccggcggacatcccgcgaccggaaattcacggcacgcttccggcccgaattgagagcagagaaaagaacgatatatacgctcacctggatgagcaggggcgctaccgggtgaagccggacttcgaccgggagagcacggagccgggctacggctatctttggctgcggatggcgaagccgtactctggtgatacatacggctggcacaccccgctcaccgacggtaccgaagtggcgattgcgtacagcaacggcgatatcgacctgccgtacattgcgtatgcgctgcacgactcggagcactcggaccacgtcacccgcgacaaccctacccgtaacgtgttacgcaccccggcgaacaacaagctgcggatggaggataagcgcggtgaggagcacatcaagctcgccacggaatacggcaggacccagctcaacagcgggcatctggtggacagccatgggcaacgtcgtagtcagggaacggagctgcgcaccgacgagtggggaaccctgagagccgggaaggggctgtttgtcagcgcggatgcgcaggtgaaggcgcagggtgaggccctggacatggatgccgcgctgaaggaaatcgaccggcttaaccagcaactgcagcagttggaaatcgcggcggcgcaggcgcaggcgctgaagggcgatgtcgacagccagatagagatgtttgagcagcggctgaaaccgctcaatgaagcggtgcttttctcggcgccggaaggcgtggccctgaccagtggtgaagatatgcagctggccgctgaacggaaccttgcgctaaacgccggagaagacttcagtgttggagtgatgggcaatgcgaccgctttgatcggggagaagctggggctctttgcccgcaccggtcaactgagcctgaaatccggggaagggccaatagatgtccaggcacaaaacgccagtatgcggttgttcgctgagaagaagctgacgctgagctcagcgagtgacatctcctttgccggaaagaaacgtatcaccctaattggtggtggcagttacctgaagcttgaggccgggaagatcgagtatggtacgacagcatcgtatttgcgcaaagtaaagcggactatgtttgctggtgcaaccgatctaccaattgagtcaatgaagcagatgacaatgatcattcagtattacgacagaaagttaaatttctcttcaaatgtcaattatcgtgttgaaacatcggatggagaggaactactttctggcttcggcacagatggatacatagacaaaagagacagtgaacatgaatattggatatttgtaagctga

SEQ ID NO: 183460 - DNA, 795 bp, Klebsiella oxytoca
atgaaaaaaataaatattgaaatagatggaaccccctatctgatagttacaaaggatggaaagactgagctgggcataaaaggaaaaacaactccagaaaatgacagcacacctcatgacattaaagtaccaaacgttttaattatcaccagaaaaaacggtgaggttctatttgttttacgaggtgccgaagaggatgggttttcaatattaacggctcaaaccctttatgatcattttcaatatcaatggtttgagccgttagcagataactatagggaattactttttattaatgacgcagactatgctaaagaagcatataaaatatttacatgggatgatatagctaagttttccttgattgacagaccatcatatagtttttataaaaatatggaaggagattggaagcagaaccctgaaggtggagcaggatatcttttggtattaatctccgacatcccctattggacggacgccgtgggccagataccatttgccgttgacacctaccgtagcactcagagcataactaaaacagtacaaatcggaattgaatggggtgcaggtacaataacagggagtgaggactattccaatgagtatgataattatttcgtattaagaggggctttatttgctagcaagaattttacatataaagtaacatctacgggaaaatcttatccagcagttgaagttaaagaaataagtaactcagtaaaagcagaaatgcttggtgccccaataaaaaatagtgagttggaaaaatatggaatttggaaaaaataa

SEQ ID NO: 183461 - DNA, 492 bp, Klebsiella oxytoca
atggctgatacgttccagaatgaggtgcccaaggcacgcattaatttaaagctggctctgcacacaggaggcgcgcagaagaaagtcgagctgccgctgaaactcctcaccatcggtgatttcagtaatggcaaagaagaccggccattatcggaaagagcaaaaatcaacgtcaataaaaataacttcaacagcgtactttcggaattcagcccggaaatcagcctcacggtacagaacacgctggccggcgatagcgccgaagaaaatattcagctccgcttcgccgatatgaaagatttcgaaccggagcaggtggcccgccagatcccccagctccgcgccatgctggcgatgcggaatttattacgcgacctcaaatccaacctgcttgataacgccactttcagaaaagagcttgagaaaatcctgaaagacccggcgctgacgcaggaattacgcgacgaaatgagcgcgctggccccgaaataa

SEQ ID NO: 183462 - DNA, 1773 bp, Klebsiella oxytoca
atgctgccggacagccagaagggtttcgccccggtcattcatgggattgcccgcggcacggctcaggtatcggtcaaacagaacggctatgaaatttaccagagtacggtgccgcccggcccgtttaccatcaacgatctctacgccgcaggcaacggcggcgacctgcaggtgaccatcaaagaggccgacggcagcagccaggtcttctccgtcccctactcgtccgttccggtgctccagcgcgagggccatacccgctatgccgctaccgccggcgagtaccgcagcggcagcaatcagcaggaaaaaccgaaatttttccagggcaccttgctccacggcctcccggcgggctggacgctgtacggcggcacccagctggcggaccgctaccgcgcctttaacctcggcgtggggaaaaacatgggggagctgggcgcgctgtcgctggatatcacccaggccaacgccaccctgcccgatgacagcgagcatcaggggcagtcggtgcgtttcctctataacaagtcgctgacggataccggcaccaatattcagctggtgggctaccgctactcgacccgcggctacttcagcttcgccgataccacctacaacaggatgagcggctacaacgtcgcgacccaggacggggtgattgaagtgaagccgacgttcaccgactactacaacctcgcttacaacaagcgcggcaaagtgcagcttagcgtcacccagcagctggggcgcaccgccacgctctatctgagcggcagccaccagacctactggggcaccggcaaggccgatcagcagctccaggcaggactcaacgccgccatcgacgatgtcaactggacgctcagctacagcctgaccaaaaacgcctggcagcaggggcgcgaccagatgctggcggtcaacgtcaatattccgttcagccactggctgcgttccgacagcaaatcagtctggcggcacgccagcgccagtagcagcatgtcaaacgatctgaacggcagaaccaccagcctcgccgggctgtacggcacgctgctggaggacaacaacctgagctacagcatgcagaccggctacgccggcggcggtgagggcaacagcggcggcaccggctacgcggcgctgaactaccgcggcggctacggcaacgccaacgtcggctacagccgcagcgacggtatcaaacagctgtactacggcctgagcggcggcgtgctggcccacgccgacggcgtcacgctgagccagccgatgaacgacacggtggtgctgatcaaagcccccggcgcagacaacgtcaaagtggaaaaccagaccggggttcagaccgactggcgcggctacgccgtgctgccctacgccaccgaataccgggaaaaccgggtggcgctggacaccaacagcctggccgataacgtcgacctggacgatgcggttgtcagcgtcgtcccgacccatggcgcgattgcccgtgcggagtttaaagcccacgtcgggctcaagctgctgatgtcgctcatctataacggaaagccggttcccttcggcgcgctggtgacttctgacggcagccaggccagcagcatcgtcgccgataacggccaggtctacctgagcgggatgcccctggcgggcaaagtgcgggcgaaatggggcgaaggtccgaacgccagctgcgaggctgactacagcctgccgcccgaaagtaagaaccaggcattgagccagctgtcggcagtctgccgttaa

SEQ ID NO: 183463 - DNA, 300 bp, Klebsiella oxytoca
atgatgaaaaccgaacccgcggaggaaaacattgctgagatcacagataagcgcctgaccatcggaatggatgaacctccagttctccgtgtactggatgcgttgtgttataacgagaagcgtcgagctatgaactatcccaattcagaaatggttaacatcggctggttccagcgtaagatggctccttttattaacgttcacagcgatcacttcaacaacagaattaaacttcaagaagcccgatatctgtcgggcttttttctacccgggagcaaattactctgccccccattctga

SEQ ID NO: 183464 - DNA, 351 bp, Klebsiella oxytoca
atgttgttacttcacgaggtccgtcaccagcggctgcgcaacaggatcattcttgccgttgcgctgctggtcgctatcgcctccatttcgcccgaacagctcggcatcacgctatacaagctgtctctggtttccatagctgccattctcggctaccaccctgatcgagcactgtttccttacgccagcccggggagctatctgatagaagattggaaagagaacctcggcaagccggtgccagtgagccgcaatgagcctgaataccccgttgcaacgggctatgagctgattttgccgccgttctgctgcgatgtgcaccgattgtcgcggcgatctgcttcggcgtga

SEQ ID NO: 183465 - DNA, 876 bp, Klebsiella oxytoca
atgtatatccaaagcgtattcgacatgcctatattaatgaatttattattatttattctttcgttagccttggggttattagtgtttgtaagcattaatcttttcttatctaagaaaaatactattgtgtttcgtctcaatcaggcattgaaaactgataagttaaatatagtttatcaacctattctatccatcaaagacaagaaagtgataggtgtggaggcattattaagatggtatgataatgaatacgggcgagtatctcctgatatttttatttctattgctgaaaagcatgggcttataagttacgtcacaaggtttgtgatttataaatcaataaaagaaatgcacgaattgataaatactcataaaattgagttgagtattaatattaatacaagcgatctattttcaccatcattccatgaggtgctgacaaaagcaaccaatttatataaagttagccctaagttcgttactcttgaactaacagagaggcgttctgatagtatatccttaataaatgagagtttggctaaattaagagtgctgggctacaaaatagcccttgatgattttggtactggatattctaatttaaactggttatccaaactagaagttgataaaatcaaaatcgacaaattcataacaaacttaatctgtacaaactcaattaatgctaatgttctgaacaaaattgtttcaatacttagccaaacgcataatgaaatcatatttgaaggtattgaaacagaggggcaactctcatacctagtggctaactttcctgatgcgtatgttcaggggtatttttatgccaagcctatgaacattgaggagttaaaaaaatacttagataagaaagcttaa

SEQ ID NO: 183466 - DNA, 1236 bp, Klebsiella oxytoca
atgagtaaagtaagcagtaatatcgcatggttaatgcttgtacaatgttcaggttatatattcccattaataatgctaccatatttggtccgtacactaggagttaataactttggcatttactctattgtactcgccattattcaatatggagttatgttaactgaatttggttttaacttcacaagtacccgagaaatatcattaaatcgaaatgaaaaaaaagaagtgagcaaagttttttttagtactatttacgcaaaattgcttctattttttatttttttttgtggggttatagtctatttggagtgtctgaataaaattcatgagtatttctcattgttagttgcgggaggattaacagtatttgcaaatgcattatatcctatttggttttttcagggcattgaaaaggtcaaaataatatcgattgttacagcaatttcaagagcaataacattacttctaactcttttgtttgtgaaaacagagagcgatcttcatatggctattttagtgaattcctttctttacataatcccatctttatttggctgtgcattgatatttttatcaggaagtgtgatttatgtacatgttagtttaaaggatatttatacatgcctaaaaaaatcatttccattattcatatcaaacgtgtcaatatcgctttactcaacattaaatacaatagttttagggaaatattcgagtccaacaattgtaggtaatttcgctgcagctgataaattgaggcttgcagtacaaggattatatgcgccaattcaacaggctgtatttcctcgtgcaagtcaagtggttatgcaggacggaggcattaagaaagtaattaaagttttcggcattccatttatcatgtttggtctcataattagtttgtcctatttaatttttggtaattttgctgttcgtatttattatggagaggagtttgcattggcagggactttgttctcaatgatgtttcctttaccactaataattagtatagctaccgtatttacgcattgggtacttatagcacaagggcagaataaaattgtgggtaagatatatacacttttttctcttgtgcatttatgttatgtaataccttttgtaaaagagttcgatgcatatgggatggtgtattcagtagttttaactcaatctctaataacattagcaatgattgcctgtgttataaaaagcatcaaaaggagtcatgaatga

SEQ ID NO: 183467 - DNA, 180 bp, Klebsiella oxytoca
gtggccgaatcgttcttcagttcactgaaaaaagaacggatcagaaaacgcatctataaaacccgggatctggcccgggccgatatcttcgattacattgaagtgttctacaaccgggcccggcgtcacagtcaccttggcggcgtcagtccggaggcctttgaacaggcctcgtcgtga

SEQ ID NO: 183468 - DNA, 825 bp, Klebsiella oxytoca
atgtgtgatgcgaccggtctgtcgcaacgtcgtgcctgcaggcttacaggtttgtccctgtcgacctgccgctatgaggctcagcgtccggcggatgatgcgcatttatcagggcgcatcactgagctggcactggagcgcaggcgttttggctaccgccgcatctggcagttactgcgccgtgaaggccttcatgttaatcacaagcgcgtgtaccgcctttatcatctgagcgggctgggcgtaaaacgcaggcgacgtcgtaaagtgctggcaacagaacgtctgccgctgctccgtccggcggcgcccaacctgacctggtcgatggattttgtcatggacgcactggccaccggtcgcaggatcaagtgcctgacctgtgtggacgacttcacgaaggagtgtctgacaattaccatcgcattcgggatttcaggcgttcaggtcacgcgtattctggacagcattgcactgttccgaggctatccggcgacaataagaaccgatcagggcccggaatttacctgccgcgcgctcgatcaatgggcctttgagcatggtgttgagttgcgcttaatccagccgggcaagccaacgcagaacggatttattgagagctttaacggacgatttcgcgatgaatgtctgaatgagcactggttcagcgatatcgttcatgcaaggaaaatcattaataactggcggcaggattataacgagtgtcgtccacattcagcactgaattatcagacgccatcagagtttgcagcacggtggcggaatggaaaatgtgaaggtaaacaaaccgacattatggactga

SEQ ID NO: 183469 - DNA, 963 bp, Klebsiella oxytoca
atgcaaaacgaccgccaatcttctgaaatcgtgattctgggtgtcgatacccatcttgatgttcatgtcggcgctgttatcagtcaggcaggtaagctgcttggaactcacattattcaaacaaatcaagcgggctatctggaactacttgattggacacgttctttcgggatcctcgaacgagcaggcatcgaaggaacaggaacatatggtgctgcattaacacgctatctcatcaaaaatggtatttatgttgttgaagttaaccggccagatcgctcaaaacgccgccttgaagggaagtcagatccactggatgcagaaaatgcagcccgggcagtgctttcagggagcagcaaggccataccaaaaatgcagtcaggtgcgtgtgaagctctccggattattagtgttgcccgacgtagtgcagtaaaagcccgtacgcaggcgattaatcagcttcgtgcactgctggttagtgccccgcaggatgttcgcgacaaactctggaaatcgaaaccacacgaatgcgtaaccgcctgcattaacagcgaagtgtcagagcactcgccattacgtatagccttgtgcagtacgcttcgaagccttgcgaaacgatggatggccctgacagaagagctgaatgaactggacgaatcactggataaactgacacgcaagtatgccagtaaccttcgtagccagtttggcgttgggccacagacggctgcaacactgctggcagttgcaggtgataaccccgaacgtttaaaaaatgaagcggccctggcatctctctgtggcgtaaatccactgcccgcatcatcaggaaaaacggtaaggcacagattaaaccgtggtggctcacgtgaagcaaacaatgccctgtggacaatagcccttgtgcgtatgcgtagcgatccgcgcacgagaatctatgtcgacagacgaactggtgactaa

SEQ ID NO: 183470 - DNA, 402 bp, Klebsiella oxytoca
atggccagagtgtctattagtgaggctgcccgactgacgggtaagagtagaacaacactgcacaggttaattaaagcaggtgacctgtccacctgtagcggtgaacgtaatgcaaaaatggtagatacttcagagcttttacgtgtctttggtccctttgagcaaccgaagggtgaacaccattctggacaggtctctggacagcgtgatacagcctctgctgaccagagtgaacaggtgattcgtcatctgaaacaggagattgaacacctgaacaccttacttttgtccaaggattcgcacattgacagcctgaaacaggccatgctccttcttgaaaatcaccaggcaaaattaactgaatcaccggcgccatggtggaaattctggaaaaaatcctga

SEQ ID NO: 183471 - DNA, 192 bp, Klebsiella oxytoca
atgtctaaacaacagaaaacagcgctgaacatggctaaattcatccagaatcagtctctgctcctgctggagaaacttaacgagcttgatctcgatgtcgaagccgacctttgtgagaaactccacgatgatgcggagcatcttttccgtacactgtcctcgagactggatgcattacaggatggtaactga

SEQ ID NO: 183472 - DNA, 1032 bp, Klebsiella oxytoca
atgccgatcatagcaccaattccccgtgacgaacgacgcctgatgcagaaagctatccataaaacgcgtgataaaaattatgcccgcagactgaccgccatgctgatgttgcaccggggcgagcgcgtcagtcatgtggccagaacactctgctgtacccgctcatcgattggtcgctggattaactggttcactctgtctggtgctgaaggcctgaagtcattaccgtcaggacgtggcaggcgctggccgttcgaacatatttgcgcattgctgcgtgagcttgtgaagcattctcccggcgatttcggttatcagcgttcccgctggagtaccgaactgctggcgataaaaatccgtgatgtcaccggttgtccgctacatgcctcaaccatccggagatggttacctgctgccgggctggtatggcgcagagcagcgccgacactgcgtatccgtgacccacacaaagaagaaaaaatggtcgctatccatgaagcactggcgaaatgcagtgcggaaaatcccgtgttttacgaagatgaagtggatattcatctcaacccgaaaatcggtgctgactggcagttacgcgggcagcaaaaacgtgttgtcacaccgggccagaatgaaaagtactatcttgccggtgcgctgcacagcggtacgggaaaagtcagctacgtaggtggaaacagtaaaggttcatctttatttatcagactgttaaaacatcttaaggcgacataccggcgggcaaaaacgattacgctcattgtcgataactacattatccacaaaagccgtgaaacgttgcgctggctgaaagcaaaccagaagttcagggtcatttatcagccggtttactcgccatgggtcaatcatgtcgaacggttgtggcagacgcttcatgagacaataacccgaaatcaccagtgccgttcaatgtggcaactgttgaaaaaggttcatcactttatggataccgtcagcccattccccggtggaaaacacgggctggctaaagtgtag

SEQ ID NO: 183473 - DNA, 732 bp, Klebsiella oxytoca
atgccagtatcactgccccttgcattggcctatcacggggtatttctcggctggcttggctattccctcagacgtttgcggtcatttaattcggatattcagcatctttattccgatattgcccgccagcaaatgctctggctccgcttcctgctgtcaggttatttgggactttggatagtcagtattatttgctgcctgtttttctatctgttcaggctaaccgataaaacgagttgggtactgcccgttgtcagcatagcggggtttgcatttattaatacgttattagtttgtgcgctgcggcaacccgctgcgtttatggggctaacgcaggcagatgaaatcctgctggagaatattcagccggttaaagcaccgcagttacggggggctgaacaggtggataaggtggcagaatttatgcaccggaatcagccgtttctggattccaccctgtccttaagccagcttgcgcatcagttaaaactctcgccgcacgatctgtcagccattatcaacaacgggtttcagcagaatttttttacgtttatcagcgagtaccgaatagagcacgctaaaaaactcctggcaatgccggaagataagcggaccattcttgatattatgtattcctcaggctttaactctaaatcggtctttaataccgcgtttaagaagcaaacgggtttaacgccttcagaatatcggcggcggcactgttgcaaatag

SEQ ID NO: 183474 - DNA, 252 bp, Klebsiella oxytoca
atgctcgcttttcacaagctcaccatccacaacaccagaagcaatgatgcctacgccactctgatacagatagaccttatcacctttagaaagctggcagatgtactccttccaaccttcgcaaaaagccgcagcctcttggtttttaaccatatcgaaatgcgtttctacatcgttgttgtagttcgtattcaacatgaaggctttcctatcaaggaagctggctgcgctgtcttcacgctgatcaactag

SEQ ID NO: 183475 - DNA, 147 bp, Klebsiella oxytoca
atggtgaagggcgatgtcggcgcggtgaaagcggcggtggattccggcgtcgaatccgcgcagcgcatcggtgaagtggtgacctcgctggttatcgctcgtccgcataacgacatcaacaaaatcgtcattaaacacaaggcctga

SEQ ID NO: 183476 - DNA, 228 bp, Klebsiella oxytoca
atgcgggggattgatagcagagcatggtccgcaaatctgacagcgttgaattattggcagtgtgggcagaaaatgccaaacactctgattttaaattacatcgtcgggttgcctaaagaactactttcgccggatctgacccgatgggaaaagaagggcaaaaatgacgaagccttgttacattttgcatgtggtctcgtcgtctggaataaagtcatattgagatag

SEQ ID NO: 183477 - DNA, 1038 bp, Klebsiella oxytoca
atgataaagtatacatgtgttccatcgctgaataaaacggcagcgaaatgcctgatgctgctcggactgctaatggcaggtggtcagagtgcttatgccgcctgttacgtcaataatggctacaaggcgcaagtgatcaacatgaatcttgggcgtgtgctggttacaccaagcagccaggttggggatactttggtcaccgctcagttcacgattaacccggtctctaggtatggcagttgtactaatggcggcaacgcgattggggagatcctccagggcagcccgacgagcttcagcaatgtgtggagtaccaatattccaggtatcgggattcgtttataccgagaagcggggagtataagtacctattatccccataccttgcggttgaacggcaacattgctgtcaacctgaacggtggttatttcaagatcgacattgttaaaaccgccgcacaaaccggttctgggcaactggtccctggaaagtacacgacttattatatggatggctctggacggaacttaccgatgctggaatcgatcgtcgacgccaacagtctgacaatcgttacatcgacttgtaacgtggacagcggttccaagaacaaggtggttaatctggataccgtcaccgcagcctcatttggtggtgtaggttcaacgcagggcgaaaaggcatttgatatcaatattaattgcgttggtggcattggcgaggatctgttgccgggcaatgcggggcaagggatcgtcaatgtacgttttgactatacgcaggatgcttccaatgctcctggcgtgatcaaatccgaacctggtgccaacaccgcatccggcgttgccatccagctgttgactggcaatacgacccagccgatcaagaatggtgatgcggtcaatgccggacgtaccattcctaaccagtccaatacgctaacgttgccgctgaaggcgcgttactatcgcactggctcgacaattaaaggcggcaatataaaatcgaccgccacctttaccatcgagtacaactaa

SEQ ID NO: 183478 - DNA, 2562 bp, Klebsiella oxytoca
atgaaagagttacctatctctgcagcgattaaaatggcgtggcccaattataaatcgattctactgttaagcggcagcgcgctctgtatggcggcccctgcagcgtcttgggcgaatggaggggctgatagcaaaaagcctacggcaccggttgaagcgacctttaacagtagcttcctggttggggaagcgcaaggtgtggatctttcacgcttccgtgatggtaacccgatcttagcgggaaaatattcgctcgacgtgtatgtgaacggcgagtggaaaggcaaaaaaaacatcgactttaaaaacgtgccgggaaaaaacagcgctgatacctgctttaccctactgtcgttggatgagtttggtgtagacaccgcgacaatgagcggggaccctgcggttaataccgagacgtgcaaaactctggctcagtgggtgcctgaagcctattaccgtttggacaccagtacactgcgcatggatatcagtatcccccaagcggcgctgcggcgcagcgctcgcggctatgtagatccgcgcttctgggatcgtggcattaccgccggcagcttgttgtataacttcaatgcgttcaatactcacagctccgccaacggcagcaattctgattcaactaatgcatacttaactttgaacgccgggctgaacgtggctggttggcaactgcgtcatgactccaacgtgaactggcgttctaacgacagcactcattggcaaaataccgcgacttacgcgcagcgggcaatgccgtctatccgcggcatgctgacattgggtgacagttacaccagcggtgatttcttcaactccataggttttcgcggtgttcagatcgccacggatgatcgcatgctgcctgattccttgaacgggtatgcgccggttgtgcgtggggtcgcgcaaagcaatgctctggtggaaatacgccagaataaccagctaatctatcaaactaccgttgctccgggcgagtttatcatcaacgatctctatcctacgggttacggcggcgatctgaatgttaccataaatgaggccgatggcagcaaacgccagttcagtgttccctatgcttcggtagcgcagatgcttcgtccaggcattcagcgttatgcaataaccgcgggtcgagtacgcgatgataatttaagcaaggaacccgatatgttccaggcgacttatcagcgcggttttaccaacattattacgggatacacaggtgggatcgtcagtgatggctatggcgcagtgctggtgggcagcgcggttgcgacaccgatcggcgcatttgcgttcgacgtaacgcagtctaatacccgactgaagcaaggtgatcagacaggacagagttataagctcagctatagcaaactgatggccgaaactaataccaacttcactatcgccgcttatcgctattcaacttccggctacctatctttgcaggatgccgtctactcccgagacaatgaacgcaagggattgagcgtagatgcggttaaccgccagcgtagcgaataccagctgacgctgaaccaagggctgggggacaattacggttccttgtacatcaccggttcggtgcgtgattactggaaccgtggtgggagcaccaagcaataccaggtgggctataacaactattacagtcgtgtgacctatggcctttccgctatgcgtaccacggatatgtataaccgagatgagactcgttattacctgacattgtcggttccattcagcgtcggttcgcagaccctgagcctgaatagttcactaggctataccgacaacggctacgacagcagtcgtgtgggcctgaatggttcaaccggcgaagacaacaacatcagctatagtgccacgttggccaacgatcgttccggcgggactaacagtagtgtgagcggtgaataccgtagtcgttttgccacgatgaacgggtcctacagctatggtaaagattaccgtcaatcttcgatcggcgtatcgggtagcgtcgttgcccatagcggtggtgtcacactgacaccgcaacgcgggcagaccatggtgttggtggaagccccggacgccgccggcgcgattgtgaccaactcgtcaggcattcgtatcgatgataacggttatgcagtggttccttatgttgcgccatatcgcatgacgagcgtaacgctcgatccgagcggcatgtcgcgcgacgttgaattggaaagcagcagccaacaggttgcaccctatgccggtgcgattgcccggttggaattcaagacaacgaaaggccaggcgttgatcattcatgcactcggccctgatggcaacgcgttgccgtttggcgccgaagtgctggatacccgtaatcaggtggtcggcattgttgggcagggcagccgtatctacttgcgtaccgaagctcagaaaggtttgttgcaaattaagtggggcacacagccaacgcagcagtgctctgtcagctacagcgctaaggcgcaaattaataatactgactacgaaattattgaagcgagttgcaaatga

SEQ ID NO: 183479 - DNA, 687 bp, Klebsiella oxytoca
atgttgttcagcagcagcgttttttccagtgtcattattaacggtactcgtattatttatccggggaagcaacgggaagttaccgtccaattatcaaataatggtgcttcaccggcacttattcagtcttggattgatgaaggcgacgcaaaaaccacaccagaaaacagcaaagcgccatttatcatttcaccgccaatcagccgtgttgaaccgactaccggccaagcgctgcgtgtttcattgaccacggcgagtttgccgcaagacaaagaatccttgttctggttgaacgtactggagatcccgccagcaccaaccggggctaacaatagtgcacctgaaaactatttacaggtggcattccgttcccgcgtaaaactgttatatcggcctactggtctgccgggggaagcgaatgatgcacccgaaaaactgcagtggcgtttcagcactgcgggcgtcagcgtgaaaaacccaacgccgtactatgtgtcatttaccgagattaatgcagtcgtaaatcaaaaacgtgtgccattggccccgaacggtgacatgctggcacctgggcaggaaaaaacattgtccttctccggtgacatcacgcgtattgctgatattgcttacaccaccattaatgattttggcggacgcgtgtcccgtactaagaataagcaaaagtaa

SEQ ID NO: 183480 - DNA, 558 bp, Klebsiella oxytoca
atgaaaatctctaaactgtctgctgtattggcattggctgtaagcactgctgcaatttcttctttctcagctcaagctactgacgggactattactttcaatggtagagtgactgaccaaacttgtactatatccaccccaggcggtaaagatttcaccgtaactctgccaactgtttctgcctctactctggcagctcagagcgcaactgctggccgtactccgttcgcgatcaatctgagcgactgctctaaaggcaatgtggctacttatttcgagccgggcgctactgttgatttcaatactggccgtctgaataaccaagcgcagactgacgctgcaactaacgtacagattcagttgctgggcagcaacaaccaattcctgccaatccttgctgctggtactaatggcgcgcaggagaactcccagtgggttaccgttgctaacgaaggtgactctgctgacctgaactactacgctgaatattacgctaccagcgctgccggcgccggtgatgtaacttctaccgtccagtacaccattatttatcagtaa

SEQ ID NO: 183481 - DNA, 390 bp, Klebsiella oxytoca
atgccgttgatgcagtcactgtacgactggatacagcagcagatgggcatgctgtcgcgtcactcagatacggcgaaagcgttcacatacctgctgaaacaatgggatgccctgaacgaatactgtcgcaatggctgggtggagatagacaataatctgtgtgaaaacgccctccgggtggttgcgctggggcggcgtaactatatgttattcggttctgatggtggtggcgacagtgcagcagtgatgtacagcctgatcggtagctgtaaacttaacggcattgagccggaggcctggctgcggcacgtggtcagcgtcatcaatacatggcctgccaaccgcgtgaaagaactgttgccctggaacgtaactctctctgtaaactaa

SEQ ID NO: 183482 - DNA, 654 bp, Klebsiella oxytoca
atgtcgtttattaacaccccgtttattgctgttaaatttactgttctggtttcagtttttacgttcattttgtggtgttttatgcctgtccagacgttgattcatcttgttcaggaaggagagttcattgagagtctgacattgtatttttatgctattgctctgatagttataactctatccccttcattcgcaggtagaaaatggacccggtggtcagtcatttgtgtattatttacaatgatggctcgtgaatctgatttgcataaatcgattaatggaatgagtatgcttaaactccgtttctggaccggtgaactgccctggcaggataaaattatggcactggtgattttgctgccgattgttctggcctgtttacatattttatcctgccacgggcgtagggtctggtcggcggcaaaagcacatgaagggtacgcaatcactgttgtgacttttattttacttatcatcgtgactaatattattgatcgctcccttggtattctgaaagaagtcttaggctggcatggccctgcatggctgattgcactgcagacttctcaggaagagtttcttgagctttctttgcctcttctggtactgatggctgtttttcagtatcgccgtggttccttgcattttcattaa

SEQ ID NO: 183483 - DNA, 588 bp, Klebsiella oxytoca
atgctggggttctcccgtcgcttccatgtcttcgcggcaccaaaacaggatgctgaacacacctatgagtcgctggtccgcgccttccggtacttcggtggcagtgtgaaaaccgtgctggttgataaccagaaagctgcagtaatgaagaataacaacggaaaggtggtgttcaactccgggttcctgttgctggccgaccactatggcttcctgccacgggcctgccgtccgcgcagagccagaaccaaaggcaaagtggagcggatggtgaaatatcttaaggagaacttcttcgtccggtacagcagattcgacagcttcacccatgtaaaccagcaactggagcagtggatggctgatgttgctgataaacgggagcttcgccagttcagacaaacaccagagcagcgcttcgcgctggaacaggagcatctgcagccgttgccggatacggacttcgataccagctacttcgacatccgccatgtgtcctgggacagctatatcaaggttggcggcaatcgttacagtgttcccgagactctgtgcgggcagccggtctcgatacggatcatcactggatga

SEQ ID NO: 183484 - DNA, 318 bp, Klebsiella oxytoca
atgaaaattctgattaactggcctcctttgcgccaactaataaattacatacaagagcgtttcacctttctggttttgctctgctggccagcgattatctggttggtttgtcgggtaattgtatggctgacggatggcatcatgacgctactgggaaagccgttagagcactcattcaccgtgtatcttcagctctgtatgacgctaagtaccctgctgaaaatctcggtcacctgggtgctgctgctgtttattctgttcagcatggtaatggggtttacctggctgctgcggcgtgttatgaaccgtaataagtaa

SEQ ID NO: 183485 - DNA, 126 bp, Klebsiella oxytoca
atggcgggcaacaagtggcagatcagcgatgaactctgggagaaaatggcccgactcaccttggaacacaaaattcagcccccactgtgtacgcatcgcaagcgcgttgataatcgtgcggcatga

SEQ ID NO: 183486 - DNA, 294 bp, Klebsiella oxytoca
atgacggatgcgtacgggctgccactcgctgtggttgtcgacgacataaagctggtcgcagatactcccgacggcaacagccgacgcatgtgtaacggcccaatctgtgtgccctatggcctttaccaggatgccagccacagtacggtctggaatgacactaccgaagtacagtcccaaatctccacaacgggcagcgctcagtctctggtagtgtatggcgctattcccgtccagaactggcccaagccaggggattatcaggatacagtggtagtgacactcagttactag

SEQ ID NO: 183487 - DNA, 318 bp, Klebsiella oxytoca
atggcaaaggcgttcgcgtacctgctgaaacagtgggatgggctgaacgaatactgccgcaacggtcaggtggaaatcgacaataacatcggtgaaaacgcgctacgctcagtggccgtggggcgaaaaaattatctgttcttcggctctgacaacggtggagaggctgcggcgatcatctacagtctgctcggcacctgcaggctgaacggtgtggagccggagaactggttgcgtgaggtgatcggcaaaatcaacaactggccctcaaaccgggtacacgacctgctgccctggaacctctctcctgtaaaataa

SEQ ID NO: 183488 - DNA, 381 bp, Klebsiella oxytoca
atgctgatgcctgaaaatgtcttcctcgccgtgaagcccgtggatatgcgacgtggcatcgacacgctgacgcagtatgtccaggatgagctcaaatcgtcgtggcacgaaggcgccgccttcgtcttcaccaataaagcccgttcgcgcatcaaggtgctgcgctgggataaacacggcgtctggttgtgcgttcgccgtctgcataaaggccactttcgctggccccgggcaaatgaggccgcctggaccctcacgcccgatgagttcagctggcttgtcagcggtgttgactggcaacaggtaaaaggccacgacctcacaaaatgggtcttccgggatacatccggaaccgcatcaaaaaccaccataaccttatga

SEQ ID NO: 183489 - DNA, 1614 bp, Klebsiella oxytoca
atgattatccatgccgggtgcgatataattacccgcatggatatctcccttctctccaccacaaacgatattgaacagcttcgtactctggcgcttgccatggtgcaaaacgccgtgtctgagaatgctgaaaaagaagaaaaacttcgccagcagaataccactctacagcaacgtatccttctgctggaagaggcgctgaagctggcacgccagcagcgcttcgggaaaaagagcgaaacactggccggcatgcagcgctccctgttcgaagaggatatggatgcggatatcgcggctgttgaagcgcaactggacacgctgcttcctgccgaagaaaaagccgctccggaacgtccggcgcgaaaaccgctaccggcccatcttccgcgggtcataaaaacaatcgaaccggcctcaaccgaaagctgtcctgactgccagggtgcgctgcgccacatccgcgatgaagtgagcgaaaagctggaatatatcccggcccgcgtcgtggttaaccggtacgttcgcccgcagtatggctgcacctgctgccagcgggtggtcagcggtgatatgcctgcgcacattgtcccgaaaggtgtggcagagccgtcactcatcgcccagctggtgatcagcaaacactgcgaccatatgcccctgtaccgccagcagccggttctggcccgttcagatatccatctgcccgtcagcacgatggcagatatggtcggccgtgcgggggcggtgctgacgccactggcggaatcactgcaccggatactgctgacttgtgatgtgcttcatgccgatgaaacgcctttgcaaatcctggacacgaaaaaaggcggtaaagcccgttccggctatctgtggacttacgtcagcggtgaaaaaagtggtccgtctgtcgtctgcttcgacagtcaaccagggcggagcagcaagtacgcggcggaatacctgaaaggctgggccggaaacctggtagttgacgggtatccggcgtatgaaaccctggtcgggcagaacaaagggctcatgctgacaggttgccgggcacatgcccgcagaaacttcgccgacctttataaagctaacaaggatccgcgggcggcgatggcggtccggcagatagccgggctataccggctggaaaagaagatccgacaccggccagtggaaaagatccgccagtggcggcagcgttatgcgcgacccgtgctggaaaaactgtggcagtggcttgagcagcagaaggatgcgtgcccggagagctccgcgctgggtaaagcaatcacgtatgcactcaaacgacgggtgacgctcagccgcttcctggaggatggcgcgttgccgctggacaacaatcgttgtgagagggcgatacgaccggtggtcatgggacgttcaaactggctcttcgcaggttcggctgcggcgggtgagcgtgcagcgaaaataatgagtctgctggaaactgcgaagatgaacggtcttgatccccatgcctggctgacggatgtgctgcaacggctaccgggctggccggaagaggagctggacgcgttgctgccgctgccggggttcgccttcgggggcgaaggagcctga

SEQ ID NO: 183490 - DNA, 945 bp, Klebsiella oxytoca
atgaagcaggggattgcttgcggcgcactggcaggtgcatgctggggattcattttcctgccaccgatgttgttacccgagatctcaccgctgctgctaacctgcggacgttttgcaacctacggcgtactggcggcaattttacttattccgcaatggcgcagcattgcccgcgtctggcatcatcgcgatctgctgacgctgatccgtctttcactactgagcaatgtgctttattttctgctggtcgcggcggccgtacagcaggttggcatcgctgcgacctcgttagtgattggcttgataccggtgatggttccgttgcttagccgcagagaccagcatgcgccgccattccggcaattaatgctgccaatggcggcgatcgtcgccggagtggtgctgattaatctgcatgcgcaactgtcgtccgcacacccaataacgggtgggaaacagccgatgctggggatgctttgcgccttcgccgcattgctgtgctggagccgttacgcagtcgagaactcccgtagtctgaaaacgctcccttacaacaacaaccagtggtcgctgctgattggcttgtgtaccggaagcctctcgctattgctgtggctcatcgtcagtatttgtgggttttccagtgttgatttatcgttaccggaggatgtccaaacgatcttttgggcgatgaacgtggtgctggccgtgttttcttcgtggctggggtatatggcgtggaatctctgttcccggcgccttccggtatcgttgacgggccaaatggtggttttcgaaacccttttcgcgctgttatacggttttatttatctcaggcgtgtcccggatctgctggaaagtgccgctatcctgctgttactgggcggggttctggccgcggtgcattgccatcatcactgccgttgcgttcaggcgacggtatag

SEQ ID NO: 183491 - DNA, 204 bp, Klebsiella oxytoca
atggatgaactgaccgttcacctttatgtgattcgctttcaggttgaaaggcctgtatctgaacatttgacacgtttgattctgctttttcatattcggcttaagtgcttgtttttaggtaaaacaatcgcaaacacaattcaaataatgaaaaataaccccgaaaacgagtcaattaaggttgttttcaggtttgtggcgtag

SEQ ID NO: 183492 - DNA, 1179 bp, Klebsiella oxytoca
atgcctcttactgaccttgagatccgccgcgcgaagcctgcggaaaaaacgtataccaaagccgatggcaacggtctgtctctacaaattgagcccaacggttcaaagggatggcgattccgttaccgcttcgaaggtaaagctaaaatgctttctttagggacatacccgaaggtttccttatccgaagcgcgtagacggcgagatgaggctcatgatctgctggctacgggtatcaatcccagtgattcgcgtaaagagaagaaactggctcagcaggacaggctggggaatacctttgaggcgattgcccgtgagtggtatcagcggcgttacgatctttgggccgagtcgtaccgcactgaaatgatcgctacttttgagaaggatgtctttcctcatatcggtcatcgtccaatagattcgattacgcctatggagctgatggcagttttgacccgccttgagaaacgaggtgcaacggagaaaatgcgcaaagtacgtcagcgctgtggtgaggtatggaaatatgcaatcgcaacagggcgtgctctatctaaccctgcgccagatcttgccagcgtgatgatgccccataagaaagaacattatgcgcacctggaagtttcggagttatcagacttctttaccgtgttgcaggcgtacacgggaaatatactcgttaagctggctatgaggcttctgatactgacggggactcgtcccggtgagctacgtaaagcggaatggtcagagttcgactttgaaaataacctctggagcattcctgaagagcgaatgaaaatgcgacgaccacacctcgttccgctatcccgacaggcgctggctattctggaagaactgaaaacgatgacgagtggttatcaatacgtttttcccggtaggcttgagaaggttaagccaatcagcgatatgtctcttaacgtgctaattcgtcgtgtcggttacggtggcagggctaccgggcatggtttccgccacacgatgagtaccattttgcatgagcagggctttaattcagcatggattgagctacagcttgcccatgtggataagaacagcattcgcggcacttacaaccatgcgcagtatctggatggcaggagagagatgatgcagtggtatgcggattatctagactcactgaaagcttcgtaa

SEQ ID NO: 183493 - DNA, 654 bp, Klebsiella oxytoca
ttgcggctggcgccttacccgggcgaccggcttgcagacgggggtgaacccgtagcccgggcaaggcgcgttaagcgccgcccccgggagcagagcgcagagtggcagaatttcccggaggcgatgctgcgcatctgtccgggcgaccggcccgcagacgggggtgaacccgtagcccgggcaaggcgcgttaagcgccgcccccgggagcagagcgcagagtggcagaatttcccggaggcgatgctgcgcatctgtccgggcgaccggcccgcagacgggggtgaacccgtagcccgggcaaggcgcgttaagcgccgcccccgggagcagagcgcagagtggcagaatttcccggaggcgatgctgcgcatctgtccgggcgaccggcccgcagacgggggtgaacccgtagcccgggcaaggcgcgttaagcgccgcccccgggagcagagcgcagagtggcagaatttcccggaggcgatgctgcgcatctgtccgggcgaccggcccgcagacgggggtgaacccgtagcccgggcaaggcgcgttaagcgccgcccccgggagcagagcgcagagtggctgaatttcccggaggcgatgctgcgcatctgtccgggtgaccggcccgcagacgggggtaacccgtag

SEQ ID NO: 183494 - DNA, 234 bp, Klebsiella oxytoca
atgagtgacgaatctcccgttttcgaaaagatccccgtgggcgccggcgagctatttaccttacgggtagataacataaatgatttcaatggcataaacgtagtcccccattttcatatgatggacgaactgatgtggttcagagagtcggcaggcagctattcgattggtgatgagaaatttacgataaaaaaacaataccctggttttcgtgcctgccttattgatccatga

SEQ ID NO: 183495 - DNA, 408 bp, Klebsiella oxytoca
atgattaatactccagataaagtattccttgtggctacttgccttggtactgtgttcatcattgccagtgtcattgtctcacttctgaacagaaagagatttaaggagatctgccagctatacaaagagaagttcggcagccttcccgatgccgtattattgttcgagaacgttaactcactttacttcaagggcgcatacggcataaaaacgcagtttatatttatgccgctattgtggaataaaagctcaatactgaccaaaaatgatgataaagatttcatccggggattaccgaaacggattatcaggccattttatgtagaggcacttcttggtctggttagtatagtattttttgtaattgcagggattttgatgctggcgataaaacacggttgggtgtga

SEQ ID NO: 183496 - DNA, 1410 bp, Klebsiella oxytoca
atgggggtcaaaggtaattatctgttcaggggggacaaaactgcctgtggtggcgtcatcattgatgggtgtcccgatcatcagcattttggtaaagacatggcctgcgaaggccacagagtaacctgcggcaaacatgaagggctttaccgtattgcgggagggattcgcgacactatccacggtaagagagttgctggtaccttgcacagccgcagttcttgcccatgtagatcgcgccttataccctcaaacttcgatgatgattacgagcttgataatgaagtcactccaaccaatattgactcgcagcagattgccaatcttcctgaacccgtccagcacgcacaatctacaaaaaaagagccaaaatctgataaacccaaaggtatcgacgctggttttaccattatcccgtatggtggcacgacagaagcctggcaacgtctgttattcacagagagcacgccagcaggtgcgaaagaactctttgccacgttgaacggcccagatgaaagatatccggccggttctattatgctggtagttgatcctgataagcaggacaacgaacagattgcccacatgcaggccgcgaaagcgcggattgatgcagcattagcccccctgtctgtcaaacaggccaattttctctataagcataaagacaccattgagatgttcgccgctgccgccagtaaggcgagcgatgcctatggatattcaggacaggcgaccgaagctgcgaagggatatttcgaacaggtagaaaaaatccttgtcgagatcgagaaaacctacaagaaccagtacatcaccaacggcacactcattggcgaacaattcttcgttgaacgccgtcgcctgtttgctcagcttgatagtgtcctcaaaatgtttatgaaccatcggttcatgttcaacgagtacaccgaacttaaaagcgcccttggcctctccagccgttcaattactcatcgctggaacgagactggcgttagcgatattgaaggttacgccactcatatcgaaaagctggcgaaatacgtaaagctgatggaaaccgcaggaaagataggccttggcttgtctgccctcgataccgcggcgaaaattacggaagcctgcaccgttgggcgcgattgtgccaaaacctcgtttacttccattggtgagtttgcgggcagcttagctgggggggctttagcaagtagaattcttcaaggcagcgctgcaagttcaatctgcgcagtagtactgggagcggcaaccatagaggctggtggtgcaggtgctttgctctgcacgatcggcgtaagtggtggtatagcatacgggagtgataaagcattatctgccgtaggagagtactccggtgaacttttatacaaggtaagcagcaatgattaa

SEQ ID NO: 183497 - DNA, 2394 bp, Klebsiella oxytoca
atgcataaacaacgccatttttcttcctgcaactacgtatctttatgttgtaccttatcgctgactatatttttttctgctgttctacaagccgaagaggttacttttgactccgaaatgattcactcacgtgggttgaatatcaaccttaaccgctactttgccctggctccacgttttcttcccggtacacattcagtgcaggtgaaaattaataatagggataaaggaaccgtggcggcgcgttttggtgaggatggtacgctttgcattgataatgattttattgaatttgccgggttaatgccggttccgttgaaaaaagatgaagagtgtcatgacatagttaatgattatgcacaggcagtggttaaagccctaccgggtcaggaatcggtagagctgttcctaccggcagaagcgttgaacgacttaaatggcgacattaagagttttcagcgcggcgggatcgccgggtcgcttaactataatctgttcagtacacgcagcgaatatgatggtagtgatgccagtctctactcacaggccagtctggaaggtggcctgaatgctgctagctggtcgttgcgtagccgctatatcctcaccgacgataatggcattaaaaatgctgaaagtatttatacctacgccgagcatgttttcgacataatgaagatgacaatgcagctcggggagattaatgccagatcgtacgtattgagtggggcgccgatccttggtgttcagttgacgcctacacgcgctttgcaaagccgcgggagtggtatcagtatttcagggattgcacgtaatgcccaggctcgcgttgaagtacgccagagcgggctgctgatctataacacactggtgccagccggaccattcacgattgaggatatgccagaggtccgtagtaatgtggatcttgaggttaccgttgttgaatccgatggctcaaccagtcgctttattgttcctgccgcctccgtaaggcgttcatcgttttctcgtccccagggagtgtctgtttcagttggtcaggtgaacaagattaagggcgatcatgaaaatccttgggtgtttaacctttctaacgactggcgtgtattacagcaactgaatctactgttctctggcgcaatggcggaaaagtatattgcctcgggtgttcagactgaatacttaccagcggataactggagtgtatccaccggtgtcgctgcaagtcagaaaaagtatggtgagaaaaaaaatggcgtgaaaactgagctacagacctcggtcaagctggcggaaaccctgcgtttatccacaagtgcagcacattttagcgacggctatcgtgaactgacggatgctctgagtgatgatttccagccctataccagtacatactcgactagcctggcctggtctacgtcgctggccggtacggtcagcgcaggttttaactacagtaaaggaagcagtgattcgcgtaatttgtttttcttctggggaaaaacctttaaatatgcctctctttcagtgaattggcagagagcgatagggagccagaatgatgacacgttctacgttaatctaagtattccgctcggtggtccgcagagtgttagcacttatatgcgtaaacaagggaaagatactagctacggtgtgcagaattccggttccttgtcgcagaatatgaattactacatctccgctgaccgtgataataaaggaagtgaaaatagccttaacggcagtttgaatagcaatctgcattatacgcaattaggcattggcggcgggcgcgtgggttcccgccaccgtaattataatgccacgctctcaggtggggttgcggcgcataaaagcggcgtcaccttcacgccttataccattcggaatacgtttgccattgcaaaactgagtgaatcgaaagctggcgttgaaatcagtactccacaggggacggtctggaccgattattgggggcaggctgttatccctgggctgaatgagtggcgtaattcgcgcattgaaattgatgcgaacaagctgcctgcgagtatgacgctggcaaatggaacaaagtatgtggcagctgcgcatgcttcggtgagcgaagtcggttttaaagtcctgaataaccgtcgggtgatgatccgcgttaagcgtgcggataacagggcgctggataagggattatccatcgttgatgagaaaggcaattatgttgtcaccagcgtggatgacgggcatgttttccttaatgaggctgagcaggtttcggcactgtatgtcatggacgacgataataaccgactgtgcaagattgattacatcttaagcgacaagagggatgaagacgcattttacgaagaggtggacggcgtatgtcgatga

SEQ ID NO: 183498 - DNA, 732 bp, Klebsiella oxytoca
atgcttaagaaggattttattatgagtttatttaattcttcagctatcagattgtgtattgtctctgcattttgtctgaccgcgcattcagtttttgcggaaggtatggtgccggagacaagtttactggtgattgatgaagctacccatagtggtacaatgaatgttaaaaacacggatgcgcatcctgcattactgtataccgctattatcgatttaccagatgaaagtgaagatataaaaataatgcctacacagcctgtcatccgcgtcgaacctgggcaaacacaacaaattcggtttattctgcagaataacacaccactggaagtggagcattttaaacgcgtaacgtttgaaggtattccgcctaaaaataatgataaaagaattaaaattggttttaatattcgccaggatttgccagttcttattcgccctgctaacctggctgttgttactgatgcatggaagtatcttcaatggtcagcaaaaggaaatgaagggaaagtcgttaatccaagtgaatatgttgtgcggttggctcgtgatatgatttttcttccttcggaagcaacggggtatattaataaaagctatattttgcccggggaaacattaaagataactatttcaaaaaatatcgttagtgacaataaagttaaatttttccctgccagtcggtatggtgttgaagttccaagttttattacggaattaaatgaaagataa

SEQ ID NO: 183499 - DNA, 681 bp, Klebsiella oxytoca
atgaaaaaaacacttctggctgccattctggcaatgagcgcgacttctgctattgctgctaacccctccgcagtattaaaagtaaaaggtactttgactaatgctgcatgtaccccaactttgagtaatggtggtgtggttgattatggcattattaacttgggtatgctttctgctactcaagttaatcagctggggcagaaagatatcgatttaactattaattgtacttcaccaaccaaagtatcatggaacctggttgatgagcgcagcagttctaacgcaaatcttgtcgttgaaaacgcgacctttaatggaatttctcttcaaagtatcgatcagacttacggagttggtaaggctggcgaggtaaatattggttcatattctctttttataaaaaataatagcgtaacagcagacgggaataacgttgacaatatcattgtcgattattatgatttaggtggaacttggaggaataatactaatggtaccacggtaggtagctcctatcgcgatattactgttgcgaataccggttctgtagaaccgctggcattcaaaaccgccactttcccaatggcaacctctctggcaattcaaaacaccagcacgctggctattactgacgatacccctctggatggccaacttaccatcagcctgcgttatctgtaa

SEQ ID NO: 183500 - DNA, 624 bp, Klebsiella oxytoca
gtgactgtcgaatactgggttgcctttctttcagccgccgtgttgatcaatattactccgggccccgaccttctgttcatattatctagatccggccgctctggaagaaggactgctttctggggggctgttggtctatggacagcggcactgacacatgtcagtgctgtttctatcggattgtcagcgattatttttgcctcacaaactatgttcacgctgataaaatacgttggtgctttatatctaatatggttgggtataaagttattttttagcgctcaaaccatatcaattgcaacgcaggtgcaggaaggacggtttaaaagctttgccagcggttttcttgttaatatttcaaaccctaaagcggcattattttttatggccttcctgccagtattcgtccgaagcgacaatgcgcacccgcagatccaaatgttcattctcggcgtccttgttgttgttgtcaaaatatttatagaactatttttcatatttttctctaaatatattaccgatattttcgcaaaaaataaaactgcagaaagggtagtaagcaaaatatcctctcttttcttcatcggttttggtttacagcttcttattttgagaaagccgtaa

SEQ ID NO: 183501 - DNA, 1368 bp, Klebsiella oxytoca
atggctctgtttttccatgagattatatgtagtgatgggggaatcactggtgaagcggaaatattagcagacataaaaagactcaagccttggtttgtcggcattagtgtccttgcaccaacatatgccccggcgcttcgtatagcttctgaagcaaaaaaacatggtgcatataccacgtttggaaatgatcaggctgctcaactctcttataagatactgcagtatagaaaagatgttgattttgtattagctgctgagtatggagagtttccgttagaaaaattaatacggaaacttgcatatgatgactgtgaatttggtgacatcccttcattatcatggagaaatgaaaatggtgacattttagggtttaattatgatacagacaagaacacacttggcattcttaaccatgaattacttaacggcaggaatagagatactgcattagatattttcccagtaaccgatcgccaactttatccagatgaaatatgggctaaagcattaaataactataaaaaatctttcgggcatttacatcatggacgccttccctcgggtatcactacgatgaacagggtgagaggatgcagtcgcgccaatgaaaaaataaaatgtaaacattgcgatatgttgttagatatctctttctcaagcccgcatcgtttctgggaggaagtgagatttgcaaaccaacagattcacgctgaattattttacgaagtttgcgacagtcttactagttttgctacatacatgaaaaagctggttaagtataagcctttagatttaggttttgacccttattttttcatttatggtcaagctcttgatatagtcagaaatcaagatttagagaatacacttaaaaaactcaatgtatttaagatgaacattggccttgaatcaggttctgaccatacattaaaaatgatgaaggggaagagagactccgttgaggtaaattatgcagcattgcgaaaacttaaagacgcaggtgtatatgtctacggttcattcgttctcggaacagagtttgaaaccgaatcaacgttaagagaaactatagaatggatcaagaagattatacgggaagggttaattagtgatatagaaatacagcctattttacctacgccgcaaaattactacgggaaacgaatgattgctgatggtttgaaattttcaaaaaatgactggccatttaatgtcgatgaaatttccagagcttatattgaaaaatattgccctgttaactacgacattataatcaatgcagccaaagaggtcagacatgaagccagtcactacagacttaatttcggaagtgctgtctcaggacaagaaaaatacatgaaataa

SEQ ID NO: 183502 - DNA, 216 bp, Klebsiella oxytoca
atgtcggtcacgtcgataaagcttgaaaacaaaattagcgatccggagtttgtggaaataagcgccaacgcacgtaagcgcgaacgcgcccatcttctgggtctgctgcgcattttcgttggccagctgaaaaaggaaagcctcaccccggaagagatctattcatcagtcgagcggtggatcagtcaccgcgaactaccaatcagcgaggactaa

SEQ ID NO: 183503 - DNA, 567 bp, Klebsiella oxytoca
atgaaccatttaatgattgatttgattaataccagcgaaaaacagtcttctcctttgtgtgccattgaggctgttttttttgagccgtcaactggtcagattgggaagacgttttactcttctatcgacatccgtaaagcgcaaagcctgaaggggcgcctcagtatccagaccgcatttgactggatgaaaaaagactctcactggcgtgcagaagtgatgagtgcaactgcaactgaagaggatgtcctttgccagcttgctggtttcattgctgataacacccgccctcagaacactgcgttgtttgtatggttcaaagatacccaggaaaaactggtttcgcttcggtatgccgtggatcgctcagaggtgtctggcatctttcctgaaggtacaaaattccgctgcattcgttcacttctcgaccttgccgctgccacagattatgcacctcacgcgaggagcgcacttgcacgttacacgctcactgacgcgctctatcaagcggagcaagtctgcgaaatctggcagcgcctgacctcaccacacattgaatcactctga

SEQ ID NO: 183504 - DNA, 228 bp, Klebsiella oxytoca
atgcattcgcatctgtcagttgtttgcaacgcgccgctgccggtttgtaacagggcgcttgccgccctgaaatccttttctcgcggccagcgtaattactctcgcgtcaagccacacgcctatctcgtgatccgtattggcctccgttggcgtttgctcagtaaaaacggcggtaagcagtggcgactgatgacacatgaaacctacaaccaggagtgtcgcaaatga

SEQ ID NO: 183505 - DNA, 2628 bp, Klebsiella oxytoca
atgcctgattccacagccctggcatggagctggaatgccccacggcgggttattaatccaagcgacgccgaagagcctgcaattgagtatctcacccccaaaggcgagcgtaaggcgcttgcctatagcgaacttgttgatgttgtttatcgggtaccgttgcgccctcgtgatgaggaggcgcgcagggcatttgatcgcgcaagactggcgcgtcatctgcggcgccgcgtccaggctctccctacgtttatccgcaagcgtttttcaatgcacctggaaactctggaccgtagggacccgaaagaggctgtacgctggttattcaacacgttcgagcgtcatgtattgcgtcgtgttgatgcggtaaacgcacaatatctgccacaaagtaatctgcctgcaattctctttccgctacgtgatgattttcatctgctgccatgggcagataaaaagcgcctgaaacgactggcctataggctcgccaatctgatgaaaagcgagtttatgcgcgagtttgattttcggtacgagaaaacggcagatgtggagttttccacgatctacgcttacggcgccattgccagtaaagcgacctcactcaacattgcgatccctggctggaaacagtattgcgatgaagtactgacagcagaagatgcattacgtgtcattgccagacttcaaaaagaaaagtggtggctagttaagctccgcaaaattcatgaccgctggcgtgagcacctcatgatcgccactagctacgtcagcaaagtggcatccccttattgctctgaaccttgcctcagggagtgggtagctcaaaaaaaagccaactttgaataccttcaggcgatggaactggaagaccaggacactggcgagcgtacctccttgctcgataaggtcatgggcagcgtttccaacccgaagatcgcccgtcatgaattgatggtgcgcatgcgcggttttgaggatatggctaacgagatgggactggttggcatgttttacacgttgaccgcaccgtcacgttatcacgccacgcatgtgcattccggcaagcgcaacgataaatactgcaatgccagcccacgcaaaactcaaaagtacctttgcaacgtctggtcacgtgtacgcgctaaatggggaagggaaggcatccgcacatttggttttcgtgtagccgaaccacatcacgacggaacgccgcactggcacctgctgttatttctccaccctgaagaggtggagcttgccactgaaatttttcatgagtacgccctccaggtggatggaggcgaacccggcgcggctcagtatcgttttactgccaaaccaattgatgaagagtttggatcggcaacgggatacatcgcaaagtacatctcaaaaaatatcgacggttatggaatggatggcgagtttgatcacgagtcaggcaaacccgttaaagagatggcaaagcgcgtgcgggcgtgggcttcacgctggagtattcgccagtttcagcagattggtggcgcgcctgtatccacctggcgggagctgcggaggctaggaagtcgtgagcttgtcttgcacccggaacttgaagccgcccgcgctgctgctgatgcgcccgactggccgggatacatcaacgcccagggcggcccgtttgtaacccgtgattgcctgcgcgtgcgcctcaattacgaatacaccgaaaacggcaatgattatggtgacacagtcgccaaaatcaccggcatctattgtccttttacgatcagtgaagcggttatttatacccgtaccaacgattacaaaattgtaccgaagcgtaagccatcgccggtcgataatttgaccttagaaggccgcgacgcggccccttggagttctgtcaataactgtacggggcgcaccggatcggacgaaaaaccaccgtcaaaaacggcagtgtcagctgataaaaccgcgcctaacgacagttcagtgacagaacttccgctgaatatcgaggatttaaggcgatattcacgccagcaaaggcaggagatcaccagtaggctcagaaaatccgcttgcgaaagctcagatcaagccttcacgcgtaccgtgcgcggtctgcgcacgtcgattgatgacgaaaccgcgctggcgtgggggccaaaaatcattgccgcgaaagatatgagcctgacgctggaagaggcagagctgcgctggcgcgagcagctacgagttgaggcgctgcggcgtgcggacagttacgccgcagcggcttcagaattccaaaagaaaaagtcagaggcagcattgcttcaacagaacggcgcggcagcgaacggtcaagggcgaaattcaccgctgcaaggcattagcgggagctcgcaagaactgcgtgaccacgcgatcgccgaactgaatagacgcaatatcgttatcagtgacggggaggttaaattgttaataggtggctgcattctgtcgcgtggcgaaatggaatttgccatcagagaaggggagttaatagtggagcgccggttgtttaaacacgccaaccacgccccggcatcattgaccaaacaaagtgaactgcttgatcgctgccaaagggctatgaggaagaaattatga

SEQ ID NO: 183506 - DNA, 306 bp, Klebsiella oxytoca
atgaccacgttcgctgttgaaattcatgaagatatcgttgcttggcttaaaaaaaacactcgccctgagatagttttggatctgccgtcagtgccggaaccaggcgataagttatggctgcaaagtatgcgtggaacgcatattgttgaaacagagaagagcatgatcgtggagtcatgccgagtttcacgtctgcgtccgactgtatgcctggtattggtatttaagccgatcacgatgagccagttgcgcaggatatcctctgccaaaggctcaagcatgcacaattaccgcgggtactcgtaa

SEQ ID NO: 183507 - DNA, 1977 bp, Klebsiella oxytoca
atgcgaaatataaattcaattatgatgagacttgcaaagagggcagagaaactacagcaagaccatctgctcaagtcttttgttgatgttggccccacatataccttattgtcgagcaatgataatcaaataatgtttggccgaaggggtactgggaaaacacatttcttagctgtcctttgtaataacatacaacaaaaaggcatcatttgcgtgcctatagatatgaggttgatcggttctactggagggatcttttctgatcccaatatatcattaagtgaacgggcgaccagattactttctgacacattgtgtaatattcatgaagtaatcttagactacattttcgaaaaagatattgaaaacactactgaaatcgctcagttactgaatgatttcattgagaaatcaacatcattaactatcgaaggtaatacagaggaggaaattagttcaacaaaccataattccatgaactcctcattaagtgccagggtaacaaataagagcatctctgccaacttttcactttcagataaaatatcatcagatgatactgagagatcaaaaacctcaggaaagaaaacattaaggattcacttcggagaaattaccaaactactcaataatatagtttcaaaactaccagaaaaggaattgtggatattaattgatgaatggtcagaggttccaatggatcttcagccatatcttgcagaacttctccgcagaattttataccctatatctggtattacagtaaaaatagccgcaatcgctcacagatgtaattttttgctaaatgatcctgatacaggcgttcgcgttggaatagaacttggctccgacgcctcatctgttattaatttagatgaatatatggtttttgataacgatcgtgatgctgctaaatcttttttcaaaaaattactccataaacatgctcgtgcaatagataaaaattcaatatgtgacattgaggcaagtttatttatcaatgatgtatttactcaaccatcagcatttgatgaatatgttcgagctgtagaaggtgttccacgtgatgctataaatataatttcacttgctgcacagtcggcactagaaaacaaaatatcaattgtgcacgtacggaaatcagcacaaaaatggtttcaagtaaacaagcacacggctctcaatagcaaacctgaagctgttgtattacttgataaaataataaatgaagtcattggccatagaaaaacccgaggctttctgataagtaacgaaaatcatcacccactgattgattatctttatgacatgcgcgttattcacgttttgaaacaaggagtttctgctcgaagctcgataggaaaaaaatatactctctacactcttgactacggctgttatgtagaacttatgtcatcaagttctgctcctctcggtttgataatagaatcagatgagaatgatgagttaagatatatagagataccgaaatcagattataggtcagtaaaaaattccattctagactttgaaagcaacaatcaattaagattgaatttggtgacatctactgatcatcttcaacttccgattaagagcagtaaacataaagatgtagaaaaacctattgataacaaaacaataaattcaatcccaaaaaatattggctcattaaaaatagcaggaacaatttacattccaataatcatggtggcgttggtattaaggaaagctaggggatttgaaaaaagtcatgctgtagaattaacaaaaataataaacgagcacattgttattgatgttaacagaccgaaaatagcaactaataacatgtcaagagaacttaggaaagataatatattagaccttccatggttagagttccacgagaatggaaggaatccacaattcgctttacgtgcttgctggaaagaatactggaatcagtatttcggtgaaactgctccagtattttaa

SEQ ID NO: 183508 - DNA, 630 bp, Klebsiella oxytoca
atgataagagcgtacagatgtgtcatctggtataaaacttacggcaaggagtgcgctgcgagtacaagaacgcatccgatccgcggtactgagggttactgcaacgctatagataccaattttcgcagtggcctttataaaaaagtagaaaagtttatttatgggggatgtatgggatggattgaagttgttgactctgcagtaaaaataggctttggtgcccttatttctgcatttgcgtcatatcttattttaagaagaaaccaaaagcatgaaattgataaagagtcacgtgagctgattaatagaaagacagaggaaagaaaactgaattacagtaaattccttactcattcagcaatgctttcgcagaaatacagagatgaaaactgtaatgctcaagaagaggattatattgagtttttagatatatatcatcgcatacaaatcacatcatgtgataaaattagagtggggacatataaccttttcaatgcagttaatgaatttattgttataagaaaaaatgaacaggatcgtgaacttttgcgaagcatgcgtaaaaatattgatctccgaacagctgagtttcaatttctcgctcgagaagatttagttggcaatgcataa

SEQ ID NO: 183509 - DNA, 651 bp, Klebsiella oxytoca
atgaaaatagtaaaagatatatttgctatcattttttttgcgggttttacctctgttaatggttttcttctttatatatcaaaggttacggttggtgagtcgataacattcttcgccctgtgttgcgttattagcttaatcatttctttttcttctgaaatccaggagttttctattgctggaaatattgtcaagcttaaggaagttcgaaaggatgctgacaaagctatagctgagttacaggcttctcgcctgactatgtttaaattcttacttgaaagcactaaaaaattcagtggaggatttggcagtatttcacctaaagatgagagaattgatgattttttatttttatatgagaatatacaacgatctggtctatttgaagagttagcagagaaaatagcaggatgtgcagagctatttatgaaggctcagattaataactgtgcaagtaattataccaaaattgatataggccgaacttatactcctgatgaacttactgatgaggggctacggagtgaaaatatacggaaagataaccgacaaactgaagatcaaaatcgtaagttaattttggaggcgatttcacactatcgtaccctctacgacattctccagaggactaagcaagtaaccacaagatag

SEQ ID NO: 183510 - DNA, 1062 bp, Klebsiella oxytoca
atggtaactttgaaaaagaaaaacggtaaaaagccgatagccagcaccgccggatctgacattgcggagtcactgaaggccgatcccgcgttgacagcgttcagctttgacggcccttatcccgtgcgtgatatggccgatttgctggacaatctctattgcatggacaacgggcgatactatgagacgccagtggatttttacgggctggctaaagctccgcgccagagcgcctggcatgagtcggcgttgtatttcaaacgtaatgtgctcacaggctgttttatcccgcacaagctgctcaatcgccagaccttttccgcgtttgcgctggactggttcacgtttggcaatgcctatctcgaattgccgcgtaatcgcctgggcggcccgcttcccttcaaacactctcttgcgaagtacacccggcgcgggagcacagatcttgatcaatactggttcatcaggcgctggaaagaggaacactcgtttaaaccgggttcagtgtgtcacgttctgaatccggatattaatcaggagatctacggcatgcccgaatatatggcagcgctgctggccgccagcctggcccactccgctgacatgttccgcaagctgtattacgacaacgggtcgcatgctggatgtattgtctatattggtgctggacaggttgacgataaaagcatgaaggcagtcaaagagacgttgaccggtgcgcgcggtaaaggcgcttttaaaaacctgctgctgcatgcgccaggcggcggcaaagacggcgtgcaaattctccccttccagcagatcacggcgaaagatgagtttatcaacattaagaacgccacacgtgacgacatactcgcagcgcaccgtatcccgccgcagctgatgggcgccatgccagagggaaatggatcgtttggggatattgagaaggccgcccgggtctatgccatcaacgaactgactccggtcatggaggcgctgaaggtggtcaacgaatggctaggagaagaggtgatccgctttaacccctacgcgttgctttcccccgagaaataa

SEQ ID NO: 183511 - DNA, 3030 bp, Klebsiella oxytoca
atgaccgctaattatcctgccagcattctgccacccaacgccaccgccgtagagcgggccatcgacagggccagcgccgcagcgctggcgagtctgccagtacatctgatccgctgggtgaaagatccagacagctgcccgttggcgctcctgccgtggctggcgtgggaatatcaggttgatacctggaatattgactggtcagaacaaaagaaacgcgatgcgatcaagcgcgcccactacatccatcgccatcgtggcacggtcgccgccgtccgtcatgccctggtagacagtccttttgggacggatattgttgaatggttcaatcagaacccgaaaggggatccgtatacctttcgcctgaacgtgtatcaaaacgatcttccggtgacggagtatgaccagcaggacctgaaattagcggtgttgcgtgccaggaacctgcgcagctggttttccgtgcatgtgtttggccggcttcagggaacctcatatgcggccgggtacatgtacgccaccgagaaaatcacgcctcgctttgtcccgttgcaggtgattttatcccgctacgagctgaatctggcaccgggtgactcggaaacggtcacggtaaccatccttcctgattacgcggaagataaaacctttacggtaaccacatcggataaaacaattgcgaccgcccggattgtcgatggcgccattgtggtcatggccgtggagcgggggagctgttcggtcaccgtcaccaccactaacggcgttagcgcggtgatcagtgtgaaagtggttgcggtgatgaagttcgtcacccggatcgataatgcaagccgtccgctgttctttgttcgcatggacgaagatttcaccgttgactatggtgacggcatcgacagccgggagtatcgcctcgatccggccagtaccatttatggctgggttgttccgacgcgtgaactggaggagggcagggaatacacaataacggtcaagaatacagaaaccgccagctttcagcgggctatggggaacgtctccgtgacgctgaacaccgtccgtgaaatcatttatgtcaccgggaatcgggataatctcacctccttttcttcaggcgcgacagggcttgtcagagtacatgccggggcgtttgatgatcttccgaaagtgcagagctgcacgtccctattcagggattgcacctcactggaagaattaccgtcggggctattctcacgccttactactgccacagatttcacctctgcattctacggctgtacagccctggccatcctccctgatgggctgtttagcggcctgactgcggtggcgcactttatctctgttttcgagaaatgcaccgctcttaccagtaccggaaatagtacattcagtggctgcgcatctgcggtcagttttaacagtgcatttgatggctgcacggcgctgttaagtgtcggggccggggtatttaaaggctgcgtttcagccacatccttttcgtactgcttcaggggctgccgcaaccttctggcgttgcgtggcgacatgttcgctgatgttccggggggtattttcacaggcgtattccagaatagtgcagcgctgacagaattacctgccggcctgtttcatgcctgctctgaggcgagtcattttggcggcgcctttagcggctgctcacagctcctgtctgttcccgctgaattgtttgctggcctgtcaaaagtgacatatttcgggacggtcttttctggttgtagttcactgaaaacagtcggcgctggcttgtttgccgggtgcagcctggcgcaaacatttgcctctgcgttttacagctgccgctcccttgagaccgttgctgatgatattttcagcggttgcgtcagtgcgacaacattcgccagcgtattttatggttgcagcagcctgacggcactcccgtcttttgctgactgcacgaaagttaccacttactcatacgctttcgccaactgcgaatcacttatcaaagtagaggccggcgcttttgccgataaagcgctggtgacgacattcgtttatgcatttctgaactgtcattctctggtttctgtgggggaaggggcatttcgtggatgtagtgcgttaaccagcctgggctacaccttctccggctgtcgctcactggtttccctcgcgggagatatgtttgctggttgcggtaaagtgacagccgtcgagttcctgttcaataagtgctccgcgctggtcgggctgccaaaagaactgttcagcgacatggtatccctgaaaggcatgggagccacattccaggactgtagcgcactgatcgcgctgccatccggcatgcttgcgggttgcgtcaatctcacctcgttaacactgacgttctccggctgtaccgcgctggcggtattgcctgcggatttactggaacataacaccctgctgaccagtgccggatcaacgttctatgactgcacttcactggcggacattccgcctactctgtttgcatcttgcccacttatcaccgcgtttggcgcgacgttccagaacactggggtggcggaaataccggaaaacctgttcagcggcaacccgctggtgacctcttacggccagactttcaggggctgtaaaaacctgcgctcagtgccagccggtctttttgccgccagcataagtgccacggtattcacgaatgtcttttcggaatgcagtgcgctggaagtcgtcggggcgggattactcaacaccacggcggtcacgaccgtgggttatctgtttgacggctgcgcgtcactacgcagtgacgtcaatgcgatttttaatcttgcgagctacctgaatattgtcaccaccacggccatattcaggggctgcgcattgcttaccggcaaaggactggtctttatggccaaggtgccaaatgtcactgcgcattattacgcgttttattcctgcgcagatctcgacgattacgacgatttacccggcaactggataacgaataaattatga

SEQ ID NO: 183512 - DNA, 213 bp, Klebsiella oxytoca
atgaagacattcaatgaactaaaaagcctgatcgacttttgccagaccgatgcatttttcctggagcacctgaacaggcttcagatcgctggcgtaatttcgattgatgaaggcgatattgatgccgccagtaggggcgtcagcgatgatttttatgaccgccttgctggcgtgtacggcattgagccagaaacaaaaaatgaggaggcataa

SEQ ID NO: 183513 - DNA, 519 bp, Klebsiella oxytoca
atgccttgggaaaatctagctcatactgccatatattctagcaatgaaaaatcaccagatagtatctggaagacggttgacggtgttgatatcgaatttataggtgcttttcttacagcacatcttagtctagaaaaatatatcactgattatttacgattgaaatatccaagtttatgttgggatgatgcaaggttaactttctcccagaaaatagcactgcttcagaatgagcctgctaagccaccatacaatgaaattttcattaaaataaaagacttcaataatattagaaataaaataagtcataatcttaactatcatttatgtgataaagatatttctaagtttttagatttttataaaaaaataaaagggagtgatgagcgggaggattttattgatcaagataatccagcagagttagtcggtttttttgttatgataaccaaggcctatcttgctagtggtataacctatttccattctaaggctaatgatgatggagtgaagaaataa

SEQ ID NO: 183514 - DNA, 690 bp, Klebsiella oxytoca
atgatcattcattttactaatgatttcaatataatcaaatcaattttaacttctcattcgtttaaactaagatattgtggagaatattttagtgataaagaaggaaaaataatatcaaattctgctcatccaatggtttcttttagtgattataatgactctgaactgaataaaaagcgcattacatatggtagatatggagttgccctaagcaaaaaatgggctatagctaatggattaagtcctgtaaattatgttgaaaaaaactccccagtagctgaagggttggtttctttacttaaagcacgtcaaaaaaatactataccagattcacttcgcttacctattatccaattaaaatgcttcactaaacatgtttatggatttaacagtcactttgatgacccgaacttttattttaagtcagaaaatgaatggcgatttgttccaagtttgaagcaaatagacaaaaaccgtatatctgaaaacttttcaacttacaaaaaaaacaaagacaaatacaataagcgcctagaaaaacacccattacgatttgctattgatgatgtggttttcatttatgtcacatcagaaattgagcaaaatgaaattattagaatgacatccctaccttccagccaagtaaaaataagcacatggaaatataaaccatataaaaaaacattctaa

SEQ ID NO: 183515 - DNA, 687 bp, Klebsiella oxytoca
atgtctagagtagtaacaaaagatgattgccttgctgaaataaaacgttttcttaaatattacttccatttttgcaaaagtccagatccagactctgttcgtgaagtacttgcatccgcctacagtattaatgacaagtttcgtaaagctggttatcaggatttttttgatgatgataattttttggccattaaagcaatacgtaattatgcaattcatcaatctgaaatatataatgaagccaaatcattaccattaatttttaaagaacctatccaggcagatctcagtatactatgcctgctacccttagaagtcatttctagaatcactgcaagtgttagtgccgcaagtcaatcagcaataaaaaaaacttgtgttttctataaaaaatatgtcgacatctatccttgtatatttaatttcggcgtaactcttttcctttacactgaagaaaatgggttaggggttgactctttagaatatgaaaactttaaaaattcaattaactatgaaagaattaacaacttaccacatcacataaatggtggttttactttacccagcgggcgtgatatagatgaattcatcgataacaatctaactcttttaaaagaaagggatgggttgttagatgagtattacgaagaagaaaatggaatgtatacatttaaagggaagatataa

SEQ ID NO: 183516 - DNA, 1092 bp, Klebsiella oxytoca
atgggacgtttagttttacagaatgcaggaaaaacttatcacgacctgaatgtggtacaggatattaacctcgatattgaagacggggaatttgtggtgatagtcggcccatccggcagtggtaaatccaccttattacgcatgattgccgggctggaagatattagcgccggggaaatgtttcttgatggccagttaattaatgacaccctgccgcaggagcgcagcatcggcatggtgtttcagtcgtacgccctttatcctcacatgacggttgaagaaaatatggcatacggcctgacgctggcgaaatgcccgaaaaaggaaattacccggcgtgtgcatgaggcggcaaatattttgcaacttacattgctgctggaacgtaaaccggcgatgctctcaggtgggcaacgacagcgagtagcgattggccgggcactggtcaaggagcccgctttattgctgttcgacgaacccctctctaaccttgatgctgccctgcgtgtggaaatgcgtgtgcagatcgcccgccttcatcagagactgagatccaccatgatctacgtcacccacgaccaggtggaagcgatgacgctggccgacaggattgtcatgatgtcctcaggccgcatcgcccaggtgggcacaccgctggaattgtaccatcgcccggccacgctggaggtggcgacgtttattggttctccgcgtatgaacatcctgccagtgacggttgagtacggggataagcagcgcgtgcaggtacgcctgccagatggcgtgcatttaatcgtggaggtggatggcagtaatgctgccgcgggtgaacaggcctggctgggcgtacgcccggaacacctggtggtgggagagcaagccgatgcactgctgtctgccactgtagtgctcagggaaaacctcggtcatgaaacactggcgtattatcaggtggaaggtagtgaagaaaccctgactcagcgcattgccggagattcagcgccggaaaccggtagcgcggtgcaactgggggttaatggtcgtcacagccatttatttaccactgacggcagagcgtattgccgattgtga

SEQ ID NO: 183517 - DNA, 1131 bp, Klebsiella oxytoca
gtggcagagcaacagtttgatgtggcggtcatcggccttggcgcactgggcgcagcgacgttgtggcggctggcggaacaaggtgtcaaggcaatcggcatcgatcagtttaccccgccccatgatctcggcgcgacgcacggtaaaacccgcttgtttcgtactttctgcctcgaacatccggtgctcggcgactacgcccgtttatcgcgccgcctgtttcagtcactggaacagagcagcggtggatcgctgttgtcgatcaccggcggcaccattatcggccgcccggactcacaggcggtgagcggcactttacaggcagcacagcgccttggagtgcaattgccggtgtggtcgtccacggagctggcagcccgtcagccgcagcatattgggttacggtctgatgaagtggcagtggtggatagcgaagcaggcgtggcgaacccggagtgctttattcgcgcggcattgcaacgggcgcagcagttatcggcgcaggtgctgacgccggtacgggtggatgcggtgcaggatcacggcgctgcggtgcgtattgtcacttccgcaggtgagattcgcgccagtcaggtggtgattgctggcggcgcctggctcacgcgtttcgcaccggatctgccgcttgaccctgttcgcacaataatgacctggtttgatcccgtcgcgggctacagcctggacgccttcccggtatttgtgcgtgaaatcagcccgcagctgacgctgtggggccacggtgcgcaagctggcggcttagtgaaacttgggcttggcgatgtcggagttccacgtaccgcgctgaatctggagaaccctgacaggcatattgcccgcgaagataccgctgaactgcgcgcggccgttcgtcaatggctggaagatatcagccctgaaccggcaagtgcgcatccgtgcatgatcacccgaacgccggatgcgcaatttattgtcggacgttaccggggcaacattctggttgcgggcggtgacaacggccatgctttcaaacacgcacctgccatcggcgaggtgctggcccgccaggcgcagggcagtaccgtggagctggaaacggcatttattgatccgcgacgatttgcacattaa

SEQ ID NO: 183518 - DNA, 1074 bp, Klebsiella oxytoca
atgacacaacgcgttgaatttctcgatgaacgcccggacccgaataacccgtgggccgcgccggagaaccgctttaaacgttatggctacaatcgcgtcggcaacagcggcctgattgtctcgccgattggtcttggaacctggtacaactttggcgacaccacgccgttccagcagcagcgtgacattctccgtttcgcctttgaaaacggcatcaaccatcttgatattgccaaccagtatggcccgccgctgggtgccgctgaagaaaatatcggccgcattctgcgcaaagattttcacccgtaccgtaatgagctggtgatcgccaccaaagcgggctggccgcagtggctgggaccgaacgggcgtctgggcggcaaaaagcacctgctgggcagcattgatgagtcgctggaacgtctcgatctcgactacgtggatattttctattcacaccgttttgacccggacacaccgttgtatgaaaccattgaagcgctggatactatcgtgcgttccggcaaggcgctatatgtcggcatctcttcgtattctgcgcagcgatcccatgaggctttcgccattgcccgcgaactgggtacaccactgctggtcaatcagtcctcttattcgctgatcaaccgctggattgaagatgagctgctggacgacctcggcgaatctggcggcgcagcggtggcctttacgccgctggcgcaggggctgctggcggatcgttatctccagggctttgataaggtgcagcgcgcgcagcatcgtccttacatttccgccgaggcgcagtccgaagacaacctgaaccgtctgcgtgggctggccgcgattgctgctgaacgtggacagagcctgtcacaactggcgatagcctggacgctgcgggacccgcgcgtagcctcaacgctggtgggcgtttccagtaaggaacagctggcggagaacctgaaagcgctggacaacctggcattcaccgccgatgagttggcacggattgatcggttcgcggtgcatgatggaggtgttaatccgtggaaaatttcctccgaactgtaa

SEQ ID NO: 183519 - DNA, 888 bp, Klebsiella oxytoca
atggctgcagtttcggctgttgaaccgcatgcgcagcgcgccatgacgcggcgtgttgttttgcgccgtcgtcagtggcgacgagtgctggcaaccagcgtggctttactgatttcactgctgtttgccgtgccgtttatctggctggtggcctcggcctttcgcccggtaacgcaaacctttcaggccagtgtggatatatggacctttatcccgcgcacctggacgctggaaaatttcacctccgctttcaaccggggattcatcaccaatctgttcaactcgttatgggtgaccggagtatccgcggcgatcggcacgctactggcgattctcgccgcgtttccgctggcggttatgcgtttcccaggacgtgactggctgtttgtggtggtggtgttcgccttcatgatcccgtttgaagtggtggcgttaccgctgaccacggtgttcacgcaactcgggctggcgaacaccctgacggcgctgattgtgccggggctggtacatggcctggccatcttcaacctgcgccagttctttttaagtataccgcgcgagcaactggaagcggcactgctggatggcgcctcctggtggcgcattttgtttcagatttacctgcccctggtacgcccggcggtgatcggctcggcgatgattctggcaatggcacagtggaacgcctggctgtggccgtcgctgattatcaccgacaacagtaaacagaccggcgcggtggcgattggtctgtcggattccgcctacacccaggactacggcctcgcttttgccgaagtatttattctggcgctgatcccggcgctgctgatcttctttggtcaacgctcttttacccattcgctgagtcataccggcggcaaataa

SEQ ID NO: 183520 - DNA, 885 bp, Klebsiella oxytoca
gtgaccagccgtgcctcccgccacgaatcacgcaccgcgctgttgttgctggctccggcgttagcactgttgttgttgttgcgtattattccggcaggcatggcggtggtggaatcgttctacacctcggtgccgggtagcgtgatcccgccgaaatgggttggctggcagaactatctcgacctgtttgacgatcccggtttctgggattcggtgtggcgcacgctgctgttcgccgggctggtcaatccgctaacgatggtgttcgccctgcttcttgcctggctgctgacgcgcaatgtggcattcactggcgtgtggcgcacactggccttcttgcccacggctctgccgctgatgggcacgaccgtggtgttcggcgtgttgctgcgtcccgaaggggtggtgaacagcctgctgacgctggcacatctgccagccagcggctggtttaccgatgtcaatggcgcactggccgcgctggtgatcctctccacctggacagcggtgggctactggatgattttcctgattgccgctattcgtgatgtgccgcaggactattacgacgcagcgatgctggatggcgccggggagtggcggcagtttattaacgtcacgctgccgttaattcaacgccagttgctgtttgtcctgaccgccagcaccgtgtggaacttcatcctctacgcgccaatcagcgccctgaccaaaggcgggccgcagggctccagcaactttttaatgtacgacatcatcacccgctattacgccctcagttcaccgggcgcggcgctggcggagatgacgatgcttttcgttttaatgggagcaacggtatggctgcagtttcggctgttgaaccgcatgcgcagcgcgccatga

SEQ ID NO: 183521 - DNA, 1305 bp, Klebsiella oxytoca
atgacagcatctgcaaaaacatctatcagcctggtggcaggcctgattttcattacgacaacggtatccgccgccaccattccggcggtggaaagcctgaaagcaccggagaaaagtatcaccctcaattacttcggtggtgcgattccggctgagcgagccaacaagattatcgcggcgtttgaaaaacagtacccgacgatcaaaatcagctaccacgcagtgccattcaacagttacaacgaaactctaggcgcccgtttcgcccagagggaggtggatattttcgatatcgaccaaccccagagtgccagctacgccgtacgcggctgggaagccgatctgacggacgccttcgccgcgaaacgtaacctgattgatccaccggcgctgaaagagtccaccatcaacggcaaactgctcaatttgccgtaccagataggtaccaccttcctctattacaacaaaaaagtgctgaagcagattggtgtggcattcccgtcaaacaaagccggggaagcgccgacatgggagtgggtggaagcgacagcacgtaaagcggtggcagcgaaagccgcgccttacggcatcaccttctccacgccggatatgtattactacctgcaaccactggcagaatccctcggcgctggcacgggggtgaaaggtgacaatcagctgaccccggacatcaacaacgccggatgggtcaaagccctgagctggtacggcaaactgtatgccgatggtctggcgccgcgcggcgtgcgtgaaaccgcgctggccttcgccaacggagacagcgctttcttctatggcggcatctggaattcgccaaccatcaccaaaaatgccagcctcgatttcggcatcaccaccgccccgaaatttgacggtggtcaggatgcaaccaccagcggcggctgggcgttgggtatcagcgcactgtccagcccggaaaaacaacaggccgccgcgctgttcctcaactggtatctgtttggtgaaaacggcggttttgtctctgctgacccggaaacggaaaacgtaccgaccaccgacaccacccgcgcggtgttctggaaaaacccgatttacgctgatccgcgccttaacggtttgcaggatatcctgacctggcaggcgcagcactcggcgcggatccgcccgcaaaccgttggcggtgcggagtttacgcaactggtgagtgcagctattgccgacatcaccaacggcgccgatgcaaagaaaacgctggataccactaatgcgaaactgaacgctgcgtggagaaaatatcagtga

SEQ ID NO: 183522 - DNA, 1386 bp, Klebsiella oxytoca
atgagcgaaccgcgctcgctgatttttaacgcatttgaaatgaacggcgtgggctactacgcccaggggagctggacgcacctggatagccagcgtcaccgctacaaagacctcgactactgggtggagcgcgcacgattcctcgacgaagccgggtttaccgcactgttttttgccgatgttctgggagtgtatgacgtctatcgtcaatctcccgatccggccatcgaaggggcggtggatttcccgctcaatgatccgtttatggtgatcccggcaatgctggcggccagcaaaaacctcagctttgcggttacagcgtccacgacctatgaacatcccttcaccttcgcccgccgtttcggcaccctggatcatctgtcgaaagggcgaatcggctggaacgtggtgacatcttacctgccgaatgctgcgcgcaactacggcctgccggatcagttgcctcatgaagtgcgctatgcacgggcggaagagtttctgacggtgttctacaagctgctggaaggaagctgggaagaggatgccgtactgtacgacaaaaccaccaaacgctatgccgatgccagcaaagtccatcgtatcaaccaccagggcgaacatttttccgtacaggggccagcgctgacggagccgagtgtgcaacgcacgccggtgattttccaggcgggagcgtctgcccgtgggctggcctttgctgcacgccacgccgaagtggtgttcgtcaacggcatgaacctggatgccctgcgcatcaatgtcgataagctgcacgccgccgcagtggaggccgggcgctcgccagaggcaattaaagtggtgaccgatctctcggtggtgactggacgcactcaggcgcaagcggaagaaaaagccaatgccattcgtgccgctcagtcaccggaagcacagtatgccgcgtttggtggtgccagcggctttgacctctcccgctatcacgatgacgacacgctaacttcggaaccgcacaacttctcccgttctgaatcggcccgattcaccagtgaaaaagcacgcccggacagcatcgccgccatcaaacagcggctggtgaacttaagcccctacgccagcacgctggtgggtacgccggagcgcatcgccgatgacattgaagaaatcgtgcgtatcaccggtgtggatggcttcaacctgcacgaattcgtcagcccccgcgactttagcgaattcgccgaacaggtattgccagtgctgacggcgcgcggcctgttccagccgccgcaacccgcctcctccctgcgaaaccggctatttggccagggcgaccgtctggccgctccgcatccggcagccggttatcgcgggcgttttacaaagcaacaataa

SEQ ID NO: 183523 - DNA, 1176 bp, Klebsiella oxytoca
atgagtaaacaaagagtggctgagccagacgtggcagtcgcagtttatgcattaaaagcagagctggacaggctggccgttacagcggatctccacagtgattatcaactggcacgtgaggcattgcgccgctcgggcctgctggcactacgtgttccacaggctgcagggggatggagtggcagtcaggcgcaggttattgctgtcagccgaatcctggcgcaggccgatgccggtatcgcgcaattgctacagccgcactacggctttaccgacaccattcccctgctcccttcagtggatgcacaaaaggtgctgtatcaggatgtgctgaagggtgaacgtatcgccaatgcagccagcgaacgcggcggtaaacattcagccgattttgctaccacgctggtgcccgaaggtgatgtttaccgcattaacgggcgcaaatattacgccacgggctccatcggcgcccgctgggtcactgtaataggcaaagccgatcacggcggtcaggcgctggcatatatccgcaccgactctcctggtgtcacgcttcttgatgactggaatggcctcggtcagcgcggcagttccagtgggacacttatcctcgaaaacgtcacggtacccgcagattacgtcattccggtatgggacgaagcgcatcgcggcattgcctggcatgaaagcggacggctgatccatgccgccatcgacctcggtattgccgaaggcatcgtgacgtggggggtgcaaagtgtggcgacggataagcgcattccctttgaatcaccttatcagacgctggcggaagatcctgttctgcaataccaaatcggcctgttgagcgcgcggattttgtccgttgcggcgctactggaaaacaccgcgcatttgctcgatgaagtgcaacaggccgatgccagccaacaaacgcaactttatccacagctccgggcacagctctccgctgccaaagcactggctgcggaagtcagcctggccgccagcagcgatgttttttcctggagcggtgcccgtgccgctgaccgtgccctgcgtattgaccgttactggcgcaacgcccgcactcacaccctgcatgacccggttcgactgcgctatcaggaacttggccgcagccagattgcccagtttaaggagcctcagccatga

SEQ ID NO: 183524 - DNA, 1182 bp, Klebsiella oxytoca
atgcagaaaatgaaagacacatttccctatatgccattaatggcttttgcgatgaccggatttatttgcatcatgacggaaactattccagcaggattattgccagaaatcagtaagggaatgaatatttcgctggctagcgcaggccagtgggtcaccgtctacgccctcgggtcattatttgccgctattccgttaactatcgttacccggtcgtggaatcggaaatatgtcttattaatgaccgtagcgggatgcttcatttttaataccattaccgcactttcatcaaatgtttacctgaccctgttagcgcgtttgggggccggggcggctgcgggactggcgtggagcctgctggcggggttttcacgccgaattgttgacccgcttcatcagggtcgggctatggcgatagccatggctgggacaccgctggcgctctcactaggcgttccgctgggaacctggcttgggcattatcttggctggcgcctgacgttcggtattatgtcagtactttcgctgttactaatgatatggatccgtatcagcgttccggactctgcggggcagcaaaaacatcaaaaaataccgttcaggaaagtactggcgacccccggggtcaggccggtcctcgcggtcgtactgacctggatgcttgcacacaatatcctttacacctatatcgcaccgttttcgtcattatcaggtatgggggcccatgttgacggtattttattaatttttggcctgtccgctctcgcgggtcttatctttaccggaaaaataattgatagccagttacgtaaaatggtactggcatcgctggctatattttctatcgtctcattattcctggggctgttctcttatacacccgccattcttattgtaggtagcgctgtatggggtgtgacatttggtggtgctgcaacgctgttgaataccgcacttgccgatgcggcggaagatggtgctgatgtagcgatctccatgacggtggtgagctggaacgcggcgattgccctgggggggattaccggaggaattatccttcagggacccggcgtcaatggtttgccttgggtcattctgatactggccctggtcagttttctgattgtaaaaatcaacagtgaatatgcattcccacaccccattcgggacgaagccgaatga

SEQ ID NO: 183525 - DNA, 321 bp, Klebsiella oxytoca
gtgaaaaaattggatctcaacgccctgcgggtcttcgtcaccgtggcggaaaatggctcctttcgcgccggagcaaaagcgctgcagatgccctcatcgaacgtgagccgacagatttcgcagcttgaggagagccttcagctgcgcctgatacagcgcagtacccggcacatgaagctgacccctgccggtcagacgctgctcgccagtatgcgcccggtgctggagcaacttgccgctacggaagctgaactgacgcagcagcaggccgaacccgaagggccgctacgcctgtgtcttccgaacgaaattggcccctag

SEQ ID NO: 183526 - DNA, 906 bp, Klebsiella oxytoca
atggatattaaacagcttaagtacctgattgcgctcgacagaacacgacatttcggccaggccgcggcggcctgccatatcacccagcccacgctatcgatgcgtatccgcaatcttgaagaagaacttaatctgacgctgattcagcgcgggcagcggtttgaagggtttaccccagagggcgagcgtattctggcctgggcgcgagcgctgctggcggcgcacgacgggctggaggcggaggcggctatctgtcgcgggcagatggtcggccagctaagagtcgggatggtgcctttagccagcctgaatccgatgcagctgattaagccgctggcggataaatacccggagctgcagttcagtctgctgtccatgacctcggaacagattatcgacggcgttagccgcaaccagctggatctggggatctgctatctgcaccacgtcgatagccaactgttcaacgtggtctggctgccgaatacccgcatggggctgctgcacgataggcgtcattatcagtttgccgacgcgacgcctgagtgggataccctggccgcgctgccgctgggctttctgaccaagggcatgtactaccgtgaatcgattgagatgagctttaaggccaaggggctggcgccaaaatacgtttttgaaagcgactccacgtttcagatcatccaggcggtgcaggccgggatctgctgcgcgattatgccgctgaacaacggcctcgaagcgctaagcgataatctggaaatcaggccgatccccgagacggaggtcgactcgatgctggcgctgatcatgcgcaacaaagagccggtgtcgtcgctggcggaaaaatgcttcgccgatgcgcaggtgatttttagcgaacgccagtcggctgacggcgcttag

SEQ ID NO: 183527 - DNA, 981 bp, Klebsiella oxytoca
atggcgctgttctccagccgcttttcgttaaaatcggtgatgctgttcctcgtggcgctgtgcgtgatcggcaatgccatctttacgctatcttccagctattcgatgctggcgctggggcgcctgatctccggtttcccgcacggcgccttctttggcgtgggggcgatcgttctgtcgaaaattgcgccgccggggaaggtcaccgccgcggtggcgggaatgattgccggaatgacggtcgcaaatttgctgggggttcccgccggaacctggcttggccatcagtttagctggcgctatacctttctggcgattgcggtgtttgacatcgccgtgctggtcgccatcgcctggtgggtgcccacgctgtttgataaaccgacgacgcgcttacactcgcagtttcattttttaacatcgcccgcaccgtggttaatttttgccgcgacgatgttcggcaatgccggcgtattcgcgtggtttagctatattaagccgtttatgattaacgtctccggttttggtgagagcgccatcatagccattatgctgctggcggggctggggatggttctggggaatttattcagcggtaaagtctccgtccgttatagcccgttacgtattgccgccgtgacgaatggcgtgattgtcgtgactttattacttctgttcctcgtgggtgagaataaagccgccgcattaaccctcgcgtttatttgctgcgcggccctgtttgccctgtcggcaccgctgcaaattctgctgctgcaaaatgcgaagggcggcgagatgctgggcgcggcgggtggccagatcgcctttaatctcggcagcgccattggggcgctattcggcgggatgatgattacggccggtcctggctggcgtttcgttgccttaccggccgcgctgctttcgtttcttgcgctcagttcgctgctgatttatgcccaccatcagcggcgtctggcctga

SEQ ID NO: 183528 - DNA, 384 bp, Klebsiella oxytoca
atggacgataaacagcggtatcagcggggaatggaggtccggcggaaggtgctcggcgatgctcacgtcgataagacgctggaaaagctgacgccgctgaatgaagagttccaggattttattacccgctacgcctggggagagacctggacccggccggggctcgatcatcatacccgcagcatgatcaccatcgccatgctgattgcgctgaaccgcgaagcagagctgaaaatgcatctgcgcgcggcgtttaataacggcgtcacccgcgatgagctgaaagagctgattatgcactccgcgctctactgcggcctgcccgccgccaacgccacgatgcatctggcgcagcaggtatttgaagagatggatgccgtttag

SEQ ID NO: 183529 - DNA, 177 bp, Klebsiella oxytoca
atgcatgttaaaaatggtttcagatttgttattggttatatccactatgtgaacgaattatatttaattaataatacaaaggaggtatcgatgttattgttggtattaaatagttttttaattaacgtaattattttggtaactaaaaaaaagcgctatattattggcatgacttaa

SEQ ID NO: 183530 - DNA, 924 bp, Klebsiella oxytoca
atgcgcggaagtgattttgctgaattaaaagccttcgcgatggtcgttgagcaaggcagttttacccgggcggcggcgcatctcggcgtcacgacctccaccttaagcgcaaccatccgtcgtctcgaggagcgcatcggcgtacgtttattgcaccggacaacgcgcagcgtcgcgccgagcgaggccggcaagcgcatgatgcagcggctggctcctgcgctggcggcgctggaagacgcggttaccgatgcccggacggccagcgcgcccgcgggccgcctgcgcctcaatgtgtcgcgcatcgccgcgattcattatctggcgccgctgctgggcggatttatgcaacgctatcccaacgttgagctggatattgttaccgacgatgctttagtcgatatcgtttcttccggttttgacgccggaattcgtctcggtgaaaagctccatcaggatatggttgccgtcaggctgagcggcgaccttgaaatgaaagtcgtcgcctctccgcactatctggcgcaagcgccgcagccgagaaagccgcaggatttgctacagcacccctgtctgacttatcgcaggcccagcgacggcagcgtttatcgttgggagtttcagcgcgacggcgaacgctacgagattgcggtcaaagggccgatcgtcgtcgatgaaccggccatgctgacgccgttagccctcaagggcaccggtattgcctatcagtttgcccatcaggtcgatccctggctggagacaggccagctagtccagctattgaaagagtggaccccggcttttcccgggttttacgtttactaccccagccgtaagcagatggcatcgccgctgcgggcgtttattgactatctgctggccgtcggcggcaaatcgcgtccgccagaattgccgtctggctga

SEQ ID NO: 183531 - DNA, 681 bp, Klebsiella oxytoca
atggatcaatcgctggcgtcaggcgcgcctgcagcggctgctgcgcaaatagccctctgcgcgcttctcccgggggcggcgcaaagcgccttgcccgggctacaggtccatcgccgtctgcgagcggtagcgtggacagatgcgcagcatcgcctccgggaaaccatatctagtgcggactatggcgctctccccgggggcggcgcaaagcgccttgcccggctacgggtccatcgccgtctgcgagcggtagcccggacagatgcgcagcatcgcctccgggaaaccatatctagtgcggactatggcgctctccccgggggcggcgcaaagcgccttgcccgggctacgggttcatcgccgtctgcgagcggtagcccggacagatgcgcagcatcgcctccgggagccatatccaatgcggcctgtggcgatctccccgggggcggcgcaaagcgccttgcccgggctacgggttcatcgccgtctgcgagcggtagcccggacagatgcgcagcatcgcctccgggagccatatccaatgcggcctgtggcgatctccccgggggcggcgcaaagcgccttgcccgggctacgggtccatcgccgtgtgcgagcggtagcccggacagatgcgcagcatcgcctccgggaaatcatatccaatgcgccctgtggtga

SEQ ID NO: 183532 - DNA, 1209 bp, Klebsiella oxytoca
atggcgcggactacacgccccctcaccaacactgaagtacaaaaaaccagagcactcgagaaagaccttacgctgcatgacggagacgggctctttcttctagtaaaagctaatggcaaaaagcaatggcgcttccgttatcagcgaccagcaacgaaacagcgtaccatgatggggctaggcccctacccagccctgtcacttgccgacgctcgagcaattcgtgcagattacctttccatgttggctacgggcgttgatccgcaaaccaaggccgagcaagcagcagaacagcaccaaatcgctttagacagcattttcttaaccgtcgcggccaattggtatgcccttaagcgaacaagcgtaaccgaggattatgcgaaagatatctggcgttctttggataaagatatttttccaagcatcggaggcatcccagttcaggaaatcaaagctcgaacactgattgaagcattagaaccaattaaagcgcgcggtgcgttggaaaccgttcgccgtttgatacaacgcatcaacgaaattatgacatttgcggttaatactggtctgattgatgcaaacccggcattgggaatcggcatggcctttgaaaggcctaaaaagcaaaacatgccgacgctacgaccagaagagctaccaaaattgatgcgttcactggtaatgtcaaatctgtctgtttcgactcgttgcctgattgaatggcaactcttgactcttgttcgcccttctgaagcttcgggtgcccgatgggcagagatcaatctcaactcaaaactctggacgattccagccgaacggatgaaggcaaaacgggagcacattgtccctttatcacctcaggcattagatattttggaggtaatgaaacctatcagtgctcatcgtgaacatgtttttccaagtgggaatgatccaaagcaaccgatgaatagtcaaacagctaatgcagcattaaagcgcattggttatggtggaaagctggttgctcatgggttaaggtcaatagcgagcacagctctgaatgaggcaggatttaactcagatgttgttgagtcatcccttgctcatacggataaaaatgaagttaggagagcttacaatagagcaacatacttagaaaaaagaatcgaacttatggcttggtggggtttaaaagtttactctactacaactatcattaaggaataa

SEQ ID NO: 183533 - DNA, 492 bp, Klebsiella oxytoca
atgagcttagaagacgaagtaaacgaatcgaagaaacagatcatttccgatggatatgatatgtctgttggtgaaataatgaatctttacagagacaatgaattaattatatctccagactatcaaagactatttcgctgggaactttcgcaaaaaacccgatttattgaatcgttattattaggcattcctatcccccctattttcgttcatcaggatgaagatggcgtatgggagcttattgatggcttacaacgtgtctctactatattagaattttcagggttgctgcgagatagcgtagataaatcactccttcctagctctacattaagtggaacacaattcctcccaagcctttccaataagaaatggaatgatccagataatgctgataatgaaataggtaaaccccttcaacttgaaataaaaagagccaggttgagagttgaaattttaaggaaaggtagcgatccatatgcaaaatattaa

SEQ ID NO: 183534 - DNA, 546 bp, Klebsiella oxytoca
atgcttaatcctgaattatataaatggcttaagagatgctccgagtttcctgcctttgtaagcactgtaaatcaaacacaagaagccatcgagcggcaagcaaatatggaactcgcattaaaattcttcgcatataagcacttcccttatacgcctggaatggatgtccatgaacacttagattctgcattagttgaaatgtgcaagtctcaaattgatcttgtagcagaagagcatattttccaaaacatattcacacttcttcatgatgttttagaggaaagagcctttaaaaaatgggacgggcaatcatttaaagggaaatttttaatttctctattcgaaactataacaaatggccttcaaactaattatgatgccataatgtcaatgcagcccaatgcgacaagaaatgacttcatcactcaaaagattaaagatctttggcaaacacatgaatttactaacaactctggtgcaggtgtaagaggtacaactaggttaaccaatctattgcctttcgcatcagaatactttaggccgtaa

SEQ ID NO: 183535 - DNA, 660 bp, Klebsiella oxytoca
atgagcaaaattagaactcttgagggcttccaggattatgttgatacagagatggcttggcgaatcaaggagatagctcatcttacagcttctattgaccgtagcttatcattagctcaaagaacaataattagagcctcgatcccactattgtatgctcattgggagggttttgttaaaaatacagccagtaagtacatcgagtatatctccaacctcagacttaattactctgaactagaagagtgtttaatagtattaggtatgcgtaaaaaactttttgaaatagccagtactaataagcatgacattatttccgaatctttaaagttcatactctccggacaaaaagaaagagccatccttaactttgaatcagcaatacaaacggaatccaatctaaagtcacatgtctttgataacattgcaaaaagtattggagtatccgttcatcacttcaatacaaaatacaattttattgatgaaagtctcttaaagagaagaaattgcatagcacatggtgaatacttagacatagatgctaacgaatggcgaaatttatcacaagagactctaactcttatgcgaacttttaaaaatgaggtacttaataacgcttccactaaaaaatatttaaaaccagcacagctcaatcaataa

SEQ ID NO: 183536 - DNA, 804 bp, Klebsiella oxytoca
atgtgtcgggtccttaaggttgcccgtgccggattttatgtctggctccataaccctgtatccgccggagaaaaggataaccagcgactgctggaactcatccgcgactcctatacgctgagtggtggagtttacggttatcgcagggttcatggcgaccgtcgcgaaattggcgaagtgtgcagcagaaaccgggttgccaaaatcatgaggaaaaacaggatccaggctatacatggttataaagtgccacgcggaacccgaggacgaccgtcactgatagcgcccaatcgcgtgcggcgtgaatttactgtagtgaagcccaatcaggtgtgggtcaccgacatcacctacatccgcacctggcagggctggctgtacctggcagtggttatcgatctttttgcccgtaatgtggtgggctggtcgatgaagccaatactgtcacgcgagctggcactggatgcgctgctgatggcggtctggcgacgtaaacctgaagaaaacgtcattgtgcacagcgatcagggcagtcagtatggcagtgatgactggcagcggttctgccgggccaataatctggtaccgagcatgagccgtcgtggcaactgctgggataatgcagtggcagagtcgttcttcagttcactcaaaaaagagcgcatcaggaagcggatatataaaacccgggacatggcccgggcggatattttcgattacattgaagtgttctacaaccgtaaccgccgccacagccacctcggtggcgtcagcccggaggccttcgaaaaggcctcgccgtga

SEQ ID NO: 183537 - DNA, 204 bp, Klebsiella oxytoca
atgggtcgcaagacacgtaagaagtaccggactagcgttcagcaaacgttttgtgcgaaagaccattccagaggttttttcaagggtgtagccaagtatctgctcggtctactcatccgcgagatcatctcggaggtttttcattctgaaggagttgcttccgtctggtcatccatcaaggatttattccaatggaggccgtaa

SEQ ID NO: 183538 - DNA, 960 bp, Klebsiella oxytoca
atgataagcacaaaacgttcctctagtcttcatagttctcccaagctttaccctttgaaccaatcccctctttttaagctaaaaacaaaaagaaaattattagaaatcatagggctatcgaaaaaacaagcagataaactcatgcttgactctgcgtacaaacaattcgaaaacgatgcaggaaggacaatccaggagccaatcccccagctaaaagcagtgcataaacggattggtacattattgagtagaattgaattacccgcctatttgcattccggtcggaaaaagcattcaactctgacaaatgcagagtctcacaggcatgccactgagcttctaaagcttgatattcacaagtttttcccctcaactaaggcagcgaaagtctacaaagcatttactgaaaaatttgagatgtcgcctgatgtggcttacgtgatgactaatctcgtaacttttgctggaaaagtgcccacgggtagcccaataagcatggcaatggctttttgggctaatagagacatgtttgatactctgagcgaactggctgcctcaaatgacctagtatttacagcatatgtcgacgatgtagcattctccgggtcgaaaataccaaaaggatttgctgcccaagctaaaaaatgcattacctctcatggccttacctctaaagacaaaaaagagcgattttacccatcatcagagggaaaactccttacaggaatagtgattcaggatggagaactaaaggttcgctgggcacacaatgattcaattcgtaaagaatttgctgacttggctaaagtaaaggataactccgcaaaaattattcatttagagaagcttgcaggtaaattgcacgcagccggtcaagttgatttccgacaaaaagataaagcccgttttttcacacagcaactcaaagtagccaagaagcaatcaacagagagcagctag

SEQ ID NO: 183539 - DNA, 156 bp, Klebsiella oxytoca
atgaacacactacgtcagccgtacaatgaactgagcccggaagtctataacgccctggttcaggccaaaattgcgctggaaaaaagcgagctggatagcgcgctgatcgagctagtgtatttgcgggtatcgcaaatcaacggctgcgccttctga

SEQ ID NO: 183540 - DNA, 2205 bp, Klebsiella oxytoca
atggcgcgtcttaaaactgctcagccaaatcactcgctgcgtaaaatcgcagttgtagtagccacggcggttagcggcatgtctgtttatgcacaggcggcagttgaaccgaaagaagaaaccattaccgtcaccgccgctccggccccgcaggagagcgcctggggaccggcagcgaccatcgcggcgaaacattcggctaccgcaacaaaaaccgatacccccatcgaaaaaacgccgcagtctatttccgtggtgacccgtcaggaaatggagatgaagcagccgacgacggtgaaagaagcgctggcctatacgccgggcgtattctcgactcgcggcagctcaaccacctatgatgtggtgacgattcgtggtttcaccacgtcgacaacggtgaataccaaccagtatctggatgggatgaagctgcagggtaataactattccgaagtatcgatggacccttatttcctcgaacgtgttgaggtgatgcgcgggccaacgtcggtgctgtacggcaacagcaaccctggcggtatcgtcagcatggtcagcaagcgtccgaccactgagccgctgaaagaaatccagtttaaaatgggcaccgataatctgtggcagacgggatttgatttcagcgacgccattgatgatgacggcgtgtggtcttatcgtctgaccggtttgggccgcagccaggacgcccagcagcaaatggcgaagtctacccgttacgcggtcgccccctcctttagctggcgtccggatgacaaaacggacttcactttcctgagtaatttccagagcgatccgtatgccggatattacggctggctgccgcgtgaagggacggtggtgccgtattacgacgccaacggtaaggcgcataagctgccgacggactttaacgaaggcgaggcggataataagatgtcccgccgtcagcagatggtgggctacagcttctcgcatcagtttgatgatactttcaccgtacgtcagaacctgcgttatgccaacgtccataccctctatcgttcggtctacggcaacggatatacgccgacaggcaaaatcaaccgtgcgtatgttcgctctgatgagaaccttaatacgtttaccgttgatactcagctgcagtctgatttcgctaccggcgcggtagggcacactctgttaaccggcgtggattattcgcgcatgcgcaatgatgtgaacgccgattacgggacggcttccgcgcttgacatgcagaatccgcagtacggcaatgcaaacgttagcgttaacttcccctattcagtgctgaaccgtatggagcagaccggtctctatgcccaggatcagatggcgtgggataagtgggtgatgacgctggggggccgctacgactatgcaatggcttcaaccctgacgcgccctgcgaataccctcgccaaaaatcacgatcagcagttcacctggcgcggcggtattaactatctgtttgataatggtatctcgccatacttcagctacagccagtcttttgagccggtttccggatcgtcgcgggatggtaaacccttcgatgcttcccacggcgaacagtatgaagccggggtgaagtacgtaccgaaggatatgccggtcgtgctgaccgccgcggtatatcagctgaccaaagataaaaacctgacggcggatccgaacaacgcctcgttcagcatccagacgggcgaaatccgctctcgcgggattgagctggaggcgaaggcggcggttaacgccaacgtcaacgtgacggcttcctatacctataccgacgcccaataccagcatgacaccacctttaacggcaagcgtccggcggaagtgccgcgcaacatggcgtcgctgtgggccgactacaccttccacgaaaccgcgctgagcggcctgacggtgggtgccggggcgcgctatgtcggttcaacggtaagctattacaaaaacgatacttcgacggggaaaaaagatgacgccttcaacgtcgcgggctacgcgttaatggatgccaccgtgaaatatgatttagcgcgctttggtctgccgggttcgtcgatcggggtcaacgtcaacaacctgttcgatcgcgaatacgtttccagctgctatagcgagtacgcatgctactggggcgctgagcgccaggttgtggcgaccgcgactttccgtttctaa

SEQ ID NO: 183541 - DNA, 711 bp, Klebsiella oxytoca
gtggtgcgtgaggactgtgagcactgcccggggccaaactggcaaataaaatcgcctaatgggatagactctaagtgggaactgacgatgcttgtctattggctggatatcattggcaccgccgtgtttgccatctccggcgtcctgctggctggaaagctgcgcatggaccctttcggcgtgctggtattaggcgtggtgaccgcggtgggcggtggcaccattcgcgatatggcccttgctaacggcccggtattttgggttaaagaccctaccgatctggtggtggcgatggtcaccagtatgttcactatcctgctggtacgccagccgcgccggttaccgaaatgggtgctgccggtgctggacgccgtcggtctggcggtatttgtcggtattggcgtcaacaaagcctttcttgcccatagcggaccgctggtggccgtctgcatgggcgtcgtcaccggcgtcggcgggggaatcatccgcgacgtgctggcgcgtgaaatcccgatgattctgcgtacggaaatctacgcgacggcctgcatcgttggtggcatcgtgcatgcgacggcgtactacacctttcaggttccgttagaaaacgcggcgatgataggtatggtggtcacgctggtcatcaggctggcggccatccgctggcacctgaagctgccaacgttcgcgcttgatgagaatggacggtaa

SEQ ID NO: 183542 - DNA, 1155 bp, Klebsiella oxytoca
atggttgaacaaaaaagtaatgcgcaaattttaaatggcgttaacgacgatatttcagaaatgaaatcattggccacattgcgtaaacgtgtggtgacagatggtgaagtcgtttctaaatctcagaacgcgttccgcctggctggtagcaaaacgggagtcatactgcgcaatgacgggaatgattttcacgccctggtaacctctgaggggcaggcgcaagacgggcaatggaatacccttcgcccattatcctttaacctcaaaactggccgcgttgctcttcgtaatggtgtggatatttcaggcggggccatggtttctcacaatgcgggagtttttaccacattgaccgggccagatgcgcttattaacggtcaaacctatgactctgcccctatgtataccgatttcaagactggtagcgtcgttacaagaatgcttatgggggctcgggttaacgccggtcatgatgattacggcttactttcataccgtgactggcatggaaagtggaatgagcttcgtgtccgtcctaacaatgaacttgatgcaggtcagtatgttaaacgcaatccagacggatggtttgtcgcgaaaggttatcgccaggcagataacaacgcagccagaataacgaacggtttatgcattcagggggcaggagatttatccgcagacctctatcactctgaacgtattggccagcatcatttcttcggcctacatgtggccaacggtggcgcgcagggctggtatgagttccgtaatgatggtcatgcctatactaatggcgcctggcacagcagttctgacgcacgcatgaaaacccaggttgaaaaaatcgataatgcatttgaaaaactgaatcgcatcagtggttacacctacctgaagcagggagttagcgaagctggcgttatcgcacaagaagtggaggctgttctacctcaaaccgtctctcggactgaagtgattttaaacgatggccgtgtgctgaaggatgccctcagcataaatatcaatggtgtagtggccctgcttgttgaagcgcttaaagaagaacgtcaggcgttgattcaggagcaggaagccagacagtcatttgaacgacgtctggcagcgcttgaagaacgtgtaggccgggagggctga

SEQ ID NO: 183543 - DNA, 135 bp, Klebsiella oxytoca
atggatgaatatgataataatgatgcgccgccggtgacaaagagtttccgtctgtctgctgaagaaaacgggacgggccttcgggttacctcctcggtgaaaaaaccgattaaggctgaacactatgacaactga

SEQ ID NO: 183544 - DNA, 1998 bp, Klebsiella oxytoca
atgacaactgaattgaatggtccggggcctattgccggggaatataaaggtggtagtagcgataatcttaatgaacagagtgacaattcgactccggggggcagcaataacggcaattccggtaatcatgacccgaatacggccccattatccgctgcagataaacagattgctgccgtaaaaagcgacccaaaagtacgccagagactggcggatttaattaaaggggcaaaagcaattaatccgaacgcgcacctttttaccagtgagctttcgcaaagcggtatgctgactatcggaatcgatggtttaacagttgatcaaactttcgcacttggtctgcgcggaattatcaccatcactggcactgatggccctcattcctttggcagttttgacaccggacataaaatcggggatttcgatagcaggccgagcggcaataatggcagtgcagaaaatctggctgaaaacaagacgtcacttgaagcttacgcctctgtcatgcagggggagatccccacaggattctgggttgataatgaaaaaatcatgactgaagttattgtgatattcgaaattaatggtggaggaaaaggaaacgaccgtacgggttccagaaaggaaaaagtagaagttaagtctctgactgaagcatttaaaacatggaagagaatcaaagacgagattgcagacgaggcccgtaaagcagaggaggctcataaagcagaggaagctcgtaaggccctttttgacaaagttggaattcaggacacgcctgtttacacaccggaaatggtgaaatatgcaaatgctcaactggcggcagccgtagcaacggtccttaacagagcgccgtccgggatacagttgtccggtgtaggtaagggagttgttactgcgctcagcgagtgggcgggttcgatagcaggcgcactatggcggggagctgtcgcggtggctgaaatcgccactgccagtaccgctggtcccatggtagctgcggcatcgacaatatttttctcaccacccgcaggaggcggtaatgatagtaaagttcctggacgtgatattgatatgatggctgcccaggcccgcttgtttacggccggtaaggtgaatatcgaaccagggatgaatatggttgacctgccggtacgcggatttattaccacggaggataacggacgacagtcagtgatgctggtgaaaaccggtttcggcagcgtgtcagccacggtacctgtactgaatggcgtgcgtgacaagaccacagggcttgataaaatcactgtaccagccgtggcgggcgccccgtcgcggaccattctggtaaatcctgtgccggtcgggcccgctgccccgcctcacaccggtaacagtacgccggcaccggtgacccctgtacatactggcacggaggttaagcaggccgacagtatcgtcacgaccacgttcccggccgcagacctcccgccactgcaggatttcatttactggcagcctgatgtaacggggacgggcgttgagcagatctatgttatgctgaacgggccttatggcgagaccaatgctaaagggaaatacagtaatcgtccgtacaacaccgaaaaggcaggcggtccggttcagaatctggactggaaggcggcaatcattgaccgtgcaggcattgataaggtgaaactacatacaggtcgttttgctgaatcagatgccaataaagtgatgattgacaggctagaaaaaattctaaaaggtgagctacaggctactgataccgataagagatactacactcatgaggtcagagaactggagcgctacagacagcttggcgttaaagatagcgctctcccagcgaatgaagctgaggtatggaataatactcatacagccactctggaggactataaattaggtaatagcgaaactcttttatatacaccagaagcgctgaaagcagcagaagaacaagagttaagggggttaaagtga

SEQ ID NO: 183545 - DNA, 273 bp, Klebsiella oxytoca
gtgattgattttgaacgtatagtagcagagcagacgctcgaggatattattctctacttaacaaggaatgagaatggctttggttatcctcaaatggatcgttttttcagtcgttataagttttcagtaatagaaagtggggagtttatgaggacctttgaacagatgcgtcaaaaaggcgtggtcgtatggggcgaaaaaatgcttgtcaaaaaaggtcccaattggcaagagccaaaattcgtcactgaaaagaaatacggtattcaataa

SEQ ID NO: 183546 - DNA, 366 bp, Klebsiella oxytoca
atgaaatttctacctgcaagaaacatgcgggcggcgaagccatgtctttcgcccgttcccgtctggcaaatgctacttaaacacctgctggagcaacactatggtttgaccctgaacgatacgccgttctgtgatgaaactgttatacaggaacatatcgatgccggtatcactctggttaatttcgttaactttttggtggagaaatatgagttggttcggatcgatcgcaaaggttttacctcacaggagcaagcatcatatttgaccgtgaaagacatacttcatgccataagagcttgcggactgatgactcgtttttcttaccgggaagtaagtaatatagttcttagccgatcgcggtag

SEQ ID NO: 183547 - DNA, 357 bp, Klebsiella oxytoca
atgaacaatcactcagaatccggtaccaaaccggagaatattacctgccaacagtggggactaaagcgcacgatcacaccctgttttggcgctcgtctggtacatgaaggcaaccgcctgcattttcttgctgaccgggccgggtttaacggtgctttccgcgacaaggatgcgttgcgcctggaccaggcttttcccctgatactcaaacaattggaactaatgctgaccagcggcgagctcaatccgcagtataagcactgcgtcacgctatatcataatgggctcacttgcgaagctgacacacttggtagttgcggctacgtatacatcgccgtttacccaactcaacgctaa

SEQ ID NO: 183548 - DNA, 222 bp, Klebsiella oxytoca
atgaaaatcatcagtaaacgccaggcaatggctttgtaccgacagcatccaggctcccggctgtttcgcttctgtaccggcaaatataaatggtccggcagtatctgccattatgctggccgggaagttcaggacatacgcggtgttttggcagtgtttgctgagcgccgtcaggatcgcaatggtccctatgtcattcttcgaagtgtcactctcaattaa

SEQ ID NO: 183549 - DNA, 429 bp, Klebsiella oxytoca
atgaaagctcgtttaataccaccgtacgaaaactacactggcaatgttttatggcgaaaagaggattttattaataaagtcgacgatatctcaacatctctaaaaaagttaagagatatgggatattgggccagtgcctatcctgaaggagatggcattacatttaaatacaccaaggatagttatcaaaaaagcagtatcgaaattctagaagacttctcaatatgctttgagtgggtagaaatagagttagctaaatcaagaagctctaacctagaattagctgaattagagggtaaaaacaaaaatatggagtgcatagttattgtgccgattgagaagattttcattcaggaaaccatcgagatcggaaagtatattttttattgcggaagacaatttgatgaagagtcacataagcgattataa

SEQ ID NO: 183550 - DNA, 771 bp, Klebsiella oxytoca
atgtgtttgtctatagctgaatatgcgcttgatttagtcagattttctcacagctcatttacacgtatggaatatacccctaatcctgcaggtcaacgctctgacggattttatgatatagaaatcattcctcgtgagatgactcatcttaaaccaattaagataagtggaatatcaagaccccttgccgtgagtaataattggctaggccctcaggttgacagcttgtattaccctgggttgcaatatttatcttctatctacgatggaatcgttgaaaatgaactttcaaaattagttagctccgtagttagggcatgtaggcaatctttttattcaattggcgcggaatcacaatttctaaacctagtctttgcacttgatggtcttgctaatattgacccaaactggaaaggatggaagcaaaggacctacattgcagcacttacatgtaataactcactaatcaaatttaagaaaaacctagaagtttatgacgagttatatactgacgtaagaaacaagcttgttcatgatggtaaagatttttacgaacttaacgtcaacgcgaacgaatcctatgaacaaatctttaagtatattaagataattataatactcatcgaaagtaacggcttttccactttgcaagaattaagagattatgcagttcacctacttcagcaggagggttatagaactgcttctgttgagataattgacaaagtatctcttttaagaggaaaaaaacctaattatccttcatggtga

SEQ ID NO: 183551 - DNA, 219 bp, Klebsiella oxytoca
atgaaatttcaaatcacaagagcaattggccttagtaagttctctccacgttgggttaaggttatctgcttacggttaattaaaaatgatattgaacgctctctcaacgttcttctggtcaaaatcgatgaatctgaactctctacggagcaactaaaagcgtttagggaatgcgttgaaagaattaacctggcacgggctaagggaatgcaggcgtga

SEQ ID NO: 183552 - DNA, 699 bp, Klebsiella oxytoca
atggaacaatttcctgccctgaacaccgaatgctttgatctacacatcgctgaacgcctgcacctgcaggagccgccacggattctaatcctgtatggctcagtaagagagcgttcgtacagccgcttttccgaggaagaagctggtcgcctgctcacggcgatgggcgcggaggtaaaactctttaacccctccggtttacccctgccggatgatgctccggacacgcatcctaaagtcaccgagctacgcggtctggtcagatggtgtgacgggatggtgtggagttctccggaacggcacggggctatgagcgcagttatgaaggcgcagatcgactggatacccttaagtgaaggcgcggttcgtccttcacagggcaaaacacttgcagtgatgcaggtctgcggtggttcgcagtcctttaatgcggtgaaccaaatgcgcattctgggccgatggatgaggatgttcactatccccaaccagtcatccattgctaaggcatggcaagagttcgacgaaaacggccgaatgaaaccttcgtcatggtatgaccgtatcgtcgatgtagccgaggagctgtttaaaatcactgtgctgcttaagggacaaactggttatcttgcagatcgttacagcgagaaaaaagagagctatcaggagctttcatcccgtgtcaatcaggacaaaatttaa

SEQ ID NO: 183553 - DNA, 129 bp, Klebsiella oxytoca
atgacacagcacaagtggtttaatcaggcctgcggaatggcgatgtattcaaccgatgcacaaagtgctagtgataaatattgtgcgtactgcagcgacagaaacggcaatcttaaacactggtcatag

SEQ ID NO: 183554 - DNA, 810 bp, Klebsiella oxytoca
atgtatcaaatagggctgttttcaaagatctgccgtgtgacgataaaaacgcttcattactataatgaaattggtttactcgtccctgcctatattaaccctgagaatggttatcgattttatacttctgaccaattaatgaaattccatcagattgcgagtttacgtcagcttggatttacaataactgaaatagttactcttactcaggatgaaaattcctgccacataattgaacggcgacgccttgaagtacagaaacaaattcgggacatgaacgatatgctctcccggattaaccactatctgcaacataaaaaaaaggaaagaattatgttatatcaagctgttttgaaagagatcccggaatgtattgtttattccaagcgtttcattgttcctgatttttcctcttatatcaaattaattccgcctataggacgagaggttatgaaggcaaatccaggtttaaccttaactaccccggcttattgtttcactctttatcatgataaagagtataaagagaaaaacatggatgtggagttctgcgaagctgttaatgattttggtaaaaatgaaggaaatattattttccaggtaatccctgccataacagctgtaactgtaatacacaagggaccatatgattcattaagaaatgcttacatttaccttatgcaatgggttgaagacaatggttacttgttaacaaattcaccaagggaaagctacatcgacggcatctggaacaaacaagactccgcagagtggatgactgaaatacagttccctgtagagaaagtttaa

SEQ ID NO: 183555 - DNA, 150 bp, Klebsiella oxytoca
atgccactcaataaaatgaagcgtcatgccatactccacacgctctctatacctgaacgtaaactacgccccgtaaaatggcttgctcttatctcatacctgctcgttatattacaactggcaattgagagcctggtcataagcgaataa

SEQ ID NO: 183556 - DNA, 435 bp, Klebsiella oxytoca
atggataactatacgctgcatcgtggcagacttatcgaccatatccagctcgtggtaaacgactttgccgcaagcaaagcgttttacactgctgttctggcggaacttaagatccccatggttattaccgatgacgattatatctgggctgacgaactggtcatttcgtcagtaaaaagttcggagtctggcggggggcctacaggacggcaccatctggcctttcaggccgcagaccgtgaatcggtgaacgcgttttaccacgcagcactaaatcatggcggacgtgataacggcgcacctgccgaacgaacctatcatcccggatactatgccgcttttgttctggatccggacggtaacaacatcgaagctgtttaccatggtgagggcgatcgcagtgcccgctctgtagaaatcagcttcactgtctga

SEQ ID NO: 183557 - DNA, 819 bp, Klebsiella oxytoca
atgaccgttattccggtatcagcccttgaatgcagcattactgagctgtgccgtattcttgcagacagctttaatgaatcattgacaccgtttgcgttgccaccggaaatgtttgcctcacgtttcatttccgaaggactcagccttgaagactcgtttgtctggctggtcaatgataacccggcggcaatagccatcgtaacccgcagaatggacaaagcgcgtctggcagcatttggtgtgttgcccgagtaccggagccagggactggcaaaacagatgcttactcctctgtttacctccttaaaagagaaaaagttatccagagtgaggctggaagtgatgcgcgaaaatacccgggccatcgctctctatcacgcgctcggttttcaggttcgccgacatctgtgcaaataccggggagatccacagtctcgtctggaaataccttcaggggatatggaatccaagtctgctgatgacttcctgcgtaccgtctggtctgcaccagatgatgatcttccctggctgaccagccccctgcagctcttgtctattccctgcgacatcctcagggataacgaacatgcatggtgtgctgttgcggagttcatgggacaacctcagctccgctgtttgtttgtggaaccggtgtatcgttaccagggacgggctaaaagaatgcttcagaaaatcaatgccagatggcctggtataggtacatcagccgcgctcccagaaacgctggcaccattatttactgcggcgggttatcaggctgaaccgttatgccagtttgaaatggaactgacattttaa

SEQ ID NO: 183558 - DNA, 573 bp, Klebsiella oxytoca
atgagttgcaagtttgaatggatcaatgagcccgccgtatggtgctacgaaaataacgccctgtcggtaatcacagatgagcatactgatttctggtaccgtacctggtacgggtttgagcgttttaccggccacatctacgctactgatgtaacaggtgattttacttttcaggtcaggatccgcgcaaacttcaccacactctatgaccaggccggaattataatgctcgctgacgaacagcactggctcaaagctggcatcgaatttaacgatggagcacctgcaatcgggagtgtactcacgatgagaaattccgactgggctacaggactctttcctggggatccgaaggaattctggctgcgtctgacccataaaaaagatgcgttacgactgcagtactcctcagatggacagcactggccattacttcgcttatgccatttccctacgggccctgtaaaaacgggcatcatgtgttgtacacctcagcgcaaggggttggaggtagaatttcttgatctcagactgactcctgcgatggataaggaactgcacgatctaagttga

SEQ ID NO: 183559 - DNA, 1257 bp, Klebsiella oxytoca
atgaagccattttcggggcgccttggcaggtatggcagcgtgctattatttccactggcgatgatcatctacgatttttcagcctacctgacaacagaccttattcagccgggcgtcattaacattataaatgagttacaggcggatgttacgctggctccagcatcagtcagtttgtatatggcaggcggactggcgctacagtggctcctggggccactctccgacaagattggccgccgcccggtcctgctcacgggtgcaatgatctttgccttagcctgcctgagcatgctgtttgtcacctcgatcgaacaatacttcgtcgcccgctttattcagggcaccagcatctgttttatctccaccgttggttatgtatcaatacaggaggcctttgatgaaaaagattccatcaggatcatggctgcgctgacctccattgttctgctcgccccagttatcgggccggtggccggcgctgctctgatggcgttcattcactggaaactgctctttgccatcatcggtgtgtttggtctggtagcatggttcttactactgttcaaaatgccggagacagttatatctcagggaagatcattcaaaccgggtgaagtgctgtcagatttcatcgcggcatttcgccatccagtggtgctgaccggctcactggcagtcgcttttggtaacctgcccatcatcacctggggggcgctctcccccgtgatcctgattgagcacggggggatgtctcccggtacctatgcctggacacaggtgcccgtgtttagtgggatcattatcgccagtgcgatcgtagcgaattttatcaaagacccgacttcaccgcgttttatctggggtactgttccgatacagcttgctggcttgctggctttgctggtcggcaacctgctatggccacacgtctggctatggtcagtactgggaacgagcttttatgccctgggtattggactgctctatccggtgctgtttcgctttacgctcttttctcataacctgccaaaaggcaccgtttctgccacgctgaatattctggcgctcggcataattgcccttagcattgaaataacccgctgggtttacttccatgctggcggcaggattgctttccactgcgtggcgctgctggccggtatagccgtcatcatatcagttgcccgcctgcttaaactgcgtgggcagcatcagagccagtcagtatcaccggtaggctgccaggagcaataa

SEQ ID NO: 183560 - DNA, 1962 bp, Klebsiella oxytoca
atgaaaattaagtcgattcatgtctacagccatgatggccaacgtcgggacctgcactttaaggttaatggtttaaatgtcattactggccgttcctcaaccggtaaatcagctctttctgagatcattgaatactgcatgggtcgatctacctttaacgtaccagaaggtattattcgcgataaagtgtcatggttcgcagtcatttatcaattttcacaggaacagatacttattgcgaaaccaacaccaaatgcaggagccacaagctgtggcactgttatgctgcgacgaggaaatgaactgaccgcaccgaatttcaaagacctctcggttaacaccgatgatgattcggtagtcgcactgttgtcacgattacttggtatccgcgagaaccgtacagatgtggcaattgggcacagcagagaaagctttgatgcaaacatcaagcatactttttattaccttttccaaaagcagggccttgtagcaaataaagatcaacttttttatcgacaaaatgaggcatttcagccacaagctattcgcgatacattaccgattcttctaggcatttcatcaaatgatcgctatgaacttgaggccaaactccgtacagcgcagcgagatctgaaaatcaacgccaaacgtcttgaacaagcgcgcgatacaatcgatacatcattgctaaaaggttatgggcttttatctgaagccagagccgtaggtatcatcacacaagacaaagacagaatcggaactgacgaagtaattaatgttttgcgttctgcaatgcaatgggttccgtctcccctacctgaagacgatggacatagaatatccattcttgaaaatgaaattgctggtttacgacaagacagacgtaagatccagtcccgaattgattctgctcggatgtatgccaagcaatcaggtaattttgaaaacgaagttttagaacagcaagaccgattatcttctatcaaggctctaccgaaaaatccggaaactagcgaatggcaatggcctttctgtgaagcaaacttagcaatggaatctccaattgcaaaagcactcctgagcgaactaacaactcttgacgctgaaatgagcgttgtgtctggacaacgccctaaaatggatgcttatcttgctgaactagaagatgaggttcagaccattgtaagttcgataagggccaaagaagtggagcttgctgctgcaatcgcggcaaacgaagttattgagcaattaggcacacgcaataatgctgcggcaagagtaattggtcgtataagtttgttcttggaagacctagtacctaactcagagctggcaacatatgaagcagaaaatcgtcgtctaaagctcaaagtcgaagaactacaaaggaaagttggtgctgatagcagccatgaaaggctcatatctattctgaataacatttcgtcacagattacacgctacatcctggcttttgatgcagaatttaaggggctccctgctcgatttgatctaagccaaatgactattatctttgatcgtacagatcgtcccgtacctatgagtcgaactggcggtggagaaaatcatctcgcttatcacctgtctgcattgctagccattcatctctttgcctcaaagaacaattgccccatccctcaatttcttttaattgatcagcctacccaagtttatttcccttctgaaaaaatttaccaggaagctgatggtactgttcagaaaacggaagctgatgctgacttagcagcagtacgtaggctgtttgcgttactgctgaagtttactaaagaagaggtcccaggctttcagcttattgtgacagagcacgcaaatcttcgcgaccagtggttccaggattctttaaccgagcttccttggaccaagccccctgccctggtaccagaagactggcctttaccgtcagacttaccaaattaa

SEQ ID NO: 183561 - DNA, 489 bp, Klebsiella oxytoca; identical to SEQ ID NO: 107303

SEQ ID NO: 183562 - DNA, 1224 bp, Klebsiella oxytoca
atgaccggagtatctagcgatcaatacgctgcaggtgaacagggcttagggtatatctatcagcctcgttttgcgctacttaagcttctacagtggccagaagatacatctgttttgatcgaaaaagatgatgacctagacttcgtcaattctaagggtgtcaaaacactggcatcgctcaaacacaaaggagatggggatactctaaccgacctgtctaccgatttctggaagtcagtccgcatctggcttgaccgctataatcgtgatggtaaaaccgaagcaaatcttcgtttctttctgtttacgaccggaactatctcaaacgcctcgttcctgcaacattttttagtcgaagcgccaacaaaagacgataattcagtatcaataactcaactcgccaatacagctctggctagaagcaagtcaaaactgatcacggcaatagccgatgaattcaataaacttactgatgagcaaaaagatgacttcttatcacggataatcatatttgatggcgggcctcgcattgaagacctcccaacaattattaaaaatcagcacatgcgtatcattagacgcgataaccgagacgctatttttgaacgacttgaagggtggtggaataacaccatagtcgatctactaacagggaaacgtaaagaggcgatttttggttatgagatttccgacaaacttgcagcattttctgaagagtataaatctgacaatctgccgattacgttcagaggaaaaatgcccgttggagaaatcgatgctatgaatgatcacaggctctttgatgtgcagctccgtgaaatagggatttcctctaatcgaatccgaaatgcgattctcgactactaccgagcatttgagcagcgttcttcatgggctcgtgaaaaccttttggttacaggagagatagaagattatgaagaccgccttgttgatgaatggagtcgctataaagacgtcgtttttgaagaattagatgaaaattcagctgacgaagtacttattactgcgggaaaagcattgtatcaatgggccgatcttgaaagtggtaatattcactcattgcgtatccgagaacgagtgactgagccttatgtagttcgaggaggatttcacatccttgcgaacagtagaccactacccaaaattttctggcatccccacttcctaaatagagttggtcaattgttgggagcccaagcatga

SEQ ID NO: 183563 - DNA, 1008 bp, Klebsiella oxytoca
atgaccgtccgtaaactcccctctggtaaatggctgtgccagtgcttcccatatggtcgtgacgggaagcgcatacgcaagcagtttgccaccaaaggtgaggcgctctcttatgagcgccgcgccatgaataatgcaaccagccaagagctaaacgataacgcggtgacgctctccgcattcgttgagcgctggtacgaaatgcacggcaaaacgctaacatctggtgatgaacgcagggtaaagctgctggctatctgcgagcgcttaggcgatcccctcgcctctcacttcgataaaaatacatttgcggtttatcgtgaaaaacgattagccggtgagtggaatcagaaaggcaaaaaaaaactcagtgaggcgacggtaaatcgcgagcagtcgtacctgcacgcagttttttcagagatgaagcggctgggtgaatgggagggtgataatccgttgtcgggcatcagacaattcaaagagggagaccaggagcttgccttcctctacgaggaggagatagagcgacttttatcggcctgcgatcaatcggcaaacaaagatttgggcatcatcgtgcgaatatgcctggctaccggtgcgaggtggagcgaggcgcaggatttaaagcaatctcaggttctgcccgggcgactgacgtttacgcagaccaaaagcaaaaaaaatcgaactgtgccgatttctgaacaactacaaaagttgctccccaaaaaacgcggagcgcttttctcgccagcatatgaagccttcaaatcagcgcttgcaagggcagctattgagctgccaaaaggccagcgcacccatgtactgcgccatacctttgcaagtcactttatgatgcgtgggggtaatattttagtgcttcagcagatactcggacacagtacgatcatgatgacgatgaggtatgcgcatttcgcccccaatcatcttgatgcggctgtagcattaaacccttttgataatcgcgaagaggtcaagtaa

SEQ ID NO: 183564 - DNA, 354 bp, Klebsiella oxytoca
atgagtctcataaaagacatcctgatttatgttgatgacagctgtatcactgattttaacgctgtaattcagtccgaaaacttagatatcacaaaagtacaacgattttcagttggtgggccagaaaagtttgcaatcctcacggaaagcatcacgccttatctcaagcctgtcatcaatgttattaaacagcttgcgagagtgcacaggaaaaaagtcttttttgagttagagcgaagggatggaactgttttcagaagtagcgttgacgggtacagcaaggacgaagctatagaaatcattaacgaagccgttcggctctcaatgcaggtttccgaagatgaccgtccgtaa

SEQ ID NO: 183565 - DNA, 600 bp, Klebsiella oxytoca
atgaaatacaattctttatttctttcaagcctcttggtgctggcttctttttcctcgtcagctgaggagctattaaaaaggagaaatatcgatccggcgcttaactgctcgaatggcccggttaagattaaagataaatcagagttccatttattgtttggggattactccgaagagaatggaacgctaaaaatcatcagccgtaacccgcttaaaatacacgtttatgcagaagtatttgcaggagagtcccttgaagttaaagatcatttagttaaaaaagcaataatatcaaatatttatcagatatttacattcagcgatattaacaaaataactgttacgtcttctgcaaaagaaatcaacatctccaacggcgttaagactggaaagccacttaaatccccagcgtatacaatcaccaaaacaagagatcaggctttgtccgatttgcgcaagctcaccaacgcaaaatcctttaatgatttgttcattgggtattatcaaatctgccaattctcgcctgtctttaagcagttcctttatgacgatcagggcggagttggggtatcgcagttcttcaatcaggtcaaaaaatga

SEQ ID NO: 183566 - DNA, 204 bp, Klebsiella oxytoca
atgtcaggcgtaactatcaatttaaacgttgccgcgccttatttatctctaaaggagtattcaaggattacgggtattccgtttgagacatgccgggacatggtgaaggacgggcggatcatcattcgaccaaaggaactttcagggggcaagattgaggtaaatatgattgccatgctcaaggatgccatcgcaaacagctaa

SEQ ID NO: 183567 - DNA, 387 bp, Klebsiella oxytoca
atgaaaagagaatacgcagacaaaatcaattcgctactgcaatgcttccatttcaataaagagtttctggaatggaaccatgattattcccatcaacttttacgccacggcgtttcccatctttatcacttcgctatgcttcagggcgagaacgatgaagccacgctggaagagctgcgcaacatcattgtttcgatcaccaatggtgatatcccgaagccatacgacctgttgtcaatggacgccgagcaaccagagacaacaagtaagaccgtgacgtttttaaagccgctggcggtaacggtggaacttacacccgaaatgcttcacagcctgaaacggtcggcttctgtaccagcaaagatgaagcgcccaggcctctattaa

SEQ ID NO: 183568 - DNA, 579 bp, Klebsiella oxytoca
atgaaccacttaatgatcgacattgaaacgctaagcgcccggccaaacgcggtgatttgcgcgattggcgcggtgttcttcgaaccatcaaccgggaagatcggcccgtccttctatcagaccattgatccgcgcacctcgcagaaccgtggcgcggatatctccgccgatacggtgatgtggtggcttaaacaggacaaggaacccatcagtgagctggtagccgcaaaatcgcacgagctggatgtgatgctggatttcgcgaactttattagcggcgcattccctgaaaccacgaaaaagaatctgaaggtgtggtgcaagggcggttcgtttgattttccgatcctcaaatctgcatttgagcgctcatcgctcgaaggcgtttccatgctgccgtggatttactggaatgaatactgcttccgctcattgcttgccgttgccggtgttatcggctacgccccccacccgcgacgctcagttgcacacaacgctttaaccgacgccatttatcaggccgagcaggtttgcgagatctggcagcgccttaccactccacacctcgaatcactctga

SEQ ID NO: 183569 - DNA, 270 bp, Klebsiella oxytoca
atgaatgagccagtttggttagcagtagatcccgccgatgagtcaggggatcgcaccacagttacggcgctggtttaccgcataaccggtagccagcagtaccacaccttcaccctgattaatttcagggcgttcatccttgacggagatacaccgctctccaggtcatgcgtatccggcataggtagctacgaccagggcattaagaagggtggacttgtacgcctgcaactcgtttccgacagtcctgatgaggagttgccattctga

SEQ ID NO: 183570 - DNA, 156 bp, Klebsiella oxytoca
atgaacgaagaaaccaattaccgccggttctggcgaagcaccgttatctgtatcgccctttgctcgctgtttttctggttgccgatgggttatctcgcctttcgtgttggctctgtggtgtgggaggcgctgtggtcgcttattacaacgaaatag

SEQ ID NO: 183571 - DNA, 549 bp, Klebsiella oxytoca
atgaaacatttcagtactaaagccattgggtcagttatcgcagaaatgaaccggcaggatgaaaagtggggtgctgaccgcaatcaacatccgttcgtctggcaaaccatccttagcgaagaggtcggcgagtttagccaggcaattttgcatgatgaatttggcggccataaatcaggaacggcgcgcgaagagatggtgcaaatcgccgccgtcgctctccagattatcgaatattacgatcgccgttgtgcacctgcggcggaattcgaacaagttcatccagcgcttgcgctgccggccatcccggcagggcgtgaaaaaatcggtggatgtgattggctggactggaatgaactgtcagcgctcggtcttattgtccgcattaacgctgaaatccttcatccacttggattggcaattttccgtgatccggcttccggcatctctgcgggagccatgattgcaccagatggaaaatgggagtatgcgcccgatgttattgaagggctgcgggtaagactctccagttattccggtcacttttga

SEQ ID NO: 183572 - DNA, 693 bp, Klebsiella oxytoca
atgagttatctgggaagtaaggcggccagcggtgtttatcaaaaaatcatcgctgaaatgccgccgcacgatacctacattgaaacgcatttgggcagcggcgcggtgatgtttttcaaaccgccagcagggcagacggtaggcattgataagaatgaagacgcctttttgttgacccgggcgcgctggaaagaaaaagggctaattccgcctgatatccattttcatcatggtgatgcagttagctttttagagggcttctttgatttttccaatgctggccgtgtgttgatttatgctgatccgccatatctgccagaaacccgcaccggaaacgcacgctatcgttatgaatattctgttgccgatcatgagcgcttattgtcttgcctgatcagtctgccagataacgtttccgttattctttcgggttatccctcgcagctgtacgacgagaggttagcaggctggcgcagcaaggagtttcaggccatgactcgcggcggcgtacgaacagagaaaatctggatgaactaccaggagggggccgcgtattcgcatgcgttcgccggtaaagactataacgatcgctatcgtattaagcgaaaagcgcagcgctggaaggagaaatttgcagcattaccgccagcagaacgcctggcgatcatggtggcgctcggcgaggtcgattag

SEQ ID NO: 183573 - DNA, 300 bp, Klebsiella oxytoca
gtgaaaacatcaaaactgcactggccggtaacgactgcgccgttgctcctgtgcctgttgctggcgctgacagcctgtaccagcgagccgaagaagtcagcgccgcagattattcaggagcctttaccggaaagcctgaccgcaaaaactgatgttccgccaccaccggacaggccgatgacgtggggcgggcttgccatctggacagattcattacttgacgcgctggatacctgcaacgctgataaggcgggcattcgtgaactggaactgcggcgtatcgccagggggataaagtga

SEQ ID NO: 183574 - DNA, 597 bp, Klebsiella oxytoca
atgagtaactctctgttgccaccatcctccactgcctggcttcgctataccgaagcgggcaccgccagactgtcagcgatcacggttgccctgcgtacgctgtggacaccgacagcgagcccggtggatctgttgccctatctggcatgggcattgtcggtggacaggtgggacaaggactggccggcagaacgaaagattgccgccatccagcgttcgtactggctgcaccgccgcaaaggtacgcgcggtgcggtacgccgcgttgttgaagatatgggcttttcagcaacgtttgccgaatggtttgaggtcggtgacgagccgggaaccttccggcttgaggttgacattaacgaggctggcctgacgccaaaaacactggccgaactgaacaggctgatcagtgataccaaaccggtcagcagacacccgtcgcagctcaacatatcggcgaaagtgtatggcgacatctgggtcggatcaactctgtgcagcggcgacattatcagcatttatcccgccgactatgaggcggaagaaaacattacttacaacggcgtgatttttcacgacggcaattataattacgggtaa

SEQ ID NO: 183575 - DNA, 2394 bp, Klebsiella oxytoca
atgaccagactgccagaatcctcatcgtgggaagaagagattgagcttatttccagaagcgagcgcgtttctggaggactggacggcgttgcaaaccggccccttaaaagtctggccagccgcacgcgttaccttaaggagcggggcgagcagtcagatgagcgactcgccgggaaggtcagcgctgtaaaaacctttacggaaggcgcaatactggagtctccccgggaagaaattctgtatggtgtttatcgcctggtatggacggggttattccccaagagcatcccggcaggctcatcaccgaaaacaaccggcggaataggggccggagcatgggcttacacgtcggatgcggttatacgccagaacctcagtgcaggtgaagggtttaaactggtcggtcaattccccggcgtggtatcactcgccgcagctgcgggaaataatggcgaccgcgtgctggtcaaaagctaccatgaaggcggcagcgagggtggcgggcagtttgtctatgacgagtcacgggcatccgagaatgacggagtaacggtctttaatggatgggtgcgtcagattgttaataataccctgacgaattacgatgcgggaattattccatttgatgggtcagacgccacacagaaattaactggtttatataatcacgcacctgaaggctgcaccgttattgtcatggggcatcatgaaatttccggccccgtcacggtaaagcacaaaaataacctcgaaattatttatcagtacggaacattatcggggcgcaaatttcgggataactggcaatggggggcggattctgattttgagtatggctccggcaatctggggttgctgtcgctgtttaattgcccgtttaccactattgagggtctgtctgcgaccggagcgcacttacagcgccctgactccaaggagtggggcgactgcatgattcgttatgagtactgcccccatatgacgattcgaaactgccggggtgaatattttggcgggtggggtattttcggtatgtattccgaccactccgaagccagtaacgtcaatatctctcatgtatcacgccagagcggtatcaatattttcgcctgctccagttattgcaaagtccatgactgccgactggaggacgttgagctatatggggttgaggttgaaacattcgacgctaaagcaaactcggttacctatggcaaccaggcgtataacaatgaaatacgaggggcaaagttcggtatctgcattgtcggaaatcacaatgatgcggttgtgtacaataataaaagctatgcctgtcagactggcgtttttgcgattaaatatacgggtaaaaatctggtcatcagtgataactcgatcgtggactcaatgcgcggtgtgcaggtcaatgcatcaaagaatgtccttacgctcagaaacacacttacggttaacgaggttcccgcgtttatcatcgatgaccagtacaacgcggtgcttgatattactgcggacagaatggcgttttacagcatcaactccgttcgcgccggttatcagattcagatacgcggcgtaacgtataccgtagcgtcatcagtacaggacccgacgagaaccgattaccaggcacagtctggcggtctgtacctgaatacgctgactgctgccctggcggctgacgtggagcattgcgataacgtttatgtgtcaacaaccagcctcggaatgacaccttacggctttggcctgaatgtcgagcgctcatcgtcagcgattgttgaaggctcttcaaataaccggttcatcagcaatctggcggcgggtaaagtggcagcgggctgctttactaactctgtttatacggatgtttcagccatcaaagagtggtggattgataatcagacttcaccatcaacggataacccgtatacgtgtcgctggatgcgatttaatcagggggcaaatgcggccattaatgtgcagggtgcgcggcatgataagctgtcgtctatattttcctcggcaactaacggctccaccctgaatattttcggcaaccgtattttacaatacgggtcaaatctggccgttgcatcgggcggccagttcccgccgcattattatatttctgaaagcccgttcgcaattgtcagcattaaagtggtgctgacgaactactcctcatcagagaatgtatacctgcggataaacgggacagagaacatggtgaaggtagccgatgcaaatacctctgaaaccgcagtggtcagctacacatcgagaaaattatttttcaccttatccactgtgggcctgatgtatttcaggctggctaccgccagcaataccgcgaaggtcggcagttacaccattgaaatcgaaattatgtga

SEQ ID NO: 183576 - DNA, 267 bp, Klebsiella oxytoca
atggcatttacccttgttaaatcagttaccgtgctgaaacagtgcccgtcactgtgtaatgcgaccctggctcctgaacaggaaggtatcactattactgtcagcgtcacctcgctggaatcgttatcgggtacgttcggcacggtcaactattccattaccccggaaggcggaacggctggacacggaatgtttgacttcacttattcaggaacgggcaacccgattgatgaagcggaagcggcattaaaagcgtcactgtcctga

SEQ ID NO: 183577 - DNA, 1161 bp, Klebsiella oxytoca
atgagcaaaatatttaaatcgctaataacggttgcaggcagggaaaaaatagccgctgcaatcgttagcgggaataaagttgttttctcgcaaatgtctgtcggcgatggcggagggagtacaacaactcctgacgaagagcagaccgcattagttaatgagtgcttcaggacgcagcttaacagcctgaaattgtctgataccgaaaatatcattattgccgaaatgattattccgccggaggtgggcgggtttaccatcagagaggcagcgctgtttgatgatgcgggtatttgcatggcggttgccaatgtcccggaaacctataaacctgcactggcagagggttcggggcgctttaccattctccgcatctggctggcggtcagcagcaccgaagccgttgaactggttgttgacccgggaatagtactggcaaccgtggaagatttgattaacgccggtaacgagattaaagactacgccgatgaacagataagcaaccacgctgagtcaagaaatcacccggatgccacgctcgacgaaaaggggtttacccgactcagtaacgccattaacagcgacagtcaggaacgggccgccacaccactggccgttaaactggctgttgaatctgccattcgtgcagcatgggagctggacaaccctgtcggcacggtgaggctttacgcgcagaacatcaaccccaatgaaagttacccgtggtcaaagtggatttataccggcgaaaataaaacgatccgcgtcggcaaagctgatggttcgggcgtcggtacgaccggcggcagcgataccgtcacgctccagaaagctaacctgccagccgtacagattgatgttaccggcgaaaccagcgagcaggagcggcaggtactgacgacaacgggtaacggaaggcaccggcacaaggcgggagatggcgcaccaggggatacatggcaggatgccacccacggaacggataaccagaaatacacgggatggaactataccgactatgcagaagaccatcagcatgacgtcacgatcccaccgcacaaacactcgaccagcggcaaaacagccaatctcggcgaaggtaaatcattcagcgtggtgggagcgcacatcctgctgatgtgctgggcgcgggtgacgtga

SEQ ID NO: 183578 - DNA, 2940 bp, Klebsiella oxytoca
atggatcttagtattcgcgttgcgttcagtgcaattgacaagctcacccgcccggtcagcgccgccagtaaagctattggcggcctttctgactccctcaaaaaaacacagtcttccatcaaagatctggaaaaaagtgcgtcgtctttcgacaagctgcgctcacaggccaacgataccgcgcaaaaactcagaagcacccagcgcgcctttgatggcctcaaccagaaacagcgcgaaggcggccagcttacggaggctcaggcggcacgacttgaaacattgcgcggtaagctctctcgcctgacggacacctacaacaaacagaccacccagctacgtgcggccggacaggcggtgcgccagcatggcgttaacctcacctccggcagtggcgcggtgcagtctgctatccggcgaaccgagcaatacagccaggcgcttgagcgtgaacggcagcgcctggcggcggtaacccgcgcgcaggccagctatgaaaaggcaaaggaaaccggcgcgagacttcgcggcggcggcaccatggcaattgctggtgcagctgctgccggatataccggcgggcgctttctggctcctgctgttggctttgatgaggaaatgtcgcgcgttcaggctctgacgcgacttgataaaggtgactctcaactcgcggcattgcgtgcgcaggcgaaaaagcttggcgcggaaacggcatttaccacccgcgacgcagcaagcggtcaggcgtttcttgccatggctggcttcacgccacaatcaatccaggcggccttacctggcgtgctcaatatggcgctggccggtgggatggatctgggcgaaagtgctgatatcggctccaatatcctgtctcagttccgtcttgatcctaaagaaatggaccgtgtcagcgatgtattgacagcggcgtttacacgtacaaacacagatttgcgtggtattggggaggcgatgacctatgccggggtgggagctgaaaagctgggggttagcgttgaggaagccgctgcgctggttggagttcttgcggcccaaggtattaggggtagcatggcaggtacgggccttcgagcctctctttcgcgccttgcatcacctgtaggtaaggcaaaagatgcgctaaaagagctaggtgtttctgttgctgactctacaggaaagatgcgccctatcgagggtgtgctaaccgacctctttaagacaacgaaaaaatacggcaatactgatcagctttctttctttaaagatattgctggggaagaggctgcaaactccctgcaaacattagttcaagcggcgggtagtggccagttgcagaaactgctatccgaactcaaaaaatctcaaggcgaagcattaaaagcagcgaaagtgatggctgacaaccttggtggcgatcttaaaaaccttgatagcgcgtgggaaggatttcgcattcaggtggaggaaaccaccgacgggccgctgcgcaaattgacccagaacctgagtgaagtgattacagcggccagtgaatgggtcaaagccaacccgcgtctcgcgcaaactctcctcctcgttgtgggtggtgcgctggcgctggctgtcgctattggtgctctctcgcttgccgtcggtattctgattgggccgcttgcaaaactgcaactcggcttcacgttactgaccggcgggcgcggtattctcggcaccgttgccgcattccgcactctgggtactgccgctggcccggtgatggcaagcatacgcggctggcctgtcgttatatcgggtatcgcatccggtttcgggaggatctcagcaatacttcctgctatccgtgcagggttgttaggtgcgtttctggcgcccggcgctgcgttgacttctcttggtaaaaatcttggcatgctgatgctcagactgaccggcctccctgcgctctggggaatgatcaccggtgcggtatccgttctgggtggggcgctatccttcctgcttagtccaatcgggctaattggtgcggcgtttgtcgctgcggggttgcttatctggaggtattgggaacctatcaaggcctttttcactggtttgttcaccggtgttatgcaggctcttttgcctctcagggattcatttgccgcgttctcacccattctggaatccgtcggtgatggtgtgaagtctgtatggcaatggtttaccaatctgctgtcaccgattcagaccagtaaggatactctcgacaaatgcgccagcgccgggagtacctttggcaatgtgcttggcggtgcgcttcaggtggtgcttatcccagctaaggctttgctggatactttggcctggattctggaaaagctgggcgtattgcctgatgaagctgagcgagcacgcaagaagatcgaagacgctcagcgtatgtcgcttcttcaggataaggtcgcctttcttcagggggatatgtcaaaggttgccccgaaaaaaacggactctcctgttatagctggctctcctcctccatcctctccgttatctggtgataccggcacacagcgacgccttaacagcatcgcagataacacgaaggcgacggccaacaatacgaagaaaatcggccccggcgatattgtctttaaaaacctgccgcgtgcgctggcgctgcgtggtgcctatcaggaggcgcgggttattccgcaacctgtgcctcgcgtgtctgcggctgcggccggcggcgttctgtcggtgccgacggcgacacagggggcaacatctgcgccggtcgctgcctcgtcgggtgccgcgccgttcttccagctggtctttaacgacgtcggcaaacgctcggatcaggagcttgaaaaaatggttcgcaacgctgtgcgtgatgcgatggccagcacccgcaaagctaaccgtggttcataccgcgatcgggaataa

SEQ ID NO: 183579 - DNA, 888 bp, Klebsiella oxytoca
atgtttactggcctctgcgcttttcctctgactccgttacatcagcatggcgttgatgaaaccgcttttgcccggattgtcactcgcctcgccgaatctgccgtcgatgctctcggcgtgctcggttccacgggaagctatgcctggctcagccgcgagcagagaatgcaggttatccgacaggccaaatcgcatgccggagcggtgccgcttatggcagggatcggggcgctggggaccgatcgggtccttcgtctggcagaggatgcgcagcgggctggggccagcgcgctgctcctgccggcaatcgcctatcagcccctgacggaagaggagattttggctttttaccagaccgtcacccgcgaagtctccgtgcccgtctgcgtttacgataaccccgtgaccacgcatgtgacgacctcggatacgcttaaaggcgcgatcgctgcgctgccaggtatcgcctcaattaaaataccgggccccgctaaaaatgacgtcgcacggcgcgttcagagcctgcggcggcagctaccggctgaggtgacgatcgggattagcggagacgcctgcgcggccgatggcctgaacgccggctgcgaagtctggtattcggtgtgcggcggcctgttcccgcacgtcgccaaagagctgacggcggccgcgacgcggggggaggctcagcgggcggaggcaataagcgccaggctggagcctctgtggacgctctacagaaagtatggcggaagcctgcgggtcactgccgcagcggcgacgatcctcggtctgtgcggtgaggattgtttgccgcgtcccctgctaccgctttcgccggatgcctttcgtgagattgctgagacgctgcgcagcctgaaccttgagtag

SEQ ID NO: 183580 - DNA, 1005 bp, Klebsiella oxytoca
atgtaccgatggataaaaagtaaaacaagaatatttcttggtgtgctcgttggcatacttctaagtctgattgttacccgatttttattaattttcaatgcagtagaaactgcaaagtggttctataccgcttttgatgcggggctaatgacgaccttcgcgacattcttttcattgtatggtgtctataaaataagcaacaaatttccagacactaatgctctcctaccactttttgggatcgttatctggagcttaatactgctcgcctactatgtgctccgttacaatgatgcctaccaaactgcgttatcaataattgtggcaggatcgattgccggtatgggatggtggatccagttcattacttctgcagcaagtgatagacggaaacacacactgaatgtagttttgagtacccgcacttgtaccgagtatcagacacatctgcgcaattttacccatctttggcggggcaatcgtcatgcaccaaaagagctttgcctttggagagatgatcctgataaccctaagttcaaagatgcaaaggtcccggatgaggtagttaatgctatcaatggccttctctacattctgaacttttacgagtttttagctcagggtattaaagctaatgatttggatgacaagctcttaagagaatgtttttgtggctttttagaaggtttggagagaaaagcttatttcatactttctgaagctcaaaagagagacgagagatattttgaagggattattttcctttgtaagcgctggaacaatgagaagtcattagttgaaaagcatcggcactcagccccaccggcagatatagggacttgctatccttcacaagatgaagtgatgaagatgcttggaatgcaggtaaaacctgaatcgaaacctaaaagaagaagaaaaagacgtggagcggtatcagcgttgcctccagcggcgaatgtatcagaactaaatcctgactcaagtgtagtatcgggcacttaa

SEQ ID NO: 183581 - DNA, 891 bp, Klebsiella oxytoca
atgaccaaatcaaccataaccagagagcgtctggaaaaaattaaatcatggcgtgaaacctacggcgccggaagcaacgtacagctgccagctgaagaggccgaggagttggccagcatcgcgctggccgaaatggaaagcgatccggtggcgcttcaacctgagctggcaaaagttatctatcacttccgtgactggaatgaaggatttccggttgagcggttcaaggccgactacgtcattagttggatgctggcaaattatccgccagcgcaaccagcaaaggaccgagagctggtacgccgcgagcacgcagagtggtcacaggcaacattcggtaatgtcggccctattggcccactgaagcacctagcaaaagaggctatggaggccgcagcggaaccggatgacctgtcggagtgggctgatatgcaattcctgctgtgggacgcccagcgccgggctggtattacagatgagcagattactcaggcgatgatcgaaaaactggcggtgaacaaacagcgcgaatggcctgagccgaaagacggtgagccgcggttgcacattaaagatcagccatcggcggtagggccagtaacagatgctatggcttacgcattccatcatgcgctaaccgatggtcccctgggtgatgacgatgtggaggatattaagatcggattgagagcagctttcgctaatgtaaccacctatcagccattaccagtagtgctgaaagagcatcaaatccgcgaactagtcaataaactgcgtgatatagctattgaatatcacagtacacaacaattgcgtgagcgcattgcttgtgttgtccgcgccgctatgatcgcggtcgcacaaacagcgccaaaaagcgaagtgaattag

SEQ ID NO: 183582 - DNA, 516 bp, Klebsiella oxytoca
atgacaactgatatcaccgaactggcacagagcctgaaagcggcagcagagaaagcgactccgggtcaatgggtggcatttacccatgcagactctcggaccttctccgtgcatacgccagatgacaaacgttgcggggacgtcattaagtgggctggttttgacggtcagcgcaaggcaaaggcaaatgcagaattcattgccctggctaaccctgccaacgttaagcggctggtagatgcgctggagaaggcgctggccacagaggctcaccgcaatcttgggtggaaagaagcgcatgagcaggaggccagagcagaggcggcagagaagcgcatcgccgagctggagtcccgcaccgtgaagctgcctgaggttcgcattaccgtcaccgaatcaaggcgtaaaaatatgacatggcgagagctgggcgcgtacaacgagggtgcggacgtgacggtagagagaatcagtaaagtgctggccgccgctggcatcaagtgggaggctgagtag

SEQ ID NO: 183583 - DNA, 273 bp, Klebsiella oxytoca
atgagcatcattcaatatgccgttaatggagccgggattaaatctgccgattatttggacccgcgagaggtagatgaatcgacagacgactgggaatacgagcagatggtgcaggatgcggctgaagactactgggaaaatcatgacggatgggaggaccactggccattgaatatcgagctgttcgtcgatggtaaaagtgttggcctatttgaagttgtgatggaaatggagccgacattctcagcaagtaaacaggagcgagcagcatga

SEQ ID NO: 183584 - DNA, 483 bp, Klebsiella oxytoca
atgaccgaacaaaccattctcgacatgtgctgcggctcccgtatgttctggttcgataagcaggacccgcgtgcagtattcgccgacattcgcgccgagcagcacactctgtgcgacggtcgtagcctggttatcaatccggacattatcgccgacttccgcgcgctgccgttcgctgatgcctctttcccgattgttgtgtttgacccgccacatcttgaacgcgttggcgaaaacgcctggatgggtaagaaatacgggcgcctgaacaaagatacctggcgggatgacctgcgcgctgggttcaaagaggcgttcagagtgttgtggccgcacggcgttctcatcttcaaatggaacgaaacccagataccagttagccagattctggcgctcactgacgagaagccggccatctggcaacgcacagggaaagcggacaaaacgcactgggtaattttcgtgaaaggggccgacaaatga

SEQ ID NO: 183585 - DNA, 435 bp, Klebsiella oxytoca
atgaacatctcaacagtaaacgagctcattcagtcgctggagagtgcgggcgagctgtcgatcaaagagacaaaggttatggcgctggctaaagcgtttaagcagttggctgcggagaatgtggcgctgaaagacgcattaaccggcagagcctatatcaacttcatcaaagccaatggctggaatgcttccgcaagcactgttaacggtaagttcgttaactttgccgacccagaagttgatttcggctcgatggtctttgctcacgctaaaaagcttattgaatcagtcgaaacccccgccaccgacgcttatctggccgggcttaaggctgatggggtggaggagtgggtttccagcagaggcgggcgctggaatggcacgacagaagaggcgctaaagttcgccaagcagctgcgcggggtgtttaaatga

SEQ ID NO: 183586 - DNA, 792 bp, Klebsiella oxytoca
atggctaaaaactcgatcgatgcttatggcgccagcggcaagacaaacgttctgatgttcgagccggaaaatctgcatattgtcactgacaaggcgcacccgctttacgatgagcgagtcaatctgccgatcgatgaagggatggtactgaatatcaaagagctgggtgttcttgagccgattattgtctggaaagaccctgaaaagggtctcacctgtgtggttgtcggtcgtcagcgcgttaaacatacgctggaagccaataagctcctgctgaaagaaggcaaaactccgctgcttgttcctggagtcgttaagcgtgggtctgcaaaccaaatggccaaatatatggtcagcgaaaacgaaatccgccgacctgacacgccattaggtcgagctaagaaaatgtcagacgcgctggatcgtggtcatgacgaggaagaccttgaggtgttgtttggctgcagcgttcagactgtccgtgcaacgctgtcactactcgatgctacccaggctgttcgggaagcggtggagtctggcacagttaccgttacccaggcgcgtcagcttggcgcgctcccacctgaagagcagcgggcaaaagttgcagaaatcgagctgcgacagctggtaccaaaggccatgaaaaatcccgtcggcagcgtcaggttctcggtgaggcaaagccgcgcatcaaatcacgtaaggaaatcacaaaagccctcgaagatgccagcggcgaatatgccgaggctctgctctgggtacttggggaggcgaaatgaactttga

SEQ ID NO: 183587 - DNA, 324 bp, Klebsiella oxytoca
atgcagaacccgctcgccaaactttccctggattactggtacaaagttatgatcctgataggcgcttttatttttcttctcaacgctgccggactccttcccgcgtaccccacagcagtcacaggcttcatatcctctggacttttcttttggggtcttggcgaatggatgaatcacccttatcaggaggtgttgaccttggatccctttaaccgtccgactggcaagatatctgggcatccacggaacgcctgtcttattgggaatatctttgatttgattggattcgtactgatcatcacagggctgattaaactcttctaa

SEQ ID NO: 183588 - DNA, 549 bp, Klebsiella oxytoca
atgattgaacaacactggaaagtcgaaaagcagccagcatggctggtggcggcgatccgtaaaacaatagccgcgttacctggtggctatatcgaagccgctgagattctggataccacccaggacgcgatctttaaccgactgcgtgctggtggagatcagatattccctatgggctgggcaatggtcttgcagaaggccgcaggtgttagctacatcgccgatgttttttcgcgtgaaaccgacaacggaatccatgtatctggcgctgctcatgaagacgagaacgaagagattggtttgaagctggcggagctggtgggtcagcttggcgagttggtcagcgcctatcgggaatatatcgatgatggggtggttacacatggcgagtggcaaagcctgaatgatatcgcctaccagttccgggtcacgttgatgacgtttctcaacctgatttctcgtgtttattgtctgccagaaaagagtgacgcccgcgagtgtgcagctccgggcgtcgtggcgaataaatctttgtgtatggagaaataa

SEQ ID NO: 183589 - DNA, 228 bp, Klebsiella oxytoca
atgctcgcacaatcccccctaaacagtcagatctttaagcttctgcacggctttaccaacttcagccatagcatctacgaactcgtcaaacttcctgctggccattccatatgcctggagaatctccaacttcaagggatcgagctgtttcttaatttctgcacgatccccggcttttttctccgcttcctctgccgctttgatcaaggcgtcagcctgtttacgtaa

SEQ ID NO: 183590 - DNA, 579 bp, Klebsiella oxytoca
atgaaaaaaatcgtattagcgggtgttgtggctgcggctcttatctcttccaacgcaatggctgacgtgaccacttccgccactgcaagctgggatgcaagcgcaactaaagacaccaccagcgcgctggttgtcactccgctgaaatccctgaacttccagtacgctgaagggattgaagcgtttaacgcccagaaaggcgcttttgacatcaccatccagggccagtctggcgcgaccgacttcacgctgacctctcagattgtcagcaacaccctgagccgtaccactgatgcctctactctggccgtcggtgtgagctggaacggcaacgcgctgaacaaaaccaccccggtaacgatgattgataccgccaacaacatctccgcgggtctggatgcgctggctgtcgctaccgccttcgcaggcgccgatcgcgtcagcactcagggttccttcgatttcactgtcgactccgcgacttctgacggcagcaccgccgctgagttcaaagatttaaccgacggttactggagcggcgacgttcgcgttcagttcaacgcggtctggactatctaa

SEQ ID NO: 183591 - DNA, 1863 bp, Klebsiella oxytoca
atgtacgaacgtgactatcaggggcgccgcctggcgatggggatggtggatacctggaatctgcaatcgatcgccagcatgagcgccctgaactccagccgcatttacggcatcagctatggcaataaaagcagttcacaaacgcaagacaacacgcttgctctggtgcccgtaacggtgttcctgccggccgccggtgaagtgcacgtttaccgtgacggtaaactgctcagcattcaaaacttctccatgggcagctacgaactggatacgtcgcgcctgccgtttggcatctataacgttgatatacaggtggtcgttaacgggcgcgtggtcagcagccggacggcgaacatcaataaaacgttcgcccgaaaatcgagcgtcaccggcgatctctcatggcaaaccttcgcgggcagcctcgaatacaacaagatggactatcgccacaactacaacatcaattatggcacacggaatacgtggattgccggggtcgccgctgcaaccagccaaccctggctttccggcgtgaatctgaaaaccacgctctacggttttgacaataacggcgtcaatgaaacggaagcgaacgttattttcaacaactcgttcagctttaaccagcaggggctgctcgctaccgacggcagctggcagagtacctccaccttcaatatgagtttaccggatgggtacggcagcctgtgggggtcgcgccagtatggttctatcggtaacgcgctgcccatgcagcagaacgactactttaccgtaggcgctaacgctaacctgcgcaaaatagcgccgttcctcggtacgctgagcgtcagccgaaccaataataaatataccggaagcacctataccaacgtcgattacgatcaatcgctgttagccaatcgctatgcgacgatttctctgcgcgccggtattcagaattatcagtacaacaaccacgaaaatctgcgcgataagtacgtcaatattgatatctctatccccttctctacctggcttagcaccggggtgtccagccagaacggaaacatgctggcgaacgccacgctgcgcaaaagcttcgacaacagcgccattacccaggtgggggcatcggtttcgaaacaaattaaacagaataaaaatgacgatagcagctatcgcgccgacgattacgcaaccaatggttacgtcagctatgacaccaaatataacgccggcaccgtctccgtcagccgctcatcgcagcacagctcaaactacagcctgagctcgcagggcagcgtggcctggacgcaaaaaaatatctatgccggaaaaggtacccaaaccgccggcctggtggtcaacaccaatttcagcggcaagggccggatgatggcgcagatcaacggtcaaagctatcccctcaccggcaaaagcaacttcatcagccttccgccttacgcggaatataaggtggagctgatgaacgacaaaaactcagaagacagcgtcgacatcgtgaccgaccgccgcagcaaagtcgtgctctatccgggcaacgtcagcgtgattaatccggaagtcaaacagctggtcaccgtatttggccgggtgaaagaccgtcgcggcgattactacgccaacgccgatattcataaccacattggtaaaacccgaaccgacgaactcggtgagttcgccatggacgtcgataagcgttatccagtgattaccctggtcgataaattcggcggcatttgcgaagtggatctggatctgaatgaagcgaaaggcgccgtgtgggtcggggagattccttgtgagatccaacaacaaacggcatcagtgactggagatgttaagaatgtctattaa

SEQ ID NO: 183592 - DNA, 585 bp, Klebsiella oxytoca
atgagcccggattacactgatcctaagttcgctctgttgagtgttgggcgtgggtattttgacacacagatagcccccacaactacgcagactatcgttgctattgcgaaggtacctgctgctaccggcgttattgcgtcaaactattataaagacagcagcaaccagattagcggtgacgcattcctggagaatatctctacagctaaatcactccgctattacgcacaatccagcactaacggtactacacaggcatcgcgggatatatctgccctgaatatcggtgatttttcggttgttggcggtaaaattacagctgatccaacggttggggcctggacaatgtctgactctgccgatccgggtgtatcgtcagccacaatggcggccagggtattaaattcccggacattacggatcggtgccagctacgccgcaaatgagtttaacggtgatatcggtatcgcggcggtgctgatttacaataccgatatcggaggcccaaacatgaccacagttatgaactggatgcgtaatgttgttggtgtgcaggcgggtatctggagtgcaccgaaggggtaa

SEQ ID NO: 183593 - DNA, 432 bp, Klebsiella oxytoca
atgaacatctcaacagtaaacgagctcattcagtcgctggagtcggcgggcgagctgtcgatcaaagagacaaaggttatggcgctggcgaaagcttaccagcagctggctgcggagaatgtgcaggtaagagaacgtcaccgctttattcgcgcactggcggtttcaatccttgagcatagcggcggacgtcatgactggcgcggagctatggaagacgcatctaatttggtgaagacggtcgatgaggtttactccaatacccccgccaccgatcgcatcgtagccgggattaaggctgatggggtggaggagttcgtatccaacaccgtgcataagatttttgatgaaagcgatgcagtgtcagctttggcttacctttccctggctaattcacacgtgaagctgctgcgcgagggggccgacaaatga

SEQ ID NO: 183594 - DNA, 765 bp, Klebsiella oxytoca
atgactgatatcaccgaactggcgcagagccatgaactgctgattgcaaacgggaacgaaacagaagcggagctttcaatcactgactttgcgctacgtgccgctggctacgttgacgagctggtagaggcgctggagagcaaagagcgcattattcaggtgctggagtctagttataacgagcagacagaggcgctggagaaggcgcagcacgttgcggcggttgactgggaggcggcagcgtctctgaacgttgaaaaccaggaattgaagcgccgcatcgccgagctggaagacgcagagcaaaaactctgtgctgctaacgtgactcttgatgctcgcgcggaattggctgagcgccagctggcagaacgtgaacgagctaacgcagcgcaggatgaccatattaatcagcagcaggacagaatagacactttggagaaacgtaacgcggagttgggcaaatatgccggggaactggaatcattccgtaccgcctacatggaatggagcgataaaacagactgggtgcagactgacaagaggtttggcgtcgtgaagcctctcggaaaacaccgcgctgatgtgctgaaagaatatatccagcatctggagtcccgcaccgtcaccgctgaaaacctgcaggaaagtgcctacagggctggcctaaccgctggctggaatcttgggctggctaataacaacgacgggttcaataaatgcctggcggctcattccgctggcatcaaggttgaggctgagtga

SEQ ID NO: 183595 - DNA, 171 bp, Klebsiella oxytoca
atgcgtaaattcaaagtgaccattgagaccgggattgttggcggaaatttcgaggaaatattcgaagttgaagatgatgcaaccgatgaagagattgcagcagaagctaaggatattttcctgaatcaatgcaattacggctatagcgaaattaccggggaggctgagtga

SEQ ID NO: 183596 - DNA, 294 bp, Klebsiella oxytoca
atgtggagaggaaccgatcgcaccagaagccagatgatactgaccgagtatcgctacgaccctaaagctaaagactccaaatccgtttacctggtgcggcataacagccgcattcatcagactgttctggaacagcatttgacgatagagcgtgatagtttcggtcgtttcatgccgactatcgaactgaaagactttccggaaggacttagcgaccgcgaatcgatgctcaaacttgccgactggctgcaccgtttaggtgtggcgatcgaggataactggagtcaaccatga

SEQ ID NO: 183597 - DNA, 438 bp, Klebsiella oxytoca
atgaccaaatcaaccataaccagagagcgcctgcaggaattagctgcaggtcaaagcgggttcaatcttcgaactgccacacacgaagagtctcaggagttggcccgcatagcgctggccacaatggacagcgagccggtagcgtggctgctatcaggtggaggcgccaagaatgttgtgtgttttgatagcggcaatgcgtatgcagacccactacgcgaggttactccgctctatcgccacgcgcagcagccggtagtgcctgatgatgtgctggacgcattgcagaaggttgcacgaatacgccacgacatgaacgacttcgacggcgatcgccgtggtattgctgattgcctggatgatgccgaagtggcgctcatggaagtggtaaaccgctgcgccgccatgctcgcagccgccccgcaggaggcaaaatga

SEQ ID NO: 183598 - DNA, 999 bp, Klebsiella oxytoca
atgtttgcacagcgaaaagcactttacacgcaattagaaaaaatgcgtggctcaaaagtcattacctatgtaaccggtgacagacaaccttgggcgacacaaattggctctgatgtttttgacttttttgcgaatcatttagatgaaattggcgatacacaaaaaataagtctttttctctatactaatggtggtgacacacttgctgccagaagcattatcaatctcttacgccagttttgcaaagaactagaagtcattgtacctgcaaaatgccacagtgcgggaacgctaatgtcgctgggtgcgaacaagatcgttatgacaaaacaggcaacactgggtcctatagaccctagcgtcaatgggccattaaacccgcaagtacaaatcaacggccaggtgccgcaaccttgggctgtaagcgttgaagaaatcaagggatacattgcagtagcaagacaagaattcggaattgatgatggagcgggcttatctcaaatcctccattccctgagtgaaaaagtacatcctttggtattgggtagggtataccgagctaagtctcaaattcagatgcttgccaggaagttactggttaatcaggtaactgatgaggcaactgcagaatccattatcagttttctctgtagtgagtctggcagtcatgactatacaattaaccgagtagaagcactggggctcgggcttaaggtagagaaacctaatgaggaactctaccagttgattaagcagatttatgacgatattaaagaggaacttcagttagggcagccttttgatgccgaagcaattttaggggcccgacaggacctggactacgtagctgttagatgccttattgaggcacctgatacctgttcttatcagttacgaactgagatgcgcctctcccgaatagttcaaaatcagggggggcagcaaaatttcatcaataacgcaattttaaacgaagggtggaaagcatatgaccaatga

SEQ ID NO: 183599 - DNA, 168 bp, Klebsiella oxytoca
atgaataagaaagaaatgaatgaagcaatggacgttttgggtacgtatgttgtcaaccacctttctggtggagtttatgttgtaaccccgcttaatgaaggagagattgtaatcacaaaggaatctcacgaggagtgtaaagtattcttccggaagaagaaaaagtga

SEQ ID NO: 183600 - DNA, 600 bp, Klebsiella oxytoca
atgactccaatgcaacgccgtagacaaaatgccgctatgtcagaagtcgcggttgccacgcataaacgatacctcggacgcccagaattgcttaccggtattcagtctgcctggattaaatccctgctcactgtctggggggagagtctacgaggtgctacttttccccgcaagcctacaacgcattcatgctggtgggccatcaaaggggtcagatggtcagacaaagctctggagcgtttcactgctgcgcttgaacaggcaaggagggagggatttcgcgggcctaatgccctgaagagggctcagataattttatggccaaagccagagactagcgtcatagacagcgctatcagtgatgatgatgctgattttgtggagaaatgcgtgctcgatgcctttgatgttaacgaccctgtttatattgttgggctgagctattacacgacgagaaaaaaaatatctgatattaccagggagcttcagaagatagccccatggctgacggcagaccaggcaagagagcgcgtgaaatggtgccttaagatatttcagggaagggcatttctatctgcacgcaaaaacctgaggagttag

SEQ ID NO: 183601 - DNA, 1269 bp, Klebsiella oxytoca
atgatgcctgtacgacatcaggttttgctacgcctgctgctcgcctgcgccctgccgctgctggccgcgccgggccacgccgccgcgcagtttacgctggaaaaagtggttgagctcagccgccacggcattcgtccgccgacggagggcaaccgggaggccatcgaagccgcgacccagcgtccgtggacgcagtggaccacccacgacggcgagctgaccggccacggctatgccgccgtcgtcaataaggggcgcgatgagggcgcacgctatcgtcagctcggactactggcggcgggctgtccggcgagcggagagatttacgtgcgcgccagccccctgcagcgcacgcgggccaccgcccaggcgctggtggacggcgcctttcccggctgcggggtgatgattcatcacgtcagcggcgacgccgacccgctgtttcagaccgataaatttgccgccacgcaaaccgaccccgcccgccagctggcggaagtgaagaagacggccggcaatctggcgcagcgtcagcaggcgctggctccggtgattcagctgctgaaaaacgccgtctgcgcgcccgataagccctgcccggtatttgacctgccgtggcaggtggagcagagcaaaagcggcaaaacctcgattagcgggctgagcgtgatggccaatatggttgagacgctgcgtctgggctggagcgagaacctgcctctcagccagctggcgtggggcaatattacccgcgccagccaggtcaccgccctgctgccgctgctgacggagaactacgatctgagcaacgatgtgttttataccgcgcaaaaacgcggctcgattctgctcaacgccatgctcgaaggggtaaaagagggcgccgcgccgaacgtgcgctggctgctgctggtggcgcacgataccaatatcgccatggtgcgtacattaatggactttagctggcagctgccggggtacagccgcggcaatatcccgccgggcagcagcctggtactggaacgctggcgcgacacccatagcggaaaacgctacctgcgcgtttacttccaggcgcaaagtctggacgatttacgccgcctgcaaacgccggatagccagcatccgctgctgcgccaggagtggcatcaggcgggctgccggaccaccgccgtcgggacgctgtgcccgtaccaggcggcgctgacggcgcttggccgtaatatcgacccgcagtccgctccggcggtagagatggtgctgccataa

SEQ ID NO: 183602 - DNA, 1200 bp, Klebsiella oxytoca
atgtcgcaataccatactttcacggccagcgatgcggtggcttacgcccaacaatttggcggtatcgacaatccgtcagaactggtgtccgcgcaggaagtgggcgacggcaacctcaacctggtgtttaaaattttcgatatcaggggcgtgagccggattatcgttaagcaggcgctgccctacgtgcgctgcgtgggagaatcctggccgctgacccttgaccgcgcgcgccttgaagcacaaaccctggtggctcactatcagcactgcccgcagcacacggtgcggattgtgcatttcgatcccgagctggcggtgatggtgatggaagatctctccgatcaccgcatctggcgcggggagctgatcaacaacgtttactacccccaggccgccagccagctgggggaatacctggcccagacgctgttccacaccagcgacttttatctgcatcctcatgagaaaaaggcccaggtggcgcaatttattaatcccgagatgtgcgaaatcaccgaggatctgttctttaacgacccgtatcaggttcacgagcgcaacagctatccagccgcgctggaagccgatgtcgccgccctgcgcgacgatgcccagctgaagctggcggtggccgcgctcaagcatcgcttcttctcccatgccgaagcgctgctgcacggcgatatccacagcggctcgattttcgtcgccgaaggcagctttaaggccatcgacgccgagttcggctttttcggcccgattggcttcgatatcggcaccgccatcggcaacctgctgctcaactactgcggtctgccggggcatctgggcattcgcgatgccgccgccgctcgcgaacagcgcctcagcgatatccagcagttctggaccacctttgccgagcgttttcaggcgctggcggcggagagatcccgcgacgccgcgctggcctggcccggctatgcctccgcgttcctgaagaaagtgtgggccgacgcggtgggcttctgcggcaccgaactgattcgccgcagcgtcgggctgtcgcacgtggcggatatcgatactatccaggacgacgccatgcgccatgaatgcctgcgccacgccatcacgctgggtaaagcgctgattgtgattgccgggcgtatcgacagcgtggatgagctgattgcgcgaattcgccagtacggttga

SEQ ID NO: 183603 - DNA, 837 bp, Klebsiella oxytoca
atggcggaagagtggattctggaaaacgcgcatctgcggatgcgcgtcgcttctctgggcggcaaagtgcaaagtttatactcgcggcattatcaggcgccggtgctgtatgaaaaccccgccggcggcatgtttccgatgctgccgctggccaatcgcgtcgccgggaaccgctttatttttcagggacgtgagatagttctgcctcgccaccacgccgacgcgcatttttttctccacggcgacggttggctgcagtgctgggatatgattgcgcgcggcggcgactattgcgtgttacagctgcgtcggcagcatgcctgcggtttcgattacctggcgcagatccgctaccagctgctgcgtaaccagctggtggctgcgctgacgcttacccactgcggtagcacgcccatcccctatggctgcggttttcatccgttttttccttttgataagcgcggtacggtgcagtttgcagccgccggctactggccggaaggggagcagcatcttcctctcggctggcaaggccagttgcccggctacgccaatttcagccacgcgcagtacggtgaggatcgctggctgaacgtgggctattccggctggagcgggcgggcgagggtgagtagtgatgtgatggatatcacaattctttcgcaaactccgtggttgatgcttttcagaatgcagggcgagccgttcctttgcctcgagccgcaaagtcatccggtaaacgcccataacatggacggacagccggggctgcgggttttaggcgccggagatacgctgagtttttcgctgaaaatagacgtacaggggcgcgaatag

SEQ ID NO: 183604 - DNA, 1119 bp, Klebsiella oxytoca
atgaataacgcgcagacacatctgaaaatgggctacgtctggactatctgtctggtcgccgcctgcggtggtttactctttggctatgactgggtggtgattggcggcgcaaagccgttttatgaagcctggttttccattaccgacccggcgcagtccggctgggcaatgagctcagcgctggtgggctgcgttttcggcgcattaatctcgggatggtgcgccgataaactggggcgcaagctgcccttaatactgtccgccgtgctgttcagcgcctcggcgtgggggacggcggttgccagcagtttcgacatgtttgtggtttaccgcattgtgggcggcgtggggattggtctggcatccgcgctcagcccgctttacatcgcggaagtcagcccggcagaaaaaagagggcgctttgttgcgataaaccagctcactatcgtgattggcgtgctggccgctcagcttatcaacctgatgattgcggaacccgtagcgacgggggcgacgcagcagatgattgtggagacctggaacgggcagatgggctggcgctggatgttcggcgcggaactggtgcctgcgctggcgtttttggtgctgatgttttttgttcctgagtcgccgcgctggctcatgaaggccggtaagccggatcgcgcccgggccgcgctggagcgcattggctccgccgactatgccgacaggatattacgcgacatcgcgcacacgctggaaaaagataaccataaaatatcctacggcgccctgctggctccgcaggttaaaccgatcgttatcattggtatggtcctcgccgtcttccagcagtggtgcggaattaacgtcatctttaactacgcgcaggagatttttgcctcggcgggattcgatattaacagcacgctgaaatcgatcgtcgcaacggggatcgtcaacctggtgtttaccctcgccgcgctgccgctggtggataaaatcggccgccgtaaattaatgctgctcggtgcctcagggttgacgctgatctatgttctgattgccgccgcctatggcatgggcatcatgggctggcccgttctgctgctggtgctggcggcgattgctatttaa

SEQ ID NO: 183605 - DNA, 3276 bp, Klebsiella oxytoca
atgtacggttcggttaaggtctggcaggaaacaattacattacctacgtggacgacgggggcggaggatccgaaccccatgtttctggaaaagcgcgtttatcagggttcctccggcaacgtctatccctacggcgtgatagataccctgaccggcgagcgtgaaatgcgcgattatcaggcagtatggatggagaatgatttcattcgtatcatgctgctgccggagcttggcggacgtattcaccgggcgtatgacaaagtcaaactgcgcgattttgtctattacaatgaagtcgttaagcccgccctggtagggctactggggccctggatctccggcggtatcgagttcaactggccgcagcatcaccgcccgacgacctttatgccggtcgatttttcgatccagcgcggggaaaacggcgtgcagaccgtatggatgggggaagcggagcccatgcgcggtttacaggtcatgaccgggtttactctctatcctgaccgcgcgctgattgaaatcaccggtaaggtttttaatggtaacgcaacgccgcgtcatttcctgtggtgggccaacccggcggtcaaaggcggcgatgctcaccagagcgtgtttccacccgacgtcaccgccgtattcgatcacggcaagcgcgatgtttccgcttttcccatcgccaccggcacctactacaaagtggactattctgcgggcgtcgatatctcccgttataaaaacgttccggtacccacctcgtatatggcggagaaatcggactacgactttgtcggcgcttatcaccacgacgagcgcggtgggctgctgcatgttgccgaccatcacgtctcgccgggcaaaaaacagtggagctggggctatggcgactttggccaggcgtgggaccgcaatctgaccgacgaaaatggcccctatatcgagctgatgaccggcgtctacaccgataaccagcctgactttacctggcttgcgccttatgaagagaaggtgtttgtgcaaaacttccttccctacagcgagctggggatggtgcaaaatgccaatacgcagctggcgctgaagctggttcgtgagacggagcagctgcagctcggcgtttacgccattgcgccgctggaaaatattgttgttgaactcagcgcggaaaagcagccgctgtatgaaactcagcttacgctgaagcccggcgagagctggcagcatacgctgccggaaaatgacgcccggcgcttaaccattagggtgaaaaccgcagacaaccagccgctgctggattatcaggaacatattactcagcagacgcccctgcccgaacctgcctgcgcgccggcgatgccggaagagattcacaacggcgatgagctctattttatcggccagcatcttgaacaatacaatcatgcaagccgctatgccgcggattactatcgccgggcgatagccctcgatccgcaggattaccgcaataatgttgccctcgggacgctggcgtttaattgcgccgattgggggctggcggagcaatgtgcccgggccgcgctacttcgcgcccatcgtctgaataaaaatccgcgcgatggcgaagccagtatgctgcttggcagcgcgctggaaaggcagggcgatgaagctggagcatgggattgctattacaaagcgtcctggagcggtaactgccgcgatgccgcctggtgggcgctggcaaggctggcgatgaagcgtggcgataccgccgacgcgctggaaaaggtcaacaccagcctgcagtttaacgccagcaaccatctggctatggggctgaaagcgctggcgttagcgaacagcgggcgggcgaaggaagcgcaggcgtatattgtcgtctgcctcgaacaatacccgttgagctatccgctgcactgcgcgcgctggatgattgcgccgggcgatgaggcgcgcgcgagcctgctgcgcgtaacggggcgcagagggatcaacggcagcctgctggcgggctggctgctctccatcggtcagaagcaggcggcgaaggaggtgcttgaggttctggattgccaggaggcgctgccgatgctgtggcgcgcctcgttaagcgatgatgcgaataaacggcaacggttaattgccgaagccgagcgctgccatgcgcgaaaagtgcgtttccccaatacgctcgatgaagtccagatgctgcaaaccctgagcgatagtgcttttgcccgctatctgctcggttgcttctggtacagcaaacgtcgctatgaagaggcggtcagctgctggcgcgagacgctggaaaaatctcccgactatgcgcccgctcaccgtctgctgggggtctacgcctggaacaaacaacaggatgccgcgcaggcgctggcttatctgcagcgggccgtagagcttgaacccgaaaacgcgcgcttcctctttgagcttgatttcctgaaaaaatcactgggtacgccggtaaacgaacgactggaaacgctggcggtgcgcaaagcggtggtgctgaaacgggatgacctgaccgctgagctgttaagcctgtggaacgcagccggccattacgccgatgccgccactattctcggtacgcgcgtatttcatccctgggaaggcggggaggggaaagttaccggccagtatttgctcaatcagctccatcgcgctttacagttgatcgaacgtaaggcgttcacgcaggccgctcgctgcctgaatgaagcgttacgctatcccgataacctgggagaggggcggctgcccgggcagacggacaacgatatctggtatttgctgggctattgcgcggaacaggctggggatgcgcaccgggcagcggaatattaccagcttgccctgcaagggggctcaacgctggacgccgggcgttactacaacgatcagcccgccgattaccttttctggcagggcatcgcgctgcgtaagagcggtaattcgacgcaggccgagcagcacttccagaattttatcgcctgggccaggcagcatcgggatgacgttccgcaagccgacttttttgccgtctctctcccggatctggtggtgctcgatgtttcagcgcagcggcagcatcagcagcactgcttgtttattgaagcgctgggccatctggggctgggcaacgtatccgccagccagcaggcgatgcagcggctgctgcagctgaacccggctcatgataaggcgcatctgattcgccacgccctgcaaagcggcatgttttcctga

SEQ ID NO: 183606 - DNA, 1011 bp, Klebsiella oxytoca
atgctagccatcccctttccctggtacaccctgtctattttgcttattttactgttgaaggtttgccggcaacgccccgcgagttatcgcaacagcgctacctttattgcgtgctgttcgctgctggttctgatgtcagccctgcgctggcagttcgatcttattcaacttcgccagctgcaatctgtcatcgcgatcaccctgccaccgctggcctggcactgctttgcatgctttacaggacagcgcttacagcaaaaaattgccgcttttgtgggaccgccgacacttgccctggtgctgaacctgactgctccggcaaccacggatgcagtgctgatgctgctctatgtcggctacggttgcgccctgattcgatcggcgatgctggggagcgatgcgttcattttcaggcgacttagcgacaacgattcaacctcatcactcgcttttatcgcagggggctttctctgtttttccggactgaccgatctggccatcgcactcaacttctatttttgtcagggccagcaggcaccactgctggtcgtaatctcgcaggctatcctgctgccatttgtctgttttgccattgttggtaaaagccgtccgtcactcccgatcggggagccggcattgccacccgaagagtgtaaagagaacaatagtgaagcgttcctctcgacttatcagcgggtcaacacgctgataagcgagcagaaactgtatctgaatcccgacctgacactgaatacgcttgcgagaaaaaccggggtccccgcgcgccagatttcaaaagcggtgaacctgacccgcggctgcaatgtttcacaatggatcaacggcttgcgcatcgactatgcgcagcagcttcttcggaacacagacctgccgataacggaagtgatgctggaggcgggttttgccaccaaatcaaactttcatcgagagtttcttcgtatcagtggtatgaccccgacggattaccgccggacggcggatggcggatga

SEQ ID NO: 183607 - DNA, 1041 bp, Klebsiella oxytoca
atgttacggcccctttcttgctttttttttcttctctttagcatcgcatcgtatgccaacacgggttttcgccagctaaatatccacgagactaactcccgtcctctcgatatcgctgtctggtaccccacagctggtaccagctcgccggaaaaagtgggtgataatattgccttttacggcacatctgctctgcgcgatgcggcaccggaagcgggcgagcatccgctgcttctgctttctcacggctatggcggcaactggcgcaacctgaactggcttgcaacagaaatggcggctcagggctatattgtggcagcggtcgatcatcccggcacgacaacatttaacaagcggccgcaggatgcgaaggaactctggcgccggccgcaggatctccagcggatgatggtgaaaattatcacgaccccctctcttgccggaaaagttgatgcgcagagaatagccgcagccggacactctctcggcggctggacggtacttgaactagcaggggcacgctttgacgctacacgctttcagaatgattgccgggcacatgccaggttgtcagcctgcaagttaattcagacgctgggaattgatgacgctgacaggcgactggcagcagacaaaggcgatccggcaatcaaggccgttgtctcactcgatctgggcctggcccgcggattcacaccagaatcactttctcagattgcagtgccggtactgataatgacggctcaggcggacagcgaagagttacccgccaggctggagtctggctacctggctgaatatatccctgccggggtaaggcaggtagtgcatgtcgaaggggccacgcactttagttttatgcagcagtgcaaaccaggtgcgatggcactaatcgctgaaaaagagccgggcgaagagattgtctgccaggatgggggcacccggagtcgggctgcgattcaccgtcaactcgcccgggatatcagcgccttcctcaatcatgccctcgactttcatccgccatccgccgtccggcggtaa

SEQ ID NO: 183608 - DNA, 585 bp, Klebsiella oxytoca
atgagcccggattacactgaccctaagttcgctctgttgagtgttgggcgtgggtattttgacacacagatagcgcccacaactacgcagactatcgttgctattgcaaaagtgccgactacaaccggcgttattgcgtcaaactattataaagacggcagcaaccagattagcggtgacgcgttcctggagaatatctctacagctaaatcactccgctattacgcacaatccagtgctaacggcacgactcaggcatcaagggacatatcatcttttaatacgggtgatttcggggttgtgggtggagttatttcgtctgcacccgcggtgggttcatggaccatgtctgattcttcagacccaggcgtttctactgcgactatgtctgccagggtattaaataccaggacattacgtatcggtgccagctacgccacaaatgagtttgacggtgatatcggtatcgcggcggtgctgatttacaataccgatatcggaggccaaaacatgaccacagttatgaactggatgcgtaatgttgttggtgtgcaggcgggtatctggagcgcaccgaaggggtaa

SEQ ID NO: 183609 - DNA, 375 bp, Klebsiella oxytoca
gtgcggccagtggttcgccagttgacggtccagcgacaccctctccatcagcgccgccacctgctgatatttctcctgccggctgccgtcgaggccccaggcgatattgtccgcgacgttcagatgggggaacagcgcgccctcctgcggcacgtagcccaccccgcgcaggtgggcgggaataaatgtcccctgcgcaaacagcgtgcgcccctgcataacaatgcgtccgctatccggcgtttcgaaacccgcgaggatccgcagcagcgtggttttaccggagccggaggggccaacgatcgccgtccggctgcctgcggccaccgtcagattcaggttttcgagcacccgcgtaccggcaaaagattttga

SEQ ID NO: 183610 - DNA, 921 bp, Klebsiella oxytoca
atgctgactctgacagtgattcggattctgacagcgattcggattctgacagtgactcggattccgacagcgactcggactccgacagcgattcggattccgacagtgactccgattccgacagcgattcggactctgacagcgattctgactccgacagtgactcggattcggacagcgattcggactctgacagcgactccgattctgacagcgactcggactcggatagtgactcggattcggacagcgattcggactccgacagtgattcggatagtgacagtgattcggattcagacagcgactccgactccgacagcgactcggattccgacagcgactccgactccgacagcgactccgactccgacagcgactcggattccgacagcgatgccgattccgacagcgattccgacagcgattcggactcggacagcgactctgactctgactctgacagtgactcggactccgacagtgactcggattctgacagcgactcggactccgacagtgactccgattctgacagcgactctgacagcgactccgattccgacagcgattcggattctgacagcgattcggattcagacagcgactcggattctgacagcgactccgactctgacagtgactccgattcagacagcgattcggatagtgacagcgactcggactccgacagtgactcggactctgacagtgactcggactccgacagtgactcggactccgacagcgactcggattctgacagcgactcggattcagatagcgattcggactctgacagtgattccgactccgacagtgattctgacgctgacagtgactcggattcggacagcgatgccgactctgacagcgactcggatatcccgcaggccaatgcggataccaataccgcgctga

SEQ ID NO: 183611 - DNA, 540 bp, Klebsiella oxytoca
atgcgaaatacatcaattgatatattaaagcttactctttcattctttgttgtttttattcacatgaaattattggctaatatatctcctactgttagtttttttttggtcaatggtttattcagaattgcagtccctgtttttcttgttataaatggttattattttgcgtcagtcaaaaactttcatgactacaaacgatttgctctgaatttattttcgatttatggtttatggatgggggtatactctgtctattggttttctaaagaaccattgcttgcaaatttggtttatgttttttttggttattatcacctctggtatattgtgggtttgattttttcatctttttttctttttataattagagggtggaagtcttactggctccttttgatgtcattttctttatatattctcggtgttttgcttcagtatatactgagcgtaaaaaatataagcgggaattggggggggacaacaatcaattatttgtatctttatcgtagtttttatttgactgtttgccttttttga

SEQ ID NO: 183612 - DNA, 918 bp, Klebsiella oxytoca
atgttcttaaacgcaataagcactaaaactaccattttatcgaagatgtttaagttagcattaaacccttcaaaaactcagttagaacccgtcttcctcgaaattaataagaatgaagtcgcttctgtacatcagcaattaattccaaaagtaatctggatgtattgggatgatgagaacataccgggtgttgttagtttatgctatgaacaaacaaaaaaaatttgcgaaggatatgatatattattacttaataaaaaaactgtacttgagtttatcactttgcctgattttaatcctatactcccaaaagcaattgttgctgactatatcagacttaaactactagaaaaattcggtggtatctgggtagacgcaagtgtcttcataacagaagattttgattggtttataactaaactcggttctcatcaagcatttcttttttattctgatgaatgtactatcgacataaaaaaacccatttcagaaaactggtttatcgctgcgccaaaagggagtaaatttatcaaagaatggtttgatgaattctctagatgtattactagtgagcaaccactaaatttttattctgaacttaaaaaagataaaaaattgctccagaatttatccaaacctgattatttgctttgttatatttctgcaattgttgttttggagaaatttccatttcctattctatacgcatcatctggttctgtagggcattattttacgtataaacacaactttaatagctaccttatcgctacggaactactactttgtaataaaaatgatgtaagtaagccaaagttaattaaaatgaccgcaggaaccaggaatgttattgacttttttttacgttataaattattcttgtcaacgagtctgctaggatccgaaatgaataaataa

SEQ ID NO: 183613 - DNA, 1641 bp, Klebsiella oxytoca
atggataagagaacaacacggaagcatacaaagacattgatttttttcttcaccctatccattacaacaaacatcctaactcttgtaatgccattatcctttatggctattattgacagagtgataacgacaacagcatatgccacgttaaactcaataatgattatactcattgtagttgttctttttgaattaattattgatttagctacagctagattgctaaactggcttaatgctcatataacctatgattacacgtgctctttcttgaagaacatattatattttaatatcttatgctttaataagtttggtacagctgacataatagcaaggttgaacgagttagaccgagttaaaacgctaaagctaaattggttaacgggttttataactgatataatttttatgttcgtatatattattttcatgctaacaataaatattagcatgtctgcattggttttaataactgtacctttacatataatacaatattctgttctacgaaaaaagatcagatcttataatgaacaactgtttaatagcaacgtgtcgtataacactaatcttatagaagcccttgacggtattactgtagtcaaaaattttaacagtgaaaacctgcactataatcaaattcagtcgtctctatctggtgtactttataatggttttaagcttgcaaatttaaattcattatcatctacaatatcatcgttagtaagtaagctttcggatatattagttcttacgttcggtgcttatatgataatgcaacagaagataacccttggggagttaatagcttttaacatgatgaaagataaagcgttgactcccttaatgagattagcaaacatctgggatgagataattcagtataaagtgtctcagcgacgcatagaccaagttattaacgaaaacagtgaatttcaagaatccgatttcaaggaaaaccaagacgttttttttaaatctgtatcgtttgatgatataaccttttcttatgccccagataaggagattttaaaagaactttcgctgtcaattaatgagccgggattgtattgcatattaggagaatctggttgtggtaaaacaacattacttaagctgataacaagggttgtacctttatcaaaaggagacataagaattgataacagatcaatcaatgacattagcctggccactttaagaaataacataacgtttattgatcaagcaaatactctttttacagggacaatccgagaaaatattttaaagtacagcaccaggaaagatgaccactggctcaagcattgtgctcaagttgctgaggcagaagagtttattaaacatttgcctgatggctatgaaactaagatttcctctcaagtatctaatttatcaggtggacagcaacaacggttgtgtattgcgagggctattgcaagaaactctccaatattaatattagatgaagctacaagtgctcttgatgaattaacagaaaataaagtaataacaaatattttagaacaccaatctgataaaataataatttcaataactcaccgtttaactatttctaaaatgtcaaagagagtatatcaaatagaagaaggtaaactgataaccgcgaaggtttag

SEQ ID NO: 183614 - DNA, 1272 bp, Klebsiella oxytoca
atggaaaatatcggacaaccttcagattccgtgaatacctcaaacaataaaatgcattctattaaacatccaaaatattacgcaacccctgcattaattagcatttttgtgacaattttgatatctttgtgctttatatttaaaatagatataatttccactggtcggggtgtaatcattccatcatctgaagcaaaacatttgaaatcacccgtgtcgtcagttattagcacagtacattttcagaaaggtaaatatatccaagaaggagataaactcattaccttcgacatgagtagggaaagaggagaaatgagtattatagaaaacaatatagagagctgtcaaaaaaacctccaaatgctcagtcgtattaccgacattgattataacaagctattaaagactaacttcgttaaattaatcaaattaagagataccgtaaatcagatagaaggggacatagaattaatccgatcatccatcaatgaaaatcaaacgaagaaaaaacaatatgagactgaaaaaaattaccttaatacggttcttgttaaaaacaacaaaatattaaaaagcggtgcattatctgaagttgagatgagcgaaataaaaaagaattttgatagtgcggtacttagtgtcgaatatgaacaaaataaaattgaatctttattgaaaaacataaaagtcaaggaggacttaattacgcacgaaattgacctttataacttagaaataaacactcaggtttataatgaaaaattacgtttgaatgatttaaagatacaacgtaatattttaaatgacagacttaaacatgaatatgttttttcaaactttacaggctatattgatgatattgaaaaaggtttaaactatggttttattgaagccggagacgattttgctaaaattgttccttccaacgaatctcttcttctggatgttctaataccagttcgtgactctggattcatatctaaaggggataaagctgttattaaattagattcatatccctatactcgttatggtgtaatatatggcaaagtgaagcatatatttactgattctaaagtaatagatggtgaatcatatttcagtatatatatagaacttttatcaaagaatattaatattgatcataaagcttttgagttgaaaacaggcttgacagcatccgttgacattcttaatgggaagaggaggatcatttattatttcattgaacctataattgataacatcaagaatagtttaaaggagcgttga

SEQ ID NO: 183615 - DNA, 1419 bp, Klebsiella oxytoca
atgctatatcctttgtataaaaatggtaggctgcatgagtctgtattaatcccgttcaatgcctatcacgcagaaaaaagtaaagtattatgggtaaatatagaattatttcatgaatatggttatttacaagataaacattatattgatgaagattgcaaatcctggatcatcggagagttctcatatgtaactgatgaacagttttctaattctaatcaacgtatattttatgctgaaagatatggaggtgaaggtatagattataatggaggaggcggtcggacaggattatataaaaactttcagataaaaggtataggttccacccctttaataagctatctgacatctgtgtcttataaaaatggacgctgtggtttagcggaagtgataaaagacgcaatatggggtgaagtcggtaatataattttaccgcatggagctgccagatgctttgcgctccttgaaatagagtgtcccgtatcagaaaccaagaggtttttaagtgtaagagaaaatctagtacggcctgctcatttcatgcgggctccgtactttaaaccaaaaggccgttttgaaaataactcaagcgacggaacccgtgtgttaaaaaacaaagaagcgttgaattttaatctatacagcatatctaaatcttcgaacgtgatagatggattgcatataatgtatgctcgctgggctgagcaagttgcttttactcaagcccatcgtttgtttcatggcgcattaacaccctccaacatttgcttggatggaaaatggattgatttcggaacaatgtcaagtattggaaggcattgtaatgtaattatagctcgtggcaaagaccctttttggatggaacctaattctattgccaagatcatagactcctttctttataatgctaataaatattacttccaggagccactcgattacctttctgaatttgacacattcaaaacattctatgatttttacgcaaaaattaatattctcaaagcgctcgggattcgatttataaaagattacaatcctgaatttactagtcaagttaattcactaactaatttaatatatacttatctacatattaattcagaggagtgtttttttggcataccattgtttgatgaatcaacacctgcttataagatacacactataatattaggccttgtattaccaacacagaatattgaaaaacatattatcgaattaataaccaagttagaaagtagaagaataattacaatccagaaaacctctatgaactatgactttttaaatgtggatgtaattgaaaaggaaatagattttattgaatcgatttcaatcgattatgaatctgtagtagatatgattaatcaaaaagttttcagggcaaaggaggtatttcatgcgaatccatga

SEQ ID NO: 183616 - DNA, 2166 bp, Klebsiella oxytoca
atgtcttcaattaaaaacagagccgttgaaaaagaggcggatgaaatcgatttaggccgtttggttggcgaacttattgaccacagaaagttaattatttccgtaacttcattatttacattggttgcactcctctatgcattgtttgcaacgcctatctatcaagccgatgctctattacaggtagagcaaaagcagggtaatgctatccttaacagtttaagccagatgttaccagacagtcagcctcagtctgcgccggaaatagcccttttgcagtcacgtatgatcttgggtaaaacagttgatgacctgaatctgcaggctaggatagaagaagataaattccctttattgggtaagggatgggcacgtctgaccggcaaacagccgggtagattgacagtaagcagactttatttaccatcagaagatgacttagatgcaccttcgctaaagttaacggtaaaagataaacatcattacagtgttatttttgaagataatttgatgcagggggaagttggtgttttattagactccaatggtatttctcttaaagttgatagcatagaggcacaaccaggaactgaatttgttatatcttatgtaagtaaattaaaagcaataagtgatttacaagagatattcaatgttagcgatcagggtaaagataccggaatgttaagtctttcattaactggtccagatcccttattgctggaaaaaatacttaatagtatcagtaataattatctggcacaaaatgttgctagacaggcggcgcaggatgccaaaagtttagaatttcttgatgagcagttacccaaagtacgcaacgacttagatattgcagaagataagctaaatcaatatcgtcgacaaaaagattcagttgatctatctttagaagcaaaatcggtccttgagcagatagtgaatgttgataatcagttaaatgaattgacctttcgtgaatctgagatttctcagctgtataccaaagagcatccaacctataaagcgctaatggagaaacgcaaaactttacaggatgaaaaggaaaagctaaaccaacgtgtttctgtcatgcctaaaacgcagcaagatattttgcaattaagtcgggacgttgattcaggacaagcggtctatatgcaactcttaaaccgacagcaggagctcaatatagctaaatcgagcgcgattggtaatgtaagaattatcgataatgctgtgtcacaaccgaagccagtgaaacctaaaaaaatactaattttactcgttggtttttttatagggggaatgatatctgtagcactggtaattctacgtatatttttacgtcgaggaattgaaaacccagaacagttagaagagataggcattaatgtctatgcaagtattcctgtatccgagacctttgcgaaaaaagttatacaagcgccaagtttacgcaagagaagtaccccagagtatcaaagttttcttgcgctggaaaatccagcagatttggctatagaagcgattcgtggtttacgcaccagtctgcacttcgcaatgattgaagcgcggaataacgtactgatgatttccggtgccagtccaaatgcgggtaaaacttttgtcagtacaaatcttgctgcggtgatttatcaggctggaagtaaggttttatttattgatactgatatgagaaaagggtatacccataaattatttaattgtagtaatgaaaatggtttatcagatgttttatctggcaagatagatattactaaggcgatccaaacggttccatctgtgggattcgattatatttctcgaggaatagcccctcccaatcctgctgaattgttaatgaatcgtcgatttaatgagttattgacatgggccagtcaacattacgatatggttatccttgacacacctcctatcttggcagtaaccgatgcggcaattattggccattatgtggggacaacgctactcgttgctcgttttgaacaaaatacagtgaaagaacttgaagtaagctttaaacggtttgaacaaagtggtgtccaggttaaaggttgtatattaaacgggatcgttaaaaaggctagtagttattacggttatggttataaccactatggatattcctacacggatgataaatag

SEQ ID NO: 183617 - DNA, 306 bp, Klebsiella oxytoca
atgaaaacacaggtggcgattatcggagcgggcccgtcgggactcctgctggggcagttattacatcacgccgggattcagaccgtcatccttgagcgacagacgcctgagtatgtgctggggaggatccgcgcgggaattctggaaagcggaacggtagaactgctgcgcgaagccggggcggcccggcgaatggatgcggaagggctgatccatcacggcgtcgaatttttgtttgagggcaagcgcgtaccggttccgctaacggaactgacggcaggcaaaagcgtgatggtgtatggctag

SEQ ID NO: 183618 - DNA, 1872 bp, Klebsiella oxytoca
gtgattttgaataagctggccgtttcactgtcgccgatagtgaatggcgcgctgagcttcattgctattatgcaacagcatcaactgatgctggcgctgttatcggggctgacgatgccgtttttcgcgtcgatgaaaagcgatgaacgtcaaaaagccccgttgtggcaaaagctgattattgcttttgccatgctgtgttttctttccggtaccatggccccggttgttatctggattttccagtggctttatcaaggccgtgtagtcgccagtattcccgttctggcatggccagtgctgattatctttaccgtaacgggttttattttgcatattctgctgcgcagggtattaacacctgaattagacaaaataaagaagcgcctcgtcagaaaaaccacgcttgaacgggaattacgcaccgatgtccgtacggtgaaatccctgctgccggaaacactgcattataatccgctggattatatcgacctgaacaaagggttatttatcggcatggaccgcgatactcagccgatgtacctgccgttaaaagactggcaaaaacaacacgcggatatcatcggcaccaccggcgccggtaaaggggtggccaccgggatattactttaccaaagtattctggccggtgaaggcgtatttgtgatggaccccaaggatgatgaatgggcaccccacctttaccgaaaagcctgtgaagatgccgggaagccctttgccttaattgacctgcgtaaaccccaataccagttaaacctgattgaagagatcaccgccgatgaaatggaagagctttttgttgccgggttcagcctggcagagaaaggtcaggaatctgacttttatcggattgacgatcggaaagcggcccggatagccgcacaatttgtcacccgtaatactgcctcaaccattcgggatgtttataacggcgactacgttcagggtattgcagataagataaaagcctttttcgggaaaattgaagagcttgccttgctcaatgccatcaatgcgccgacaggattttcgcttaatacgatatttgaggaaggcggttgctgttatgtgattggctcaatgcgcaacagcaaaatcattaccgctcaacgtatgttgctggttcgcctgtaccagctggcagaaaggcgcgagcgagtgaaaaacgtgccccgccccattgctatttatctttccgaactgaaataccatttatccaggcccgcgctggagggtttaggcgcggcacgcgataaaggtgtgcatattattatggaccatcagtcgattgccgatttaaaagactgtccggcagatttgaaaggtgacgccgttgtcggcgcggtcgttgagaacgctaaattcaaactggtttatcgtgtcatggatccggacaccgctgaatgggtagccaggatgtcaggcaccatattagtcgatgatgaggtccgcaaagcgaaaaccaacgccgtgctgacagagactatcgacagcgaacgcaccatcaggcaggccgagcgtttctttaccgacagcaatatgatcctgaacctacccgattttgtcagcttcatcttcacgacaaaagcactcccctctgcttcgctgatttcgcccatcagggtgaaaaaacgcgaactggagatctgtgccatgtcgcccgcgattgccgccaccgcagcaacaataaacatcgcattggattttagcgaggaggaaacttcccccggacccgcatcaacgccggatatcacagcaactcgatccgatcttttttttgatacggacgaaaaagacacgacaacaccgaataccaataaagaagaaaacccgtcatggctggatttttaa

SEQ ID NO: 183619 - DNA, 747 bp, Klebsiella oxytoca
atgctcatcaccgcatacagcgaacgccagacgcgacaccgcgaaaaaatacaacgactgctgaattttctgaaggaagaaacgtacagtgactttaaaacgctgatgctgcttttcggcttcagggatcataaatcgctgtattccctgctttcaaaagtcgagggaatgggcttaatacaaaagcacgtcctggtatcacgcaccatgaaaatttcattgtggggaataaccagtgacgggatagccgtggtgttaacacccgatgacgtgcttttcccggcacggtttgagccgtcaaaaattaccggctggacgctggagcaccaccttgataatcagtcagcccggattatccttgagcaaaaaggcgcatccggatggataaacggcgatcgcacaaccttcctcagccgttatcaggtcagtcaccgcccggacggtctgatcaccctgcccggcggcaccgtgatcgccattgagaccgagcgccgtctgaaaaccaaagcccgttaccagtcgatcatcgccagccatttgctggcgcggacacgtaaaaactggatttacgttttttatatcgtgccggacccgcagaaaaagcgcagtcttgaacggcactttgacagcatcaggcacgtcatcgttaaccatcagcacatcccgctggaaacccgccaccgaaatgtcttccgcatctacacgctcgacgagttgcaacggctggatttaggcaactgcatatag

SEQ ID NO: 183620 - DNA, 288 bp, Klebsiella oxytoca
atgaacagagaaactgatcgactttcggacgtactaatcgaaatgagcgcaaaagcgctggtgacatggatgacgcattccgcattgcaggacataccgcgtgaagtattactggttcgcggcaatgattttgtctatgcccttcacgcaaattttgtgctgctgcgtgatgttctgtcagaaacactggaagatattgaacagcagagccatgacctcgaagaaagactgaataatctggaacagcggctacttgcgcttcaggcagttgctggtaaccgagaatag

SEQ ID NO: 183621 - DNA, 1161 bp, Klebsiella oxytoca
atgcaaatagctggcggtctttatcgtgaactctgtgagagtcccttctgggatatgaccttcgggtctggtggccgtgcggctatggctatagcttcactttgctcagattcagagttacatacctatgcatctgcatccgatgaaagcgctatttcgcaactaaaaagccaaggtatccgtataactacaaattttcgacctacatctattgcctttgcctatttccatccgctttcggttcctcacattgaaccatccatcaaaaaaattgaacgccaaaggccaatccatgtgactggagaagcagtgttacgcttcggatttttggagggagatgctgtcgttcatgctaatagggctgtttacgaccctcagacatggcgtaatccccaagccttttacgataacggttctaaagctaatgagctttctatcgtcctaaatgaattagagttacagcatgcaacgggtattgcacagcaagaagaagcagtatctcagctaataaagatgcaaaatgcttattctgtggttgttaaagctggaataaagggtgcaaccgtgtatgagagaacggggaaaattacttatataccagcatatcgctcttcgaaagtattcaagatcggtacaggagatgtatttagcgccatatttgcatttcattgggcctaccgaggttgttcagccgaaaaatctgctgatttggcttcgaggtcggtcgctctatattgtgacagccgccagttaacttttagccaaacattaatgccaaaattgtcgccagtaacctatattccacaggcaaaaatttgcttagaaggagccgttgattcattaggtcaacgatatgtacttgaggaagctcgtttagcattgagtgagctcgggatggaagtgtactgccctgaactatcattctccactttggacatagtggctgatgctgtgctggttgtagatgatgggttaaatatcgacgccaagaatcgcattaacaatgctatagcagaagatattcctgtcgtcgtgctacgtgaacggattactacaaatacgacagagattaaaagcgcgttaattacaaatgatttcactacagcaatgtacctaaccgcctggtcaattgatgcttatcaagcgtcaactccacaataa

SEQ ID NO: 183622 - DNA, 1383 bp, Klebsiella oxytoca
atgtcagatgtgtatataatttatccacatgagaatgttaatataacccagcggttgcatgaactcctttctcaacaatgggatgtatggtgggatgacaatattgttggtgaatggagacctgctattgaaaaaaaccttgccgagacgaaatgtgttttggctttgttttcagacttttcgcgcaaagcgaccgtcaccgacgaactaagagtggctcaaaaacatactcaaaatattatcgggttaacaatagatcaaagtgatcctccctatccttttggaagtttaacgagtattgaccttcgcgactgggatggcgatgcatctcatccaggtttcctacaactgcaaagaaaaattgcacgagttgtattgcctcgtaaggcccctagtaggctgcaggcaacctcaggtagtaacttacttattcctaacatatttatgtctgtttcatctcatgagactcagttctcaccttctgatgcattagaagtgctcagagtacataaaacatcatcaatccttgtgtcagcctatgatttagtgaaatcccatgacaaaagagaaatgcttagcaaaattaaagcataccgcaaagcaggtggcttcgttctgattgattctggaaactacgaagcacgtcgattgcaggataaagaatggaaacccattcactacagacaagcactgatggatacaccccacgattgggcattttgttttgatgtggcaaaaccgaaccccgaaccagaaaaagccatagagcagatagtgaaggctgttaaaagggattccaaattcacaactgcaccaatgctacccatcgtgcatgtttcacaggatgatgctgggctttctagattacctgtgatcgtaaaaggtatttctgagcgactaaaccctcaagttatagctataccagaaagagaacttggcgctggacttgctgcccgggctagtacaatgaaaaaaataagaaaatccctagatgagctcccatattatcaacctgttcatctgttaggtaccggaaatccatggagcattgcagttcttgttgctgctggtgcagatacattcgatggtttagagtggtgtcgttttgcaattgatcctcggcgggggcggctacatcacttccaacatttcgattttttcaaaaatagtggagaacgaacgccttttcttgacatggtcgatgctcaaacaactattggatatgcagggcaagtagcattctacaatttggaatactacgcagaatttggtcagcttatgcgtagtatgatatcgacaaaagatgctgaacccttcgcgacgggagtaacaagattgttcagcaatgagttaagaaagctttttcctgaggtttttccatga

SEQ ID NO: 183623 - DNA, 699 bp, Klebsiella oxytoca
atgaataattacacaccggaggctttatctcgagccgtaaaagccttatgtgcagatctagatactcgaattgagtgcgggttggtatctgatgaacgctatttatggtgggaactctcatgctgcatactcagcagccaagtgccttaccctcttgctgtcgctgcagctgatatcattgacaaagagcagttgcttcacaactcttacgaaaaccgtgacgaattgataactcttttgtatgcagttcttaagagaccattggaggttgagggaaaaaaacggagttatcgctttcctaaagctaaagctgaacaactagctgcaacacacacagcagttgcccaaacggggaaatcactaaactcattggttagctgcgatgtatattacgtacgcgcatggctggtggctaacgctcatggtatagggccaaagcaagcaagcatgtttcttcgcaattgtggagcaacttatgacttggccattttggatcgtcatgtattagattatatgtctgcgcttggtatttactcaggcagtcaatcatctatttcaggtttaaataaatatggccaatacgaaaataagctacgtgaccatgcagagcaaatgaactgtcaagtcgggctgctcgattgggcaatttggattgtaatgcgagttgcgaaaagaaattatcaggaggagttagcatga

SEQ ID NO: 183624 - DNA, 603 bp, Klebsiella oxytoca
atgagcatcgttactctcgtttctggcggacttgactcgacactggtcgctaaattggcgcaggaagaagggctgcaaattttccctctctttatcgactatggacaacgagctcgggatagggaacttgcagcgtgcaagttatcgatgagtacattgggactgcctgaaccagaaatagcaaatttggctggctttggcaaactaatacactctggcctcaccgacaaatcattgcatgtaattaatgatgccttcactccggggcgaaacctgctttttttactaacagctgctgcctatgcttatcagaaaaatgcagatgctatttctattggtctactccatgaaagcacaagcctctttccagatcagacgtcagagtttcttgctagggcggaaataatgatttcattatgcatgggcagaaaaattaaagtacttgcccccctttctgtttttactaaatcagatgtggttatgttagcaaatgaaaaaggaatttcaaatacgtactcgtgtcatatgggtaatgaaaaaccttgtggaaactgcatctcttgtaatgaatttaagttcgaggatatgaataatgggcggtag

SEQ ID NO: 183625 - DNA, 468 bp, Klebsiella oxytoca
atgggcggtagcagcacaggtggatggagcaggcttggagatgtgagagccctcgaacaaaaagctaaagaagcacttaatgagggtagaagaaatgtattcatcagttttgcgactgaagacatgaatgaagttaatcttctccgagcccaggctaaaaatgaaaataatgatattgaatttaatgatcactcagtccgagagccttataacagtgaacaagcagagtatattaaacgcaagattagtgaacgcattaatcgcgcatcagtgacagttgtttttgtttccgattcggtagtgcaaagtcactgggttaaatgggaagtagaaaaaagccttgaactcgggaaaaaggttatagcagtacaccctggtacacattttgatggtgttctacccaggtggatttctgataataatataaaaatcataccgtggtctaatttatctactgaacttaaataa

SEQ ID NO: 183626 - DNA, 1254 bp, Klebsiella oxytoca
atgcaagtatgttttgtcgtgatgggttttggtaaaaaaacagattacgaaactggtcgtactctggatctaaatgctacttacgaaacgattatccagcctgcagttttgagtcgtggtctacgttgtgttagagctgatgagatttcgcagtcgggtattatcgatgtccaaatgtacgaaatgctgttgcgcgcagatttagtcattgcggacatctcgacaggcaacgtaaacgcgatttatgaactcggtgtgcggcatgctttaaggcccaattcaactattataatgaatgaagatcaaggtaagcttcactttgatcttaaccatgttagtaccttgagatatgctcatttcggtgaggatatcatggggcgtgaggcgataagagccatgaaggctttaagtgaactgatagaaagggcgatggctgatcgaattattgacagccctgtctatacatttcttccaaatctgcttgccccaagaatgtcagacgatcagtatgttgagatggtcgatgaggctgaggctgcgcaaaagaaacttgctcatcatatgtttgaaggcgagaagtttctaagaaaaagtcaacatgctttagcagttgagcatttcaaagctgcacgcgaaatgaggcccgaagagcctgatatccttcaaaaacttgctctaagtatatataaatcgcaacttcctgatgagatagctgcattgcatgaaggtttaacagtgttaactcctctcaaacctgcacactcaaatgatccagaaactttgggcattgccggggcaataaataagagactttggcttttacagggggatcgtgctgcacttgacttggctataagttattatgggcggggatatgaagttcggcgagactattacaacggtgaaaatttcgctttgtgctttgagtatcgtgcacatgagcaatacgaaaaagctgagaaaatatatgattttatgagcgctcacaaaatacgaaagtcaataataaaatcattgactttgattgaatcgtcaccggacttttttgacaggccagataaacgatggatatttgcgaccttagctaattgttattttgcatgccaaaacatggatgtcggaaatgtatatgagcagaagtttatgggtgcagcaatggctcaatgggaaattgacacttatttagcagctaaaagtgaagttttgtctatccaaagtgaaaaattaataattttaggaaacgtagaaatgtga

SEQ ID NO: 183627 - DNA, 2331 bp, Klebsiella oxytoca
atgaaggatttatccggctttttcgcttacgcatcaagtcccgtagaagttgggcaaactatcgaacgggctgtagataacagcaataaaatcataggcaggatagccatctcaacgtggatggctctagatgttgtcgggcattttatttctgatgaagtcttaacggctattgatgcaacggacttattgattgccgacatcagtgagcttaatttcaatgtcacgtatgaaataggttatgcgataggtaaatcgaagcgcgtattgcttgtcaaaaataagagcctacaacctcaaggacttaagatttctgatgtgggaattttcgataccttaggttaccgggaatatcagaactcttctgaattaagcgcatttttaacaaatgcttctgtcttgaaagctattgatacatcagcagtgctaaacattaaggctccagtgtatctcctcgatacgccatacaagaccgactggtcaacgcgaataatctctaggattaaaaaggctggtttcacgtatcgtaacttcgatccgaacgagtctccccgtctgtctgcacatgatgcaattacgcaagtagcaaaatcatacggagttgttgttccccttttatcctcgaattctacaggttttgctattcataacatgcgagcagccttcatcgccggtttggctgatggcatgggaaaagcgctcagcattttgcagtctggtgatgaaccagtccccattgattatcgtgattttgtagaagcgacttaccaccccgatgacgtcaatcgtgcaatagaagtgttcgcctcaaaggttactcaagcatttcagcaactcgaagcatccgatacgaaggtcgagcgttcctttataaaaaaggttaatctcggtgctacttccgctgaaaatgaaatgcgcgatcttgagcgctattatttagaaacggatcagtttcttaagtccctacggggtgaagctcatttggttgtgggacgtaaaggttccggcaagtcggcaattttccttcaaattagggatgcagaacgcgacaagaaccgtaacaaaaatattgttttagatctaaagccagatggttacaaacttataaaatttaaagaaagaatccttcagtttttagctgaaggtacgtatcagcatacaattacggcattttgggaatacgtgcttctcttagagatatgttacaaaatcttggaaaaagatagacaacgccatattcatgatcaccttctatacgaaggctatcgtgagctatccgatttatattatgttgaaggttatgattatgagggtgatttttctgaacgcatgtcaatgctgatggaaaaaatttactctgaataccaatcaaaatatggttcagaagaaagtgttaacctaagttcatcccaagtcactgagcttctatataaacacgatgttaaaaacctgaaacaaatgctgggacgctacttaaataacaaacaaattttatggctgttattcgataacattgacaatggttggcctacctcaggattgaagcatgaagacttattaatgattagggccttaatagatgctactcgaaagattgaacgtcagtttagtagtccagatctcaaaattcggtcggtggtatttctgcgcaatgatgtctacgaactactggtaagggagacatctgatcgaggcaaagaagctagcgtcattcttgattggactgatggcgatttgctacgtgaacttattcgcttgcgaattgtatcaaatggactagatgaagatatggacttcaaatctgcgtggctacgactttttgttagccattatatgggcgaagaaacttctcaatttctgattgaacgttctttaatgaggccgcgttttttactcaatcttattaaccattgtaaaagcttcgctatcaatctaaatcatgaaattatagaagcaagtgatatagaaaaaggtataaatgcttattctgcagatcttttacgtgatattggctacgaacttcgtgatatttcttctgaaaccgacggtgcattgtacgcttttatcgcctgcgaaagtgaattgtcagaaatagaagtaatgaataaactaaagcaatcaggtattgagcatgatggtgctgctcgtgtattagacttgctactttggtatgggtttttaggtattcgaattaattcagatgaacctaagttcatttatgacttcagctacaacaaggcactaatggatggtgtaaaaagaaactcgactcagacagttagcttggtaattaatcaagcattttggccaggattaatgataaacaaataa

SEQ ID NO: 183628 - DNA, 891 bp, Klebsiella oxytoca
gtgaaaattaaatatcctagtctttatgatataactaataagagatctgaaaacaatcaaagatattactttgctgctcttagaattgaatatttattattgatatttagtgctgttaatgcttttctggagtatgactacaaatattacactgcattgtttttattcaccatgctaatgttgatggtagcatttaaacttaaaagtaaatttgaaagagagtggtataaatatagagcggtaactgagtcaattaaaactatctcgtggaagttctccatgaaatcagaaccttttaacgataaagatgaaccaaggaatatatcacagctcgcatcttatttagacggtatcgtgggtggtagtgagtttatatctaaaagtatcgactctgtatcagtacttgaaagcacggtttctgatgagatgaaaaatatcagaaaacttaatcttgatgatcgtcgagatgtatatgttaaatatagaatagatgatcagcgtgactggtatataggcaaggcacaatctaataaaaacttaagtttatactggggagtggttgttttttgtatttatcttcttgcttttttatgttctctctataatgcttttttgacacaaaatactgagagtttaataccaataagtgtagtaacaacgatagcatcggctctcgttggctgggtccaggttaaaagatatagtgaactctctgcatcatattttttaactgcacatgagattggtataattaaagaacaatcatcatatatttctggagaaaatgatttctctgaatttgtaagagacgctgaaacagcattttctagggagcatacgcaatggctcgctagaagagtagcaaataggcaagccccaataaaacattag

SEQ ID NO: 183629 - DNA, 1248 bp, Klebsiella oxytoca
atgtcccttaccgacgcgaaaatccgtagtctcaagccttctgataaaccctttaaagtctccgattcccacggtctgtatctgctggtcaagccgggtggctcacgtcactggtatctcaagtaccgtattaacggtaaagaatcccgcattgcgctgggtgcctatcctgccgtctccctctctgatgcgcgacagcagcgtgaaggtgtccgtaaaatgctggcgctgaatatcaacccggtacagcagcgggctgctgaacgtggctcacgaacaccggataaagcttttaaaaacgtggcgctggcgtggcataaaagtaaccggaaatggtcgcagaacaccgctgaccgtctgcttgccagcctgaacaatcacatctttccggttatcgggaacctgcctgtatcagaacttaaaccccgtcatttcattgacctgctgaaagggatcgaggaaaaaggtctgctggaagtttcgtcccgcacgcggcagcacttgagtaacataatgcgccatgcggtccatcaggggttaatcgatactaacccggcagcaaaccttggcggcgtgaccacacctcctgtcagacggcactatcctgccctgccactggagcggctgcctgaactgcttgaacgtattgaggcatatcatcagggccgcgaacttacccggcttgccgtcctgctgatgctgcatgtgttcattcgctccagtgaactgcgtttcgcccgctggtcagagattgatttcaaaaaccgggtctggacgatacccgcgacgcgagaacccattattggcgtgcgttattccgggcgcggggccaaaatgcgaatgccgcatatcgtccccctctcagaacatgtcatcgccattctgaaacagattaaagatatcaccggtaataatgaactggtcttccccggcgaccataacccgtataagccaatgtgtgaaaacacggtcaacaaggcattgcgggtgatgggctacgacacaaaaaaggatatctgtggccacggctttcgggcgatggcatgcagtgcgctgatggaatcgggtttatgggcaaaggacgcagtagaacgccagatgagtcatcaggagcgtaataccgtgcgcatggcttatattcacaaggcagagcacctggaagcccgcaaggcgatgatgcagtggtggtccgattatctggatatgtgtcgcaaactttatgtaccacctttcattctgaagagataa

SEQ ID NO: 183630 - DNA, 1182 bp, Klebsiella oxytoca
atgctccgagctatggcgtacccggcgatgagtagtgcggtgcgcgatatccttgcggcgttgctggcgtttgataccaccagccgcgaatccaatctggccttgattacctggattgaggattttctggcgcagcgcgggatcgcatcgcaacgcatcatggatgacagcgggcgcaaagccaatctgtatgcccggctggggccgggtggtgatggcggggtgatgttatccggtcacaccgatgtggtgccggtcgatggtcagcaatggacgctgccgccgtttgccctgacacaacaggaagggcgctactatggtcgtggcagtgcggacatgaaaggctttctggcctgcgtgctggcatcgctggatagctttctggcccagccgttgcgtctgccgctgcatctggctttttcctatgatgaggaagtgggctgcctcggggtgcggagcatggtggagtttttgcgtgcgtcagcagaaaagcccgccatgtgtatcatcggcgaaccgacagaaatgcgcccggtatatggacataaaggcaaggtggcgatgcgttgtcaggtgcatggtcgcgcctgccactcggcctacgcaccttctggcgtcaatgccatcgaatacgcggcaaggcttatcaatcagctcggcgaagcggcgcagcaactgaagcagatagaggatgcgcgttttgatcccccctatagcacgctccagaccggtgtgattcagggcggcagcgcgctgaacatcgtgccgcaggattgtcagtttgatttcgaaatccgctatctgccggaggcgcatgttcagggggtcattacccaggttgagcagtacgcgcaacagcagctgttaccgcaaatgcaggcggtggcggctgaaagcacgattcattttctgccgctcagccactacccaggcctgctcaccgatcctcaatcacaatttgcccaatggctggcgcaatggagcggaagcgacgatttctctaccgtggcgtttggcactgaaggggggttgtttgatgaagcgggggttgccaccctgatctgcgggccgggcagtatggagcaggggcacaagccggatgagtttatcgctattgaacaagtagaactctgtatggtgatgcttgtaaatttatgcaaatggatgcgaactgtcctctaa

SEQ ID NO: 183631 - DNA, 675 bp, Klebsiella oxytoca
atgacgctttcgattgcggcacgctgtgcggattccggccagctcggtatcgccattagttcgtcgagcattgccgtaggtgcgcgttgcccgtggctggtggccggagtgggtgcggtatccagccagaacatcacattaccggcgctggggcagcagattctggcgcgtctggaagagggcttaacgccggaacaggcgctgaaaagcgcactggcagaagatcgctttagcgaatatcgccaggtgacggtcattgacgccagcggtcgcagcgccgcctttagcggtgacaagacgctgggtatttatcatgtggtgcagggcaaagagtgcgtggcagcagggaatatgctggcggaacaagaggtgatcgccgagatggcggcggcttttgacgctgccactggtgagcttactggtcgcctgctcacggcgttgcaggcagggatcgatgccggtggtgaggcggggccggtgcattcagctgctgtgaaggtggtggatgattacacctggccgctggtggatctgcgcgttgactgggcagaagaaaacccattggcagaactgcacaagttgtggctggcgtatgaacctcaaatgcaggcttacgtcacccgggcactggatccacgtgatgctccgagctatggcgtacccggcgatgagtag

SEQ ID NO: 183632 - DNA, 426 bp, Klebsiella oxytoca
atgcctacacatcaacgtattcgtatgttcaacaccaaagaaacctatccgaatcagacactggacaacgatctctgccaggcggtacgcgccggtaataccgtctacgtgcgcggccaggtgggtactgattttgcagggaatctggtcgggctgggcgatccacgcgctcaaaccgaacaggcgatgaaaaaccttaaacagctgctggaagaagccggtagcgacctgagccatatcgtgaaaaccaccacctatcttaccgatccgcgttatcgcgagccggtttaccaggaggtggggaaatggctgaaaggggtgtttccgatttcaactggcctggtggtttcggcgctggcacagccgcagtggctgatggaaattgatgtgattgcggtgatcccggatgactgggaggggaaatga

SEQ ID NO: 183633 - DNA, 1269 bp, Klebsiella oxytoca
atgacatcattaaaaactgaaacagatacgctgattattggcgcaggtcaggcgggggttgccatgagcgaacacctgacgcgtctgggcattccgcatctggtcgtggagaaaaaccgtattgccgaatcctggcgtagtcgtcgctgggattcgttggttgccaatggcccggcctggcatgaccgctttccgggcatggaatttcctggctgctcaccagacagctttgtggcaaaagaacaggttgctgattattttgtcagttacgccgccatgaaccagtcaccgattcataccggcgtcgaagtgttaagcgctgaacgcaatcaggggcgcagtggttttaccgtcaccacctccgcaggcgtgatcaatgtgcagcgtatcgtggccgctaccggtcctttccagcgcccggtgatcccggcgattgctcctcaacatagctatgtacagcagttacattcggcagactataaaaatccacagcagttgccgcagggtggcgtactggtggttggtgccggttcttccggggtgcagattgccgatgaattgcaacgatccggtaagccagtgtggttatcggtggggccgcacgatcgcccgccacgttcttaccgtggccgggacttctgctggtggcttggggtgctcggattgtgggatgctgcggccagccaaccgggcaaagagcatgtcaccatcgccgtgagcggtgcacgcggtggacataccgtcgattttcgtcgtctggcggcgcagggcataaacctcgttggcttgacggaaagtttcaccgataacacagtacgttttcaggatgacctggcggagaatattgcgcgtggcgatgcgaattatctcgcgttgctggatgctgccgatgcgtatatcgagcgcaacggcctcgatttaccgccagaaccacaggcacgtgaattcctgccagaccccgcttgtgtcacccatccgcagctctcattgaatctggcagaggccggaatcaccagcattatctgggcgacgggctacgtcaccgattacagctggttaaaggtcaatgccttcaatgaacagggcagaccgcagcatcatcgtggcgtgtccagtgagccgggcgtttattttcttggcttgccgtggttgtcacgtcgtggttccacctttatctggggcgtctggcacgatgccaaattcattgctgaccagatcgctatccagcgccagtaccagcagtatcgcgcaccctctgactcgctttaa

SEQ ID NO: 183634 - DNA, 1404 bp, Klebsiella oxytoca
atgatgacaaacaacccaaaagataatgctgttgcaaccacaatagagttgagcaccatccagcctattcccgcgcatgaacgtcatggcaagccacgggatctttttaccatctggtttggttcaaacatcatgttgcttaccgtgattaccggcgcgctggcggtaagtattttccacttatcttttatgtgggccaccattgccgtattgattggtaaccttgccggtgggctgtttatggcattgcattccgcgcagggaccacaattaggtgtgccgcagatggttcaaacccgcggccagtttggttcttatggttccgtgctggtggtggcgttagtcgtcatcatgtatatcggctttctggcatcaaacctggtgctgggcggtcagtcactgcacgccatctacgcaccggtttctacggataccggcatcctggtttctgcggtactcagcctggtggcctgtgccttcggctataacctgattcatgcctacaccaaggtgatgtcgtgggtatccggtattattttgctcgcggcctttgcgtggattgttttcgtgcatggtctgccgactgattttctcgcgcgtaatggctttaatctcagcggattcctcggtgccatttccatcgccgcattatggcagctggcctacgcgccttatgtatccgattattcccgctacatgccaaaagatatcagcgaaaaaagcgtcttctggtgtagttacctgggatgcgtactgggttcattgttcccgatgattcttggcattctggtttctatttgcatcgtggatggtgatttaatcaccggtattgttaatatgaccggcggattatcctccaccgtcattattgtgtttgccttaggcattgccgcgaccaatgcaatgaacctctattgcggtgtgctctgcaccctgacgcttggccagacattcctgcctaagtggtcgccgctttctggcgctcgcattgtggtatcaattgtcaccatccttatcgaagtgctgattgcgatttatggtcaggaaaacttcctggtgaattacaccaactttattctgatgttgctgtatgtgctggtgccgtggacggcaattaacctggttgattactatctggtggcccacggtaattatgatgtcgcttcattcttccgtcgtgacggtggcatatacggttacttcaattcaaaagccattttctgttatctgctggggatcgtggtcgagattccttttatgtctaccgccatttacaccggtccggcagcgaatatgttaggtggtgccgatatctcctggattattggtttagccatcgtctcgcctgtttattatttcctctgccgtactcaggcagtggcgcaaacctctgttgctaaataa

SEQ ID NO: 183635 - DNA, 1647 bp, Klebsiella oxytoca
atgaacaatagtaatacctacgactacatcattattggtgggggttccgcaggttccgtgctggccgcccggctggctgaacaggcagatctgaagatctgcctgattgaggctggaagtcgcgatgagaccccacgcatccagactcctgcgggaaccattaccctgtataaaagcaaaaagttcagctggaacttttattcaacgccacaaaaaagcttaggggggcgacaactccacgtcccgcgcggcaaggcgctggggggttcctcatccatgaacagtatgatttatattcgcggattaccttctgattatgaccgctgggaacagcaaggttgtgagggctggggctggaataatgtcctgccctggttcaaacgctcggaaaagaatctgttgtctcaggatccggcatatcatggttttagcggcgaattactggtcgataaaccgcgcgatcccaatccagtatcagcgctgtttgtcgcggcgggcaagcgagtcggattagcggagaacaccgactttaacggtaaatcgatggcaggcgtcgggatttataacgttacgcaaaaagatggcaaacggttatcaagctatcgcgcatttttgcatccccatcttggtcaaagcaatttgacggtcatgaccgactgcaccgtgcaaacgctgatcattgaagacaaagtggtcaaaggcgtgcgtattaatgagcatggccgcgatcaacccacgtcaattttgtgccgccaggaagtcatcctgtcagcaggctccattggctcaccacatattctgttgaagtcaggcatcgggcctgccgccgaacttgaagccgcaggtatcccgctggtgcaccctctccccggcgtgggtaaaaatcttcaggatcatctggatggtctggtcaccgtgcggtccggtaacccgctaacgctgggtttttccctcgccgcctggaaaccgatcctgacctcacccttcaactatctgtttcgccgcaaaggttggttaaccaccaattatgtagaagcgggtggttttgccgcgacgaaactcagcagcgatgaacccgatattcagttccattttgtgccgggttatcgcagccaccgggggcgcttatttgaatggggccacggctacgcgattcacacctgcgtgttacgcccgaaatcgatcggcgcgttgcagttaacgcgcgatggacaaatcgcaattgattttaatttcctcgccgacccttatgacgccagcgtgctggttgaggggataaaagtggcaaggaacattcttgctcagccggaattcgccgcattgcggggtgaagagatgctgccgggcgaacatattcagaccgacgaacagctgcatcaatacgtcagagaatattgcgccaccgttttccatccggtgggcacctgcaagatgggccgggatgaaatgagcgttgtcgcaccggaatccctcaaagtgtatggcgtggaaaatttgcgcgtggctgacgcatcaatcatgccatcgcttatcagcggcaacaccaatgccccttcaataatgattggcgaacgtgcggcaagcatgatcctgcaaggaacgccggtagctgagaccgagacgaataaggagaacgcgtatgcataa

SEQ ID NO: 183636 - DNA, 1491 bp, Klebsiella oxytoca
atgcataatcgtgattactggcaaggtctgctgaaccaacaacgctttagcacgcatgcccttatcgggggtaaacctcacttcgccaaagcggagaaaacctgggcggtagtgaatcccgccaccaatgcggtgttagcggaagtcaccgcttgtcaggctgaggatattgacgctgcggtggattccgcccgccaggcgtttacctctggcatctggtccgggtgcccgttagcgcaacgcaaagcggtgctgcgcaggctggcggatctgatgctggagcatcgggaagaactggcgctgctggaaagcgtcagcatgggaaaaccggtactcgatgcgtataacgttgatgtgccgggggctgcccatgtgattgcctggtacgcagaaagtatcgataagatttatgacgaagtcgccccgacccgtccaggcacgctggcaaccataactcgtgagcctgtcggcgttgtagccgccattgtaccgtggaatttccccctcgatattgctgcctggaaaatcggaccggccctggccgccggaaatagtgtgatcctgaaaccctcggagaattcgcctttcaccgcactgaaactggcagaactggcgctggaggccggattgcccgccggggtgttaaacgttgttaccgggctggggatcgaagccggtgccgcgctgggcctgcataacgatgttgatgtgctgacttttaccggttcaaccgcagtgggcaaagcctttatggcctattccggccaatccaatttgaagcaggtgtggttggaatgtggtggcaaaagcgccaacattatttttgccaattgccaggatctcgatttagccgccgaaaaagccgccttcggtatctgtttcaaccagggtgaagtttgttcagccaactccagattattagttgaacgtaagatctatcccgactttatggcgaagttgatcacgaagttgcacggctggcaacctgaccatccgcttaaccccaatgcgaggatgggcgcgatggtttcgactgcgcataaagataaggtgatggattttattcagaccgcagtgactcagggcggtattgtgcgcgcgggtggcgagcaacgcgaaatcgagacagtcgctaactacatcctgccgacggtgattgagattgaaagcgaaaacgttaacttatggcgtgatgaagtattcggtccggtgctcgcggtaaaagtctttgatgatgagtcggaagccatcgaactggcgaataatcatatttacgcccttgccgcatcagtatggtcggacgacctgaatcaggcacatcgtgtggcgcgcaaactgaacgccggaacggtgtcggtcaacaccgttgatgcgctggatgtgaccgttccttttggtggcaatcagcaatcgggttttggccgcgacctgtctttacatgcctttgataaattcaccaaattaaaaaccacctggattgaattacgttaa

SEQ ID NO: 183637 - DNA, 921 bp, Klebsiella oxytoca
atgacgcatttcacactcaagcagcttaaatatttcgtcactgtggttgagaccgaaagcatcgccgaagcgtcacgtcagctgcacatcgcccagccttcgatttcggtcgccatcaaaaaccttgaggacgcttttgaacagcagctgttcattcgccatcatgcacagggcgtatcgctcacctccagtgggagacggttctacgaaaaagcaaaggagttgctgcggttgtcctatgagtttgagcaaagttcacgcgcagaaaatgagctggtttgcggcaccatcgccgtgggttgttttgaatcggcggctccgctgtatatgcccaagctgattgcaggtttcaaaaaactctatccagaaatcaatattcagctgtacgacggtgaacagcatgagctgatgcacggtttacatcgtggccgttttgacatggcatttctctacgatcttgacctggacaacgcgattcagaaagaaccgctgaatgcgccgcataaaccctatgcgctgctaccggcggctcatccgctggcgaaaaaaagtgcggtgacattacaggaactggcaagcgaaccgatgatcctgttggatgcggtgcccagcaaaaattactttatcagcattttcaaagagaatggttattaccctgaagttgcctatagctcgccgtcaattgaaatggtgcggtgcatggtcgggcaggggctgggcttttcggtgctggtgacccggccctgttcggatatgacatacgatgggcagcgcctggtgcaactggatatagtcgatgaaatggcggcatcgacgctgattatggcttatctgcaaaataatgaaccaacacggccgacgcggttatttatggattattgccgcagtgttgaattaactccggccgtcagcagccattaa

SEQ ID NO: 183638 - DNA, 1263 bp, Klebsiella oxytoca
atgtctctgaacgacgctaaaatccgtagcttaaaaccatccgcaaaacccttcaaagtttctgattctcatggactgtaccttttagtcaatccaggcggttcacgtctctggtatctcaaatatcgtatcaatggtaaagaatctcgcctcggcttaggtgcctatcccgatgtttctctggcttacgctcgtcagcaacgtgatggtatacgcaagctgctaacgcagaatatcaatccatcacaacaacgtatcgcagagaaagctgcccgctcaccggaaaaaacatttaagcacgttgcattgagctggcataaaagcaacagaacatggtctgagaaccacgcctcccgtctgcttgccagcatgaacaatcatatatttcctgtgattggacacttgccagtagctgaactgaaacctcgtcactttatcgacctgctgaaaggcattgagcaaaaaggtctgcttgaagtcgcagcacgtacccggcagcatatgtgcaacatcatgcagcatgcggtgcatcaggggatgattgagagcaatccagcatcgaatctcgaaggtatcatcgcagcaccggttaaacgacactaccccgcccttccccttgaacgactacccgaattgttgagtcgcattgatggctatcatcagggacgggaattaacccggctggctgtttctcttaccctgcatgtctttattcgctccagcgaactgcggtttgcccgctggacggagataagtttcacaaataaaatctggacgatccccgccacacgagaaccgctcccaggcgtccgctattccagcaggggggcgaaaatgcgcacgccgcacattgtgccgctgtcacaacagaccatcgacatactgaagcagataagagaaatctccggtgatcaggagttgctgttccccagcatccataatccatccagaccaatgagtgaaaatacggttaataaggcgctgcggctgatggaatataatactaaagaggatgtctgcggccacggattccgggcaatggcctgtagtgccctgatagaatcaggtctctggtcacaggatgcagttgagcgtcagatgagccatcaggagcgcaatagcgttcgagcagcctacatccacaaggcggagcatctggaagcccgcaaggcgatgatgcagtggtggtcagattatctggacaggtgcagagaggaattcgtgccatcctatattttgggccatcagcagtccaaagtctga

SEQ ID NO: 183639 - DNA, 882 bp, Klebsiella oxytoca
atggatttaaacgcgcttaaaatctttattaaggtaggggaaacgcagagttttaccaaagctgcgcaggcattgggcctcacccaatcaggggtctcacgtgcaattaccaggcttgagctcgaccttcgtgttaccttgcttaaccgcaatacccactctgtaagtctgactaccgatggcgtttttttatatgaatcctcaaaaagcctgattcatgaaatggatgaggttgggcattcgattaccggcagaacggtattccctgaaggcgaactaaaaataacgacaccttctgcctatggccgattggtaattattcctatgctcaaagagattctggacagatatccggcattaacaattgacgcggttatgactgaccgattggttgatttggtggaagaaggctttgacgcggcgattagaattggcagcgtacaggactcacggcttatcgccagaactattaagcatttacgttttgtcaccgttgcgtcaccggaatatttaaacagccacggaattccaaaagagccagcggaactggtacagcataactgtctggctgttaaagcacagagaactgggcgtagcacaaagtggttttattctatagcgggagaacagcaggcttttgatattaagggtaatctggtcgtcgatactgcggatgtactgttagaggcggcactcagcgggatgggagttgttcagataatggactttgcggtcggtaaatatctggaaaacggtaaacttgtcgagctactacatgaatactccgaggcttcgattccgctttcattaatttatgcaaaatcgcgccatcgttcgcctaaaatcagtacattgctggcagcgttaggaataaatacttga

SEQ ID NO: 183640 - DNA, 918 bp, Klebsiella oxytoca
atgagtgaatacgtgcaagcaattgtgaaatcagatactggtggttttagatttaccgatgtacagcggccagtcagaaggacggaaagtgatattttaatcagagtttccaatatatcacttaatcggggagaattagactttccctgggaatcggataagcctgccggatgggatgcatttggtattgtgatcgagaccagcaccgacggtcagggaccaaaaattggggagcgggtattaacatggagcttttcgggtgcctggagccaatatcgcgttgtcgatcgtgccaatgtcgctatcgtgccagagagtgtatcagcagcggttgcagcagcgttgccggtggcaggattaacggcgctgcgttctctgcgatcccttcatttgcagccgggccagtctctggccgttaccggtgcaacgggcggagtcgggcatttgttggttcagttggcaatgcatgccggtattaaagtttcggcggtggtgcacagtcagcgtggattcgattggctgcaagccagcgacgttaaacccaacgaggtactattggctaaagaatacccttttgagggaacctttgatgcactggtcgataccgtcggtggcgatttactggctcatctattagacaatgttgtccctaatggcacagttctcattctgggcgttgcctcgggacaggtggcgagcatagacaccacaattttggtatcacgaggaatcgatctgatttcttataaggattattccccggccggagaagatttaaacaccttgctcactctcgttgacgagaagatcattaaagtatacgcggataatattggtagttgggataaagtcattaaacaggatttcatgcatcttctcgctccaggcaaagtcacgctcaacgtacctcaggactaa

SEQ ID NO: 183641 - DNA, 1185 bp, Klebsiella oxytoca
atgaataaaccacttccagcggcaatatatgttttaggttttactctatttgccatgacaacatctgaatacatggtcgcaggattaatcacatccatgtcatctgatttaggtgtttccattcctaaagttggatatttaattaccatttattcattaggtatggttttcggtggtcccttgcttgctacatttttagttaaacttagcaataaagcagcattattgactattactggcatatttcttgtcgcccaagtagtcgcaaccgtttctgcaacttatgatcttttagcagtagcgaggtttgcgaccggattatcttcggcagccttcttcggttttgcgctgttgacagcggcaaaaatggttccaccggaacgctttggcgttgcagcctccatcgtattgggcgggatgatgatagcgacggtggcgggactgccactatcagcaatacttgaccagtattatggctggagagtttccttcgcattaattattgtccttacatctttagctggaataggtattatactgattgttcctaaattcaaggcggaggttaagggtagtattaaggctgaatttggttcaattataaacagatcaatctggggggcttttattacaagtttctttattattgctgctacattcgcgacattcagttacttcgttccctattttgaaaacactgtcggtttcgatattccatatatcccggctattcttttcgcttacggtgtattcacggtaattggtaactttcttgtaggtcgactagcagataaatcgccgattaaagttgttttcaccggaagcgtcgtgctagtacttgcactgtttgggctttataccttctacgaaaataaaatattagtgctgatatctgtaatgattttaggacttactggtattactctcactcctgccatgtcctcacgcgtgtttaaagcagcccctaatacttcattaattaacactatgcatacctccgttatttgtcttggagtagttattggttcatgggccggtggctatgcaatcgaccaaggttatggctaccgtgcaccaactctcatcggtatttttttagcaggattggcgattgtcaccctactccctgttttgagaaacaaccgttacgatactcctgctgttaatcctcagacaaatatctga

SEQ ID NO: 183642 - DNA, 1110 bp, Klebsiella oxytoca
atgaacagtgaaactaattcattaggctatgaaaataacattcaaactattccggaatcgcactcatttcccgaaaacaaatacaagcatgagatcccaatcatttaccatagcgagagtgataaaattatcgaccaaagttgcgaggcaaggttattaaatgacacgcccaataaaaaatcatgcacacataaaatatttgttatacgaaaatgcaagccggagcatataggagacattttcttgcggccatcagaaaatgattatagcagcataattctagacattaacattcatacgccattaggagaaaaaataaaaaccggactattccgtaaactttcattttttttatttgaaaaatataagacactgagagttgagactcacattctgattgatcatcataaaatcattaatagccttatattgagcgggtatacttttgaaggtattacacaaaaatttaatgtaaattcagagctagaggaatttgcagtattttcattattgaaggatcaaactaacacgggaaaaagcctattattccctgcagtggatagtaatatttatcgcgatgaaaaaattgcactacgtttagccgaaacaaaagacacattttgtatatggttagagcaatcaaatcctgaatcatcgaagtggggtttattcgaaacagcatcacttgatgaaataaaacaaaaagtcaggcgttgcgggcttaattcagccgtaggtcctaatatattactaactattatagaatgctcaactggtaatgctgtaggaaaaattgttatccgcaatgttgtaccacctcatgtaggtgatgtgggttacgggatattgccggaatatcgtggtttaggctacgccgtaagggcactgaatcttttgaaaaaatgggcctttaatgaagctggttatgtacgtttagaacttggtgtcaaagaaggcaatatcgcgtcagaaagagtcgcgcaaaagggagggtttgaatttgaggggatgcgtccgggacgattgaaaaatcacgatggttcatacagtaatgaaatgcactatttctttctgaacccgaatattagctatcgcaaaatagaggattga

SEQ ID NO: 183643 - DNA, 1443 bp, Klebsiella oxytoca
atgagcaaaaagttcatctcctttctcgaacagcatttagatcataaaaacgtcgtcgcctatgtaaaaacaccgaatgatgttggtgaatatacttccccatcggtttctggccgagtggatgtttccagtattgaacaagtaattcgtattgttaagctagcagatcaatttgacggagaaacagcgctttatccctactcaactggatacaattgggggctaggttcaacaaaacctccgtcagacaacgccgtgcagttgaagctgaccggattaaataaaattcgcgagattaatatcgcagagggttatgctgtcattgagccaggtgtgacgcagggaatattatcgcaaaaattactgaacacccatcgctttattaatgtgacagcctcatctgcagaaacgagttttttaggtaatgctctcgatcggggcgtcgggttgaggcaccagcgtacagaagatcttctcggcctggaaattgttctcgccaacgggacactgcaccgagtgggctggtggccggaacagggaaaacatagcgcattatactcccacgggattggcccttcactggtgcaattattcacccaatcgaatctcggaattataaccggtggcgttgtacgtctacttaatcgaccagaaaaatctcgcgtcgcctatatttccttttctcccgaaaacttagagtatgctatcaatactttccagcgttggtcagcacaagggttaattcacggtgtacttaaggtttatgatgaaacctcaacactgacgtatggtgcgaataagggcgagtttctcgttcatttgcctctttcgggagctgcctcagtagtatcggcactttccaccgcgctggaaaccgagtttgtaaaagctggcgagaaattcatctctttgatctggaacgacagccctacgaatccttatcaagatgatatcgtcgccaatctagtcaacgctgcttatcaaggggatactaaatatcatgatatccttctggagaagacgctcggtactacaccggctgaaatagatgccgaaggcaaaggctggatatttttcttgcctctgcttccttttaccggtcaggctattaaacaggcttatctacatttcgacgatatcttcgagtctactggcgtgcgctgcggcgccacaattaatacgctgagtgatcagattattgatctcgttgtatccattcgttttgaacgcgtagaagaggaaataagaaaagctcatcgtgctctgaaacttcttcatgaaaaatttagtgcttccggtttttatccttatcgtttggacgtcgaacatcctctcgccaatagtcgtaatgccagaacgcttcgtgaaggtgaaatcattagaagcttgcaaaaaactttagacccaaagggaattttcgcatccgggcgatatagttattaa

SEQ ID NO: 183644 - DNA, 1173 bp, Klebsiella oxytoca
atgataactcatgaagaaaatacatttagcaatatattagttaatctaagagatttacgtggcaaattacgtaactccgctcgtgaaatagaagagcatcgcaggataccactcaatattattgaaaggctacgtggcattgggatatttggaatgtgtttcccgcaatcatggggcggtgccggactgacgtcgattgagcaaatccttgtgctggaagaactcgcccggggcgatacggctaccgcctggtgcgccatgattggttgtgactcaggtatttattcaggtttcttggaagaaaaaagcgccaaagagatctttccacacgccaatctggccgtggcgggttggatacacccgcagggaaaagccgagatagttgatggcggctacattgtcactggcaaatggcgttttgccagcggatcgcctcatggcgatgtcatctcggcaggttgcttcctctaccgtaacggcaatcttatactggatgataacggcaagcccctttggcgagtcatgctggcgcgtcctgccgactaccttttttccgacacctggttcaccaccggcctgcggggaagcggcagtcaggactactccacgcaaggattgttcattcccgaacagcacgcgttcaatttctcggaaccaaaacgtcaagggccactgcacaaaacgccggatgcaattttacgcaaaatggccggtatcccgctggggcttgcgagagcctgtctggactatatctacgacgtcgccgacgaccgcacagacagaatcaatgatgtgaaatggcgaaactcaaagcgcgtacagacggcggtggctaacgcagagaatcagttatttatcactagaaacgcggcgctcaccagcgtaagtacattatggcaggcgctcgaagccgatgccgctcatgacgatattactcattggcgcgtgcagtcagctttgagtcgaagaaatgcctttcaaaccgcacgaaccatcgtttcaagcttgtatgacctacagggtgggggttctatctacacccatgaaacaccttttgatcgcgcattacgtgatatcaacactatttgccagcacgctgtcgcgcaggaaaaagtcctgcaggtgtgcggcgatattctccttggtggcaaagtcgaagattactttatataa

SEQ ID NO: 183645 - DNA, 759 bp, Klebsiella oxytoca
atgagtggtattttttcgcaaaagaaaattcttgtaaccggcgcaggcagtggacttggcagagaaatagccttggcattttcacgacttggcggaaccgttattcttgcaggtcgaaataagcagaaactagaagagacagcgcaagcgatctccgagactcctggcaaatcatgggttattcctttcgacgtaaataataatcaatcaatagataacctgtttgatgaaattaaaaatagagtcggtactcttgatattgccgttaataacgccggagtattttcttttggttttgtcgatgaaacctccagtaaagactttaatcacgtattcactactaatgtcattggtttgtttgaaagtctgaagcgcgaacttcagtcgatgaaagaaaaccgggccgggactatcgttaatatttcatcaaatatgtctatcgggctgaatattccgggcacggcagcctacaccgcttcaaaggctgccgtcgatgcattgacccgcgtctcggcaaaagaggctatcacgcacggcgtgcgagttttctcaataaacccaggtccattggccaccgaaatgacccaacttcccggcgaatcggcggcagaccgtgacaaaagatggcgcgatttgatccccattgggcgtattggcgatgttaaagagatcgctcaagccattatttggtcctgctcaggccagtctgactacttagtgggtacacgaatagttatcgatggcggccactctctttaa

SEQ ID NO: 183646 - DNA, 501 bp, Klebsiella oxytoca
atgcaaccatttattattagagataatgaaggcgttccgctttggttaaataatgacacctatactatcaagcttgacaaagaaaataccggcggcagcatttctattattcagggatttgttgggcctggtggtggtccgatctggcatcttcatgaagacgctgatgagatattttatgtactagacggccaattaaccgtaagagccggagaaaatatctttcaggcaaaccctggcgattttgtttatgtaccaaagggcatttatcaccaatttagaaataacagcattaaacctatcaagatattgttgatgttctctcccgcaggtttcgaagggttctttagagaaacaggcattgtagcgaaagagggtgttcccccaccgttacacattcatgatgcagaagcaaacagacgggctataaagattggtggaaaatatctttcttttgttcctgattttgaaaatcccgacatcaatccaaatttaaaataa

SEQ ID NO: 183647 - DNA, 705 bp, Klebsiella oxytoca
atgtcagacagactcgcttttcttaagaataaaaatgtaaactcagactggttaactatcaaagaagcagttaaagcatcaaagaaaaacggcattagaaaaatacaagaaagtgatatctatcgatatgctctgcagggaaaaatcctcctttcgatatactttcagtctccaattaccttgaggaaaataaaatcctataaccataaattaaagctaaaacctaaagataataatttacctgacggcaaaattacgtcggatgaaatctttttttttagcgagagtaatttaactttcagcaccgaaggtaaatattttcacactgctcatggcgtcattgatacaagtctttttggatatgaatattttctcatacaatgcctacttgctcacaatctaaaaataccatcacctgtacttagagggaacaataactatggcatcactgtttccttatcaggggaaaactttctagttcacaatagaatttcattacgcaatggaatctcattaaatggcatagatttaagttttaatgatgcctacttacctatttataacttaccgaaggatgcatgttttgttatcaggcaaactgagttaaataaaatagtcaactggctggctggaaaaaaaatcactctcggactcttccacacgcatatcatcccctctatcaagactattttggcttgcctgtag

SEQ ID NO: 183648 - DNA, 1236 bp, Klebsiella oxytoca
atgacaatcaagggccaggagtatctttatctttcaccggacggcgtttggcagtttcaaatctacgtgccgtcttacatgcgccacatgttcggcgggaagcgcctgtaccggaaaagtacaggcacaagagacatttacaaggctcgacacttccgcaatcacatgttggtagagtggaacaacctgaaagaacaattcaagccagatacagaggacaggcgcatccagcttgcgatcacttccctgcactctcagatccgcaagaacaaaaacaagccactgatcaaggaacgagccagttctattcctcacctgtgcctattacgtgacgaatacgccactgcttaccgggatcggcgttcactgtccacactaagcaaatcagcgcgagccgtggaggtttttctccagagtatcgggaaagttgatatcagtttggatcagataggacggcggctggttactgacttcatcgaagaacagcagaaacgcgacgtagcagggcagacgctgcaaaactggttaacgtcattaggtagcctgtacgagttcgccaaacgtcgctacgacgctatagcgccgctcaacccgtttcatggtcacaacctcgaagcacgtcgaaccattgagagctaccagccgtttgaatggcatcaactatctaccctactaagcgaagctgacgaagaactacgagccgttattctgatcggcttgttctctggtgcaaggcttgacgaaatcgccagcttgaagaaagaagagatcgttatggtggaagggatacggacattctacattagcaaatccaagacgaaagctggcatcagacacataccgatccatgcttttctgattggcatggtggattattatctgagtttgaacactggagattacctgttaccacaggctaaccggattaaccgtgctgacggtaagaaaggcccgttttactcgcaagcgttcacccgcttacgccgtcgagtagtgccaatggctacagatcgccaatgcttccacagtttgagggggcattttataacgtgtctggatcgtgctggaatccctgaacaaagaattggttacattactggccactcttcccaggccgcagctacagaagcatttaagacgtacagcgcggggtgttccatgaaagaactatccgactatgtggaaatggtggattatccagagatcatctttccagaaatgaaaaaaggggcgtaa

SEQ ID NO: 183649 - DNA, 1860 bp, Klebsiella oxytoca
atgcttgagctcaacaccagtgttataaaaaatagtgtcacattcgtggtggatcgtaattcaatgaagacagcccttgatgcttttgaccagattcagaagaaagcaaaaggtattaaagatcccacaataaacatgaagagattcagccaggggctaaagtctgctgaaagagaattagataagctaaataagaaagcctctaagccacgtaataacgatgaaagagaaaaggcaagagcagctaaggcgcaagcccgtgtggaggctcaggcagcgaaagaggccgcaagaaacgcacagcgccgtgaacgggcttcgctaaaattgctcgatacgggttcgagtttcaaaagtatgcagcaccttaccaatgttgagcttacacaggccgcgcttgcagcgtcacggatcaccaaagcctatgcagcaggaactatctctctacaacgccagaacagtgagattaagcgcctccagcagagctatagacgcattaacgcagagcgtagggcagcagcaaaggcgggaggagctaacgctcttgctggcggtggtaaagctacaggggcgatctctggctctctgatgggattaggcactggtgcgctggctggcgctggtgtgggtgcggctgcgtatggcgcttattcatggggcaaagatgctgtaaccgcacaggaagaacgtagcgagattgtacagcgtgccagattgggtggggttgattacaacgtgttacaggcactttcgcagtatgccacggctaacgggattgattccggtatcggtacgcagggagccagaaaaaacttggatgttgcaaaagatgtgtccgagaaactcgcagacggtgcgctgaatgcgaaacgtaataaacagggtgaatggacaggagcatcaacaggcattaacactgctttgaacatggggtatacgcctaaacagcttaaagaatgggctaaaaatccgtttggttttgtctcttcatacaccaacacaatgcaatctaagggattgagtgaacaggaaattttgcacaatctcgaagacctcggggatgatctcgggctttacgccaaagcctttatgaacggcgggaaggcactcactgatcaggtggacgtgctcaagcgtaacggtcaatggttgaaccaggaacagcaagatcagcttgtagcctatcgcaaattcaatcaggaaatggacattctcaacgacagccagaagctggcattcttcgaaggtttcatggagtctctcgaccctgcgacggttaaagagtggaaggaagctatgcaggaggcgttacctttcttcaaaggcttaggcaaggcggcgggtgatgttgtagatggcttaatgaagatgaccaactggatcactggaaagctcaaccttcttaacggtgacaacaccaataaagaggctattagccagcattacggcacaacgtcagcacctacacagcctggaagtaatcctgtggctaacgcatacggagccagccagcctcaagccacacatgagcctaatgtgtttgatacggtgcgcgagtggtggaacggtacgagcggggcgcaggatgttagcagctacgcacagagcgccaacggtgcttattctcctgtctcgatgttgaaacaatccgcaaccactacggcgacacccccagctaataatacagtggtgcagccagtggtattacaaaataacttaccggaaggaatgatctctctgactattgcccctgatccgacattcggaaacatgctaaatgcgagcgtagatcagcgtattaatcagaataatcagcgtatggtgctggctgtttcatctggacaaggggcggggggctaa

SEQ ID NO: 183650 - DNA, 195 bp, Klebsiella oxytoca
atgcaattaattttgaaatctaacaagggactgcatgttcagctttctgcatcagatgcagaggggctattaaatgtcgctgctatttgcagactattagatgttgactataacggcgtgagacaacgtatttttcgtggtgaaactgtagagcaagcgattcaccattttttagatcagaaaggcggtgaataa

SEQ ID NO: 183651 - DNA, 225 bp, Klebsiella oxytoca
atgcttctcatgaattatgaccgtgtgatcactcacaaaggcgcttctcttattctctctgaaaagatgattaagcaagcggctgattttctcaatgtggacgttgagactattcgagaggctacagagaaattctggcctacagccacgatcacaaaatcaaatacccctcacccatcatcagggcttgaggtacgattaaaactattagcaaaaggaaaataa

SEQ ID NO: 183652 - DNA, 339 bp, Klebsiella oxytoca
atgactaataagactatggacaccataaacaccctacttaattctttccacgagaattggcaccttcctattcttgaattggttaatgcagcgtggcgtgacagaacgccagaagcgctgttatgcgcgtctaaacaaacagagcaggggatagatgcactggagcagttagaacgcgccatagcgcttctgatgcgctctcagaacagtacggttacagaacatgaggtttggaaagtgatcgatgagtggacggaacttgcatgttctctaaagtatgtctcacaggaactttccgagcttgccatagagatcgctgaagaatacgctataacataa

SEQ ID NO: 183653 - DNA, 393 bp, Klebsiella oxytoca
atgggaaaaagaaaacgtaacgtagttacaaagcttgaacgaaacgcacaatcattattacgaacatctgattttcaaaatctctctcgcctttcgagggaatacaattctttccctggtgaatggcacactgaaacaatcgaagagaatagccctgcaatgtctccagatgagatggacgcattacaggacattcttaatagctgctcttctgcattctggaaacccaggaagataaaattcttcaacgtggattcttcgaatctccacaaatggcaaattcttaatttctcctcatacgaacattattgcggctggctttcggtaaatcaccttaacaatttaacccgcgactttgacaccctatttgatactaaggaacattatgactaa

SEQ ID NO: 183654 - DNA, 561 bp, Klebsiella oxytoca
atggcgaccactaagataatcacccaggcagaggcgtttaagctgataagctggcttgagagtcataacaaacagctattcgcagatgtagcgatcactatggcctctttatgtttacgggtaggtgacacggtgaatttgaagttcagccacttcaaggagggaaacacgctggaagtgctggagagtaagacggggaagaagaaggaaatcatcgtccctgcaaaggtgtgggagatcgtagaacgccgccgccaggcattcccgaaagacgaatacgttttcacgtcacacagcaaccgtgcatcagggaaagcccctgtaagccgtgagcaagtgaaccgtgagatcaaacaggctgcggagaatgtcgggattaaaggaacggtagggtgccattcttttcgcaagttttctgccacacaggtgtgggagaagtctaacgggaatttggctttagcaatgaaagcgctgaaccattcagatcctaaagtgaccatgaactatttgaagattgacgttaagagcgtgggcgctgcccttgcaaacatttgggattaa

SEQ ID NO: 183655 - DNA, 687 bp, Klebsiella oxytoca
atgctaaaggttattgcttcaatctccgtttttataatttttaccgttattggctccctgttttctggatgtaatgatggttggatgtctgcatcaataggaagtagaggagcttgttcccatcatggtggtgtaagcggtatacccggattgtttatgtttgtcgggtttgtagtaggtgtgtttctattccttaaattatcatcaaaaaatagtattcatcacgacgataccaatgcgattgatactggcattagaaatgttgagaatgttaatagtagagggctaaaaaaaaccactataaaagatgatgaaaaaaaagaacttatcgcatcatttgaaaagtattccgaaaaaaataaaaatcctctattgaaagtctttgtttactctaacggtctattgctgtgtgagttaataaataaaaataatggttatgactgttttacaagaaaattaaacatgacaagaatgaatgaccttcaaactgcattggagaatgtttttctgcatgatggtactgaatttataacgggcgtaaatctgcggtattttaagttgagatttttcagtgacaatgctcgaaggcactctgaaatcgtggttggaaattttaatgagccaaaacttctaagattaaaaaacataataattgatgcctttcctgttgtagcgagaaaaatgtaa

SEQ ID NO: 183656 - DNA, 561 bp, Klebsiella oxytoca
atgggctggtcttcgttggttaggataaccattggtacatttctattagctgggttgtcgttctctacatacgcgaagaactgcaagaaaggtatcccttgcggtaactcttgcattgcggcatggaaaacatgcggtggtagttcgcgctcatcttctacttatcaacattactcttatccgtcatcttctcttcatagctcaatccccaaatcctctttgcattccccatcagctaaggctgacggaaaaactacggtttcaaccgcgaaaacttatctttgtcagtatgctattgcagcaatacagaatggaaaaataggttctttacgcgtgttgggtagcaccgaggtaacgttgtacgtcgatagcttcaaagccaaccgtttaaatggtacatacctgttatcgccaaagctggaaactaaaggcaagttgatgacggcagatgataaaagcaaagtgtatgcctatgattcttggctgatgaactttgcaattagtgaccgcatcgcaagaagcactgagcaatgggataattgtaaactggttcacaattaa

SEQ ID NO: 183657 - DNA, 840 bp, Klebsiella oxytoca
atggccggaaataatgttaatgaacccgaagtgttaaccgggcacactgatgtgatttgctccaccagcattgaacgtattgttacaggccgtaatgctgcgctgacacggattcaaagccttatcagtgaacttgatgatatctccattctgacccacgatatcggcggtggtacagcacaagagtggggaatgcgggatagccatcgctacgattgctggttcacggaaaaaaccgataaagcaatgaaagcgatgacccgcaatattgatcgccgcatctggcgcgatatgatgaataaatcaggcatgctgaccctgatggatgctcaggcgcgtgacgagtggcacaaaagcctggagaaaaacgatatccccgcgatctctgaaaacaatatccttagtacctttgagcaactgaatcacgacaaacaggccgtttttgagcgtggtgttatcaacgtttttaaagcgttatcgtgggattataaaacgaactcaccctgtaggtttggaaaaaagatcatcatggatggtctggtttcttacaaccgctgggggtttagcttcacacatggctatcgacgcgaccagattgttgatctggaacgtatgctgacactacttgatggtaagctgcttccggacaatcgggctgacattgcctgtcggctgagtgaccatatcggccagcagcggacttctgaagtgtatgacgatgagctattcaggattaattattttcagaaggggagtgcgcacattgcgttcaagcgtcccgagctgattgagcggctcaacgatattattgccagacactatccggggatgctagcttga

SEQ ID NO: 183658 - DNA, 1194 bp, Klebsiella oxytoca
atgaaagaacgcatgccttttgttatatatgtctttgcactctgcgcttttgctttgggattcactgaatttgtcacgatcggcttagtttccaggatatcagctgatctaaacgtcagtgtcagtcatgtaggtacagcggtgacagcctacgccctcggtgccgtaattggtgctccgggattaactgcgttggcaacacgatggcctcgtaaaagattattacttgttgctatgggcctgtttacagttggcaatggtatcgtcggtgcgtctgagtccctaacgcctatgttgattgcacgatttgcttccggtttagggcacggagtgtttcttgctgttgcttcaagtgtggcaacccaactggctgggcgacatcgtgctggcgccgctgtttcggtcgtttttggcggtcttacaattgcgttggcattaggcgtaccacttggtacctacatcggtagtctgttgagttggcagtctatattcatggcagtaacggcaagtggagcgatcggtttcattggattggcaatgctgatgcccacggatcaaaatgatccctccttgcaagcaaatgccatggacggtttaaaagccatgttcaacccactactgcttgcgggagcaggaattacagttttggcctatgcaggatcttttgccctgtatacgtatatttccccgattctacttcaggtaacgcatgtagacgagcgtacgagtagtttgcttatgttggtctacggcgtgatggccgctatcgggaatgtctggggtggtcgcctgactgacaagcaaggtgcagatcgtgccgtgatgacaattcttattggtctggcgatcgtcctctttgctatgtggttctctgtctcatccttaatgttaatggcactgtttattgggttgcttggagcattgacatacgcagcggtcccctcaatgcaagcaagagtgatagggctatctcacatacatgcacctgaagctccagctgtggcagcaggactgaatattgccggttttaacggaggaattgcattagggtcgctattggggggggtagcactggatgttactggtcttacaagccctacttgggttggaggcggagtagtaatcgttggtattttatggatgttattacaaataaattctaataaaagacgcaccacctccgattactcctga

SEQ ID NO: 183659 - DNA, 927 bp, Klebsiella oxytoca
atgtcagacaatccaacttgcctaaacattagagatggaattccagactggataactataagggaggcggtaagacttctcaatgcattgaatgggtgtaaaataagaaaaagtgatttttatcgatttgctctgcaagggaaaattcggttttcaatatattttcaatccccagtaatattgaggaaaattaaatcacgaaatcataaattaaagctaagaccaataaaaaactcgtcaacgatgaaatcattcatgcctgccgaaagttcctttgtcaacgagaacaatttaactttcagtactgaaggaagatatatccaccctgtacaaagagtcattgacacaacattactcggctatgaatatgtccttatacagcgtttacttgcacattcattaaagataccatcacctgtaacaggagcaaagtcgaataattatggtattaccgtctgtttattgggggaatcgtttcaacttttcgaaaagatgacatggcatgaaagaatcgaacgacacgtaaaaaggctacctaaagatatttcatcagatgattacgaagatataatactaaacgctacaaagaaagattcgcataaatattattttcctatgcatgaattaccgagtgatgcctgctttgtcctcagaaaaagtgaacttgataagttgatcaacaaaccgatcgaaaaagaaatacttcaaccgtctccaactcggatatccacccctctatcacgcctcttctggcttgcctgcaaaaataatgaaactatcagtccgttaatcatgcaaccgtataaactactgtccatttttgaacaatgggcatctgaggaaggcattaccgatcgattcagtggcgacacgctcaagactgcgcttgagcgcggctcgcccccttccctgccaacacaaaagtaa

SEQ ID NO: 183660 - DNA, 897 bp, Klebsiella oxytoca
atgagcaaaaagaatcttttattggccacacgacttgcggatatcttgctacgttttaaccgtggcgagactttaacgcttagcgccttggcggaagaatatggcgtgcatcagcgcaccatccgtcgagatatagaggaacggctcgccgttgcaggcatagagaaagacgcagagctaaatggctataccctgcggcctgaatatctcggcaaatttgatgcatcaagcattgatacctttgctaaagtagccggagtcaaagggttgtttcccgtgatggatagaaaaatgctccagtccatgttttacccggtaacagaaccgaatattctggttaggggccatcactatattaagaatgatcagcaaaccgagaatttcgtgcgcctacagcaggcgattgatgagcgtcgacgagtatcatttagtttttataagcgcgctgagcagagaagctacaccgtagagccttatcaactgatcaaccataacggagtctggtatcttgccgccaagcatcaacaaaagattaagaaatttacgcttggtaaaatatcagccctcaattgcacctttgacctctttgaacgctcaccttcgttgcttaaaaagttggaaagcgaagaaagcgtgtggagcaatgaacagaaatttgaagtggtaatcaaagttgcccccgccgtggctgaatattttcagcgccgtgatcttgtagtcggacaggttatcgaaaaagagcttaacgatggtggattaattatctcaagtaatgtttcgcataaaaatgaggttttgcctgtggtgcaatattggctccctcatttgagagttatttcgcctgaaagtttgcagcaggaaatggaaacagagatgaaaaattatctgggtatataa

SEQ ID NO: 183661 - DNA, 975 bp, Klebsiella oxytoca
atggcaggaaagaaaaatggtaaacaagaatttaccagaaaaatactaaaggtggctgatcattacaatgtgattgtcgcggccacgatgagtgcgggaaaatcctcccttattaacgcgctattgggtaatgaagttctttactcagccaatgaagccgcaactgcgacattgacgcgaattacccataatcgaaatttacgcaagcgaatcgaaggggtgagctacacccaacagggcgaatgccatgaacgtagtaaaaatctgcaaagtgctaccctcaggcagtggaacgacaatcaggaggtgaagtacatagagctggattgccgtattgagggcctgcgtaaaacggctaagccgctggttatttacgataccccagggccaaacaacagccaagatgccagccataaaactctgctagaagaggcactgacactaccggggaaaaaactgctggtctacgtgctcaatgcaacccaactggcgactcaagacgataaacaactgctacaggagattaaagatagtccggccttggcttcaggtaaccagattatttttatccttaataaggtagatcagcttgatgacgaacgcggcgagacgatcgagcttttccttgaaaaaacccggagctacctggagcaaacgggatattctcgtccagtgattatcccagcgatggtgcaaacatccttaattgcaaaaaaagtgctcagtagacaaaacattacccgtaatcaaaaacaccgtctgcaggctgagcttcaacgatttagggagaataaatttaacctcaatgaagcgtcgcatatacctctcgctattaagcgtcaggttcgtgctgaattaaaaagaagtcagcctgtaaatgtgcagcctgacatttttgataaaactgagttgacacaatttattgcctacagcggtattcgtaccctggaaatttttctttcacagcataattaa

SEQ ID NO: 183662 - DNA, 2259 bp, Klebsiella oxytoca
atgaacagtatttatctggaacataacccctttaccgttgaaacaatatttctggttaacggtgtagagcctgcatcaggctgtaaactctccagttataaagaagcacgtttgcagctttgggtagaatcattgtttgccgagttgctggcactgctaaacggcgaaacacagcttgacgtggagttcaaaggcgttgaatccgactttatggatgtgcaggatgctgctgctgtagcccgtgataacggtatggaaatcaatctacgctggcagccagtgcgggcaacagaagatcgcctggacgagattaacgcgctgatggaggaggctaagctcaacccgcagttcaatgattacatcgttaacaatgaacaggtgcgtaacgattttcatgaggcgttcaacaacgattttaatgtgtatgtggttgcgaccatgtcttcgggtaaatccacgttaatcaatgccatgctcggacaggatctactaccagcggcgaacgaagccaccacggcgactattgcacaaatcattgatgataaaacgacggggaatagttttgccgcgcgccgtttttccagcagtggcgaggaagaatcgcggcccgaaatcaatgccgatacactcaaagagtggaaccaactgccagatactcaggaaatcgaactacgcggcaatatcgtggcgatgcagccacgtgatcatgttcgcctggtactaactgacacaccggggccaaacaacagccaggatgcagatcacgcgctgaaaacgatgagcttcatcaaggactccaggcgtaacccgctgatcctctatgtgttaaatggcactcagttaagcaccgacgatgataaacgattactgagcctggtttcggaaactatgcaaaaaggcggtaagcaaagtaaggaccgctttatttttgtggtgaacaagatggatgcctttgacccggaaaaaggcgagtatgtcggtgccgcacttgagcgggttaaagaatatcttgagaacaatggtatcaataatccgcaaatttaccctgtctctgcacagttgacttacctgttgcggaaacatcctgacagcctgactcgtaaagaacgcggagatttaaacggcatgacggacctgttccttgaagagtctactatgaacttccctgaatacatgccgctcacctcgcgtgtgcgccggagccttgaagaacgtggtcttaccaacgttctcaaacgcagcggtctgccagccgtagaggtaatgattgatgaatatatcgataaatataacgttcccacgcgtttgaatcgtgcttatgccgctctgcgtcgtgcaatcgagctggggatgaaagaaactcagctggctgaacagcttaagaaagatgagaaagtgctgatgatgattaatgatgaaattaatcttctgcaagaacgacataaaaaagggctggacactgaagcgtataaagaacagattcaccgtgaagggaaagggttaccaccattcgttgctgataaattcacccatgaggataacaagttccgaagcctaataaaggcattgactaatgacatttcccctctgggcgaggtggatataaaccgagcaaaaattgaattagaaaatgccgagcggaaactgacctttgccagtaatgatgtgatcggtaatcttgaagtcgccttctcggatgcccaacagcatatcaaagatgaattgcaaaaagagtatctgaattttatcgctgagatattcgatggagcccgcacgctggctttgcctatgctgcagggactcaaagagagtatgcaggatatgtcgcttaacctgagtctcaatgagcgcaatgttaagaccaaagaggaacgctataacggccgcgaggtcagtgattccagctggtataaccctttctcctgggggcgcacccgtattgtgtacgattatcgcaccgttgaatatgtcgatatgaatgaaacctggaaagagaaacgaaccattatcgaaagtgagtttaatgacttccgggcgagcgcgctgaaaaaagtggaatccgataaagacaagctggtggaaagctatctagcctttattgagcgtgaattcaatgaaaagtttgacgctttaatcggcactatgcaagagcagctaaataataaagcagttcgagagcagaccatcgcagaggcgagagagcagcagcgctggattattgatttcaaagcgaagcttgataacacgctggccatttaa

SEQ ID NO: 183663 - DNA, 867 bp, Klebsiella oxytoca
atgatggacgataaagccaaaaatcggcaaaccctgcgccagaatctactggagcagctaacccgtaatgagctggaaggcgatgaaatacgtcagattgtcgcttccagtgtcgctattgacgatttttttgatgactaccaggttaacgagatcttcgctgccattgagccagatgaacttgactggaacgcaggttatttcgaccgccagcgcaaactggcgcagcacaacttcgccgagaagcgggtcagccatcttattgatgtccgtgagtatcttattcgtaatgggattgctggatttgcaaaagccccacttgcaaggcgcactgaggaagcgaaaacaatgaatatgcaaggttacacacctggtgcaacattagcgaaaatggttgaacacggcactaccagtcaggctcgttcagcgcttattaatgaacttgaagataatcgacttgatgatgctgaaatcgaacgagctgtcgtatgggctcaggcacgggtcgcagatttgtttgtcgattatgaagaaaatacgttggctgggaagatgaataacgatcctgaacaatgggatgaaaattactactaccagcaaacttccaatatcaatgtcaactttgccaaagttcgttttgaacatttgattacagtgcgcaatacgctgcgccagcgtggagtgaaaggctttgagcgcattatcatcaagcccaaagctcaaccacaaccccaacaggcgcagacaactcctcacccgcgccatgattcctcttctgctcccgctcagccgggcttcttgcgcgttgcgctgatggcgggtggggcgcttgcggtgctggcggcgctggtgatttctttactctaa

SEQ ID NO: 183664 - DNA, 3255 bp, Klebsiella oxytoca
atgtcgcaaaaaatgatgacaccgtcgcgcctcaaagagcttgagcagcgcacagatgtgactttgcaatcggcaagagtgcttatcaaccgcagttatctggcggagatgaaaaactaccctttgcagtccgtttctacccagacagggctgcccgtcaaccgtgccggggatatccgtatattccgcattgagcgcatcgtgcaggaaaacaaacaatcggtgcttgaaagcaccacagctgcctataccgcgctgggagcagccggttacgccgtgtttctgttcctgaagtccgatggacgcgaaaccaatttgtacattggtacgcgtggtattccgggcaaaatgctggggcataattctggcgagctgctcaaggaaacctttaaagggcatttttccggtagtagcctggtgccgctggcggcagatgaaacggacgaacttcttgaggaggctctggcgcagcaggatgagccttcggcaaccatcaccgccgttaccggtgtgccgtccttgtccacggataatcatgaacatttcatgcaggggctggaacattttatcgacgctgcggaaagccgggtttatcaggctctgatcctcgcggagccggtttcgccacaaaatctggatgtgattcgtacaggttatgagcaggtggcgacccagctttccagtctggcaaaaaggcagtactcgtttggcgttcaggacagtgaaagcgtaggtttgagcatcagcgaggggttaagccagtcgctgggcgaaagtctgggaatgaccgaaactaaaggcacctcggacactaccagtaaatcgaccagtaaaagttggggagagtcgcaaaccatcagcacatccgatgctttcacacgcacctatgatgaatatcaccaggcgcgcgctaagggtgatagcatggggatagctcgcggcatcggcagcctgctgaaaaatgcggtactaccaagaaatatttctggcagcgtcagtagcggaggatcggaaagtctttctgaaagccataccgacaatctgtcgcaagccagcagcacaacgacaagcaaaaccgatactactagtcgcaccgacagtcattcgctaaacaaaacccagggcagtagccaacaaatctcgctggaagtaagcgacaagaccatcgaaaagatgctggaaaaagttgaccatcatctggagcgcgttaacgaagctcgtacctatggcggctggcaaaccgcagcctactttatcggtgacagtgccgcctcgtctgaatccttagcgagcattttcctcgggctaatgcgcggcagtcgctccagtactgaagactttgctctgacgacctggcagtctcaaaacaaaagggtggttctcgattggctagctacgcttacgcacccgcgtcttactccagccttctctgaaggaatcaatattgattacctgacacccgctacgctggtgtcaggtaaagaaatggcgattcagcttagtctgccgcgccgctcaacctctactgtggcggtacttcaaactcaggctttcgggcgtaaagttcagcgtcttgacagcaatggggagagaacgcgtgccgatcgtgaaatcagcctcggttctatacgccacttgtggaatgatttgccgcaaaccatcaatctggatgtcaaccaactggcgagccatctatttgttacgggctcaaccggggccgggaaaagcaataccatttatgagcttctttcccagctaggccgtcatcaggtgccgtttatggtgattgaaccggcgaaaggtgagtacaagcatatgtttggtcaccatagcgacgtccgggtgctaggtagcaatgcgaagtactgcgagctgctgcgaatcaatcccttccgtttcccggatgagacacacgttcttgaacacatcgatcggctggtggagattttcaccatgtgctggccgatgtatgccgcaatgcctgccatcctgaaagaggccattctgcaaagctacagcgaatgtggttgggatatagtcagttctgttaaccgtttcaccccggctttgttccctacgttctacgatctgctggtgcagttgaaagccgtgatcgatgattctgcctactcccaagagcttaaaagcaattataccggctcgttggtgacgcgagtgaaatcattgaccaacggactaaatgggctgattttctgcggtgaagaaattgataacgcagagctgttcgacagtaacgtgattgtcgatctcagccgtattggttctcaggaaacgaaatccctgattatggggatcctggtcatccgcctgagtgaacatcgtgctgcgttttcaggcatgaatcggccgctaaaacacgtcaccgtgctggaagaggcacacaatatcctcaagcgcagcacctccggaggtggtggagaagggaatgacattacgggaaaatcggtggagatgctctccaatgcgattgccgagatgcgcacgtggggagaaggatttatcattgctgatcagtcaccttacgccgttgatatttcggcgattcgtaataccaatacgaaaattattatgcgtctgccggacgaagccgaccgacgtatcgcggggaaatccgctggattaaacgaagatcagcttgatgagcttgcgcgtctgccaaaaggcgtggcgctggtataccagaatgactggcttgaacctgtgctgtgccggattaataagtttgccggggaagaagagacctaccgttatgaagccaccgcagtaagttcgggcaacgcccaactttataaccagcaactgattgcctggctgatggcttcgcgccttcgacagccactggagatctcgttggaaaatctggaggttgggctggaaggtagcccgctggcaaccgggcaaaaaattgtgctgaaaacgctatttgaagagttccgcacaactggaaaaattagcctgcaaaacgaacaacattttgcccgcttagcaaagctggtcgttaacctgctggattgcaactccgccattgaacgatgtgttcgtactacgtcgggctttgatgaattggcgcagtcgttccatcagcttattgttaaccaaaccggtgaattgccttcggggcttgaattggcggtacagcagtgcttcatgcgtgagctggctggcagaaatgatgaatacctgaaggtctatgccgcatggcgtaaatacgtcaccccggagactgtagcatga

SEQ ID NO: 183665 - DNA, 600 bp, Klebsiella oxytoca
atgattgagatgaccattttgaaagaactggtggtggaatcgctgggggatctgttggaaagcgtgaaggagatacgcactgaagacattaatgtcgaagagctcgacaagcctgttgatctggaactgccgcgtaatgagttgactccgctttccgaagaaactaaagaggtcttaagcgaggaaaggtacactgatgaggtggtcgaaagtatcaacagcgaagaggaggcagcgatttatcgggatgcaggtctggaatgtcagactgttaacggtaatgacgcattaattaatactgaaatcgacctagatcaaactgatgcgttaggtgataccaacctagaacgtatggaaaaaggcaagtcgccattggatgccaatggtaaaccgattgagttacatcacgttgggcagaaggctgactccccgctggcggagctgacgcacgcgcagcacatggaaggtggtaataacatcattttacacgacacaacaaaagagtctgaaatcgatcgtggcgcgtttgccaaagagcgtgaggcgcactggaaagcacgagctgaagagattaaacaacgtcaggaggtggcagcatga

SEQ ID NO: 183666 - DNA, 411 bp, Klebsiella oxytoca
atgaagaagttagcgcaacaggttgcagcgcaaggtgccgatattcgccctgtgaatgaggatgaaatcataacggctgaacagaccttagggattcaattttccccagagtataaagcctatttgtctgagtttggtttgattgcctttggggcgactgagattagcggcctcggggttcctgcgatgtcgcatttgaatattttgagcgcgatagagcctcttcgtgagggtaaggactatccgccgcaggctgtaccgctttgtgatattggtgatggctactattacctttatgataataaacagcgaagaatcctcacatggtcgatgataaacggcgtagtggatactagcgatgaagacctggaagcctttctactgcgcattgtcttcgacgttgagtcataa

SEQ ID NO: 183667 - DNA, 2076 bp, Klebsiella oxytoca
atgcaacagcaggataactcagccaataacatggaagcggcctctgcattggctcaggacctagattcattgttgaatcagcactttcgcggtcgcgtggtgcgtaaggatctgactaagcaacttaaagaaggggcgaatgttccggtttacgtcctggaatatcttctcggtatgtactgtgcctccgatgacgatgaggttgtcgagcaggggctacagtcggttaagcgtattctttctgataactacgtccgcccggatgaagcagaaaaagtgaaatcactaattcgcgagcgtggttcttacaagattatcgataaggtcacggtaaagctaaatcagaagaaagacgtttacgaagcccggctctctaacctcggcattaaagatgccctggtgccgtctcagatggtgaaagaccacgagaaactgttgactggtggtatctggtgcatgatcaccgtgaactacttttatgaagaagggcaaaaaacgtctcctttctcgctgttcacactgaagccgatccagatgccaaatatggatatggacgaggtatttgaggcccgcaagcagtttgatcgcgaccagtggattgacgtgctgttacgttctgtcgggatggagcctgcgaatattgaacagcgtaccaagtggcatctaattactcgcatgattccctttgtggaaaacaactataacgtctgtgagcttggaccacgtggtaccggtaagagtcacgtttataaagagtgctcaccaaattcgctgttagtttctggtggacaaacgacagtggctaatttgttttacaacatgtccagtcgccagattggtctggtgggaatgtgggacgtcgtcgcgttcgatgaagtggcagggatcaccttcaaagacaaagatggcgtgcagatcatgaaggactacatggcgtcaggttcgttctctcgtggtcgtgactccatcgaaggtaaagcctccatggtgtttgtcggcaacattaaccagagcgtggacacactggtcaaaaccagccatctgcttgcgccgtttccggatgcgatgattgatactgcattttttgaccgcttccatgcctatattcccggttgggaaattcctaagatgcgcccggaatttttcaccaatcgctatggattgatcaccgattatcttgccgaatacatgcgtgaaatgcgcaagcgtagcttctccgatgcaatcgataaattcttcaagttaggcaacaaccttaatcagcgtgatgtaattgccgtgcgccgcactgtatcaggtctgctgaagttaatgcacccggatggtgcttacgataaagaagatgtgcgcgtatgcctgacctatgcactggaagtccgtcgtcgcgttaaagagcagcttaaaaagctcggtggtctggagttctttgatgtgaacttcagttatatcgataacgaaagtctggaagagttcttcgtgagcgtaccggagcaaggtggcagtgaattgattcccgccggtatgccaaaacctggcgtagtgcatctggtcacgcaggcggattcaggcatgacaggcctctatcgttttgaaacgcagatgactgcgggcaacggcaaacatgcggtatcaggtttagggtcgaacacagcagcgaaagaagcgatccgcgtggggtttgactacttcaaaggtaacttgagtcgtatcagtgctgcggctaaattctctgaacatgaataccatcttcatgtggtggagttgcatagcacaggaccgagtacaaccaccagtctggccgcgttaatcgcgttctgttcggtattactggcaaaaccggttcaggaacaaatggtcgtattgggcagcatgacgttgggaggagtgacaaatcccgttcaggatttggctgcgtgtttgcaggtagcattcgatagtggtgctaaaaaagtgttgctccctatggcctctgctatggatattccgaccgtaccaactgagttgtttaccaagtttcaggttagcttttatgccgatccggtagatgctgtatataaggcattgggtgtcaactga

SEQ ID NO: 183668 - DNA, 2598 bp, Klebsiella oxytoca
atgcaatttaaagaactggaatccgggcttcgtcagaagtttaccgacaaccgtatcgtcttctggcacgacccggaacaacgcttcactgatttactcaatgagttggatctcgacaacgttgcgctgctggatatgcgtggcgtttctgtgctcgcaacaaaaaaacgactcgaaatcgacgagcctgagcagaaatttttactctatttcaccagtgaggttcccgctcgcgagcaggactggttgctggatatccgcctctatagcaccgaattccacgctgattatgcggcgatcacactgaattcgcttggtattccgcagctggggttacgcgaacatattcagcttcgtaaagccttctttaccatcaagcgaactcagatcctgaagggatgggttaccgagcgggaaacggaaagctcactcgataagaaaatgctggcggtggtggtcggggccagtacctttgaaaccaaagaaattttgtttgccctgattcagcaatttgccgcggcacggcagcaggatgatagcgcgctggagaacaccttcaccgtactgaagaaacttggcctggatgaggtgctttgggaaattcttcgccttgagctagggtaccagttcgaaactccgtcactggaaaacctgctgctgaaactgttctgtaccgatctctgggcgcagggtgatgaagcgcatcgtgattggttaagtaaaaatgtactggctaccgctgctggccgagcatcttctctggcctttatgggagcgtggcgcaacgatcgtcgctataaagcagaatacgattattgtgcagaggatttgcaacaaacactgcagccaaaagagcactacaactacagttcaccgtacgccctggcaaaatgtgaaaccttcgaggccattgaacaacttattattcgtggtctggtgacccagttgcaggaagagagcaccactctggacagagatgcgtttaaagcactggtatctgagcgcagtgctaaatactggagccagacacgtccagagtatctttctatctggaatgctattcgccaggcggaacgtttgctgaatttgcgtaaccgctacactgacggatttaatttccccgatacaggcgcgttctggaaggcctactgcgacgaaatttatcgcttcgatcagacctatcgtttgtttaatgaatatgccgcaccggtgcacagcaaaggggcgatgatcctgcatgaactggataaattcattgaagagttgtacagcaactggtatctggctgagctgagtcgcggctggaacaaactgctggatgcggaaaaacgtatgcaggcatggcaatttactggcataccactgcagcgcaatttctataaagagaatgttaaacgtcagtttgacacctctcaggtgaaacgcgtttttgtcgtgatctcggatgcactgcgctatgaagtggcggaagagctgggcaggcatattaaccatgagaagcacttcagcgcagagctgcgctcccagaccggagtgctcccaagctatactcaactgggcatggccgcactgttgcctcatgaatcgttgagctaccttcctgataattctggcgtagtttacgccgatgggatgtccacttccgggtttgaaaaacgagccgctattctggcgaaggtgaatggtgtggcgctgaaagcaaaggacttgcagaacgccaataaccaggaagtgaacgagcaaatccgcaacgcttccgtagtttatatctggcacgacactatcgatgccatgggtgataaggctgctacggaagataaaacgtttgaggcctgccgaagtgcaatcactgagcttaaagatcttgtttcacgcctgcgtagccgatttaatgccagccgaatttttgttaccgccgatcacgggttcctgttccaacagcaagcgctggtggagcaggataaaacgaagctggaaagtaaagccaaagacacgattgaagcgaataagcgttttattgtaggtcatcaactgcctgaaagtgaattttgctggcacggcaaacttgctgatactgcaggcgcaagcgatgagagtgaattcctgttacccaaaggagtacagcgttttcacttcgtcggtggcgctcgtttcgttcatggcggagccatgctgcaggaagtgtgtgttcctgtattgaagattcgtgcgcttgaaaagaaagcggctgagaagcaactccagcgacagcccgtgtccgttgtcgcgcgagatcaggtgatcaagctggttaacagtattgataaagtcggttttattcagacttcggcagtgaatgagctaaatgagccgcgcacgctgaatatctttatcgtcgatgaaaacaatcaggttgtctccggcacggaaacggtttgcttcgatagtgatagtgacgatatgggtaaacgtacccgcgatgtcaccatgaaactcatggggacggcctttaatcgtaaaaacaagtatgttctgatcctggagaatgcggacagcgcaacagaatatggtcgctacccgataacgatagacctggcattccaggatgacttcttttaa

SEQ ID NO: 183669 - DNA, 834 bp, Klebsiella oxytoca
atgaaggagtttgagtggcatatcaagaccatccttgagacaaaaatcactgaaggtaaacgagcgttgatcgttgaaggtaaaacggatgaactcgtttttacacagctcttaaaaaaagtcgatccccaatgggagaccaaatggattcttgccgaagttggcgggaaacacaatgtggtagaaatccttgcagcgcagccgaaatggctgggcgttgttgatagagatgagtgggataatgctcaaattagccagaggcaacagcaacttcgtaacctgctagttttgcccagattttgcattgaaaactatcttgtagtccccagtgagcttttgtccggactgccggcaatgcgaagagcaaatcttccccctgaaagggaagccgctgtaaagtcgattaaagccttaatcaccgaaaatctggatagctgggttcagtttggagcggcatgggccattatcaacccgctttgggatgaactgcgattgctcggatttaaccgagaccttcttgatcctcaacaggtgattacagagcccggtttttttgtgcattgcgagcgttggcatgcacatctggatcctgcagtactgttacaaagataccagagcaaactggccgaaatccgcgatttgccagttgatgaacagttacgcaaaattgttcacggcaaaaaattttataaggccgttgtgacccccgcattcatgcagttacttgcaattacgaaagccatttcagtggatgtgtggttcagggaaatgccagtcccaccagctctggcatttgtctggcaacgcatggatttaaccccagaagataattaa

SEQ ID NO: 183670 - DNA, 1044 bp, Klebsiella oxytoca
atgataatagcggcgatttatacgcagagtgttggcccattaggcgatgcggaaattagcttcaaaaacgactggacgggtgaggttgaggaaaatatcctcctcaccggcccgaacggctgcggtaaatcgacgctgcttcgctctattgcgatgctttggggagcttttggattttggctagagcaatccaagccgcttccatcatctcacgaatcccggaaatggttagaacgatggaacggtgtcgcgattgttatagatgacttcacatcaacaacaccatctcgcttggggctattttttggctccgaggaatggtctgaggaattagttgaatcctataaagatgttgagtggattggtgaaagtcgtgctgggcataaattgacgctaatgatttttgaagatgcctggttccagaaatggggtcactactaccagaaaatggtgatcaccactgagagagtttcatccccaaatgtcatttatctggatgctgaggcacgcagatggcttgcgcctaaaaagaatatttcctcacttgcacaggatgatcttagccagcgctggctggcaacctatacccctacctccgactggaaagggcagcttgaagcctcgctgttcaatatgaaagcgacgctccccgatcagtatccggagatgatgaaaactctgaatcagtttctctcaggcaaaatcattgaagaagagatccagcttggacagcgtcagcaggtcaaacttgctaatggcgacactcatacactggatgaactgagttctggtgagcatcaggtcttgatcatgctctttatggttcaacgttggcttcagccgggtggcgttgtattaatcgacgagccagatctacatcttcatcagtctctggtttcgcctctgcttgggacactagaaaacatcatccagaaaaagcaggggcagcttattttgacttcccatgctaccgacgtctggcagcgctacgaaacgttagggttgcgttatcccctttctgttgaaaaggatgatgagcaatga

SEQ ID NO: 183671 - DNA, 3651 bp, Klebsiella oxytoca
atgaatacgtcaaatatcaaaaaatacgccccggtggcacgtaaacagttccgcgatgcggtcatgcaaaaactgaccacgctgggtattgggaccgataaaaagggaaacctgcaaattgcgcaagcaaccgatcttggcgacagcgtgcgttatggtcagttctcgttggataaatcactggcgtcacgccgcgagcgtctggtcaagcgagcagaaaagcagggctatgaagtgcttgtagagcacattgcttacacctggtttaaccgcttctgtgctattcgctatatggaattgcatggctatcttgatcacggtttccgtatgctgtctcacccgacgctggaaggtggttttgaggttctggatcatgtgccggaagtggctgaagctctggggctggacaaagcgcgcctagtggagatgaagctggcgggcgatcgtgatgaggagctatatcgtgaactattgcttgcacagtgccatgcgctgcacggcgcgatgcctttcctgttcgaagcagtcaatgatgatatcgaactggtactgccggataatctgactcgcaccgactccattctgcgcgggctggtggacattattcctgaagaagactgggagcaggtcgaagtgatcggctggctgtatcagttctatatttcagataagaaagacgatgtgatcggtaaggtggtgaagagcgaagatattccagccgctacccagctgtttacaccaaactggattgtacagtatctggtgcagaactcggtgggtcgtcagtggttgcaaacctatccggactccagcctgaaaagcaaaatgccgtactacattgagccagcggagcaaacgccggaagtgcgggcacagctggcagctatcatcccatccagcattgagcctgaaagcattaaggtgctggacccggcctgtggctccggccatatcctgaccgaagcctataatgtgctgaaggcgatttacgaagagcgtggctaccgtacacgggatatcccacagctgattctgaaaaataatatcttcggtctggatatagatgaccgtgcggtgcaactgtcgggttttgcgatgctgatgctggcccgtcgggacgatcgtcgtattctgggccgtggcgttcgcctgaatatcgtttctctgcaggaaagtaagctggatatcgctgaactgtggaccaaactgaatttccaccagcaggtgcagcgcggcagcatgggggatatgttttcggaaaggattgcactggttaataccgacagcgtggaatataaactgctgatgcgcaccctggcgttgttcactagtgcaaaaacgttgggatcgctgattcaggttccacatgaagatgaagcggcgctgaaagcgtttctggatggattgtatcgcctggctgttgaaggtgatattcagcagaaagaagcggtggtggagctgatcccgtatatccagcaggcgtggattctggcgcagcgctatgatgctgtagtggctaaccctccatatatgggggggaaagggatgaatggcgaactgaaagagtttgctaaaaagcagttcccggatagtaagtcagatttgtttgcgatgtttatgcagcatgcgttttctttgctcaaagagaatggttttaatgcgcaagtgaatatgcagtcgtggatgttcctgtcgagctatgaaatgcttcgaggatggttgctggataataaaacgattattactatggcacatttaggcgctcgagcttttgggcagatatctggtgaggtggttcaaaccactgcatgggtaatttgcaatcgtaatgaagataattataaaccagttttttttcgtttgatcgatagtaatgaagatcataaaaagaatgccttgcttcaacgtagcggctgctttaaagacgttgcacaacatgaacttaaaaagattccaggtgcaccaattgcatactggctaactgattcgtttagaaaagtttttgaggattctactcctttaggcaaaattgcccctgtgcgacaaggtattgctacggctaataatgaccgttttttgcgaacatggactgaagtttgttttgaaaatataggattatactttcaggatagagaatcagctaaaaaaagtaaccgtaaatggtttccctacaataagggcggggagtacaggaagtggtatggaaataacgagtatgtcgtgaactggtataacgacggtgaggagctggaaaactacaaacctaaagcggttattcgtaatcctaattatttttttagagattcaattacatggtcgtttataagctcaacgtcttttggcgttcgattctctgatgctggggcaatatttgatgttggtggttcttctgcctttccagaaagtaaggatatgtattggcttgctagttatctatgttccaagcagtgttttatatttatggggataatgaatccaacgttaaattttcaagttggtaacgtttcagcacttccaattattgaaaataaaatatcaaaatttaaagatgcgttaagcgagattagtcgggaattaataagtattcacagagatgattgggatctttttgaaacttcttggtcatttaagaaaaatcccctttcagggaaaacatcaaaaagtataagtgatagctttaaaggatatatctcggaagcatctaaatcaattaaaaaagctttgacattagaatctaaatccaatgagatttggttggatgcctatcaattaaaacatgaaattgactatcaagttactaaggaacaaataaccctttcagtaaatacgctttatcgatatggaattgacaatactcaacgattacaatcagatacaattgtagaattaattagctatataattggatgccagatgggccgttattccctcgatcgtgaaggtcttgtctatgcccaagagggtaacaaaggttttgtcgaattagtcgccgaaggcgcctataaaaccttccctgccgatgaagacggtatcctgccattaatggattctgactggttcgatgacgatgttacctcccgcgttaaagagttcgttggcacagtctggggcgaagaacatttacaagaaaacctcgatttcatcgccgaaagcctctgcttgtacgccatcaagccaaaaaaaggcgaatcttcgctggatactattcgtcgctatctttccacccagttctggaaagatcatatgaaaatgtacaaaaagcgcccaatttactggctattcagctccggtaaagagaaggcgtttgaatgcctggtatatctgcaccgtaataatgaaggcacgctgtcgcggatgcgtaccgaatacgtggttccgctgctggcgcgctaccagggcaatatcgatctggttaacgatcagcttaagagtgctgaatcgggagccgccaccacgcgtctgaaaaaagaactggatggactgaccaaaaaattcaacgagctacgcaattttgacgatcgcttgcgtcactatgctgatagacgtatcactattgatctggatgacggcgttaaggttaactacggcaaatttggcgatctgctggcggatgtaaaagccattaccggtagcgcacctgaggagatttga

SEQ ID NO: 183672 - DNA, 3615 bp, Klebsiella oxytoca
atgaatattgaacaaatttttgagaaaccgctaaaacgtaatattaacggcgtggttaaagccgagcagaccgacgacgaaagcgcctggatagaactggatgaatatgtcatcactcgggagctcgatggtcacctgcgtcagttctttgaagtctatgccccagcgactggaccaggcagattacagcttgccgacaaaatgggcgtctgggtttcaggattctttgggtccggtaaatcacacttcattaagatcctttcctatctgctggcgaaccgcgaagttagccacaatggcgtcacgcgtaatgcgctctcgttttttgaagagaaaattgatgatgcactgctattggccgatattcggaaatcggttcaacatccaactgatgtcgttctattcaatattgactcacgtgcgaatgttgaagatggcgttgatgccatcctcaaagtctttctgaaagtctttaacgaactggctggttattgtggtgacttcccacatattgcacacttagaacgtgagctcgataagcgtggacagtttgatacctttagggccgccttcgcggacattaccgggtctcgctgggaagacgagcgtgatgtttatctgatgataaacgatcagatggcacaggcgctgagtgttgctacaggccagagtgaagagtcttctcgccagtggatcgagcaacttgataagaactttccactggatatcaaaaatttctgtacgtgggtaaaagagtggctcgacagccaaggtaatcgtaatatcctgtttatggtcgatgaagttggtcagttcattggcaaagatggccagatgatgctgaagttgcaaaccattacagaagatctgggcgttatttgcggtggtcgggcatgggtgattgtgacatctcaggcagacatccgtgccgcgatcggcggtatgagcagtggtgatggtcgagatttctctaagattcagggacgcttctctacccgcctacagctctcaagttccaatacttcagaagttatccaaaaacgcctgttggtgaaaacagatgcggcaataccggcgctggaagctgtctggcaggaaaaaggtgacattctgcgtaaccagttggcgtttgacacgacaacgacagccacgctgcgtgcctacacgaacagccgcgagttcgtggataactatccgtttgtaccgtggcattaccagatcctgcaaaaagtctttgaatcaatccgcaccaaaggggcagcaggtaagcaactggcaatgggggagcgctctttgctggatgccttccagtcagctgcagtccagatttctgccgatggcctggatagcctggtaccgttttggcgtttctactcagcgattgaaagcttcctggaacctgcggttagccgcactatcattcaggcctgccagtctccatctctgacggaatttgatggcaagctgttgaaaacgttattcctgatccgctacgttgatgtactgaaaagtactctcgacaatcttgtcacactctctattgagcgtatcgataccgacaaagtggaactccgtcgacagattgaagccagtcttaatcgtctgcaggctgagatgttaatctcgcgtattgatgacaaattcgttttcctcactaacgaagaaaaagagattgaaaacgaaatccgcaatattgatgttgaattcaccaccatcaataagcaactctcaaccattattttcgaagagatcctgaagaataaaagatatcgctatccggccaataagcaggattttgatatcagtcgtttttgtaacggacatccgctggatggtgcgaatcttaacgatctggtggttaaagtgctcacgccactggactcgaactacgaaagctacaaaggggcgcattctaatagtctgctgatgacggacagtaaagactgcatcttaatttgcctgcctgatgaggctcgtacctggcaagacctgaccatgtacgcgcagaccaaagccttcctcagcaagcaaagcggccagcgcccggaacaggcaacgctgttggcggaaaaaggccgtgaaaatggcatgcgcgaaaaaacgctgaaggcgcagatcgaaggcttgcttgctcaggctgatgtctgggcgctgggcgaacggctggataagaaatcctcttcaccgttagctatcgtggatgcagcctgcagttacgttatcgagaacagtttctctaaactaaaattgctgcgtcttagtaccggagacgtaaatcgtgaaactcacgcgctgttgacagtagaaaatgatacccagctcgatctcgggaatatggaagaatccaacccagaggcgatgcgtgaagtggataattggatcagtatgagtattgagacccataagccagtttacctgcgggatatcctcaccacttttggccgtcgcccatttggctggccggaagatgaagtcaaattgctggttgctcggttgacacgcagcggtaaatatagtttcactctgcaaggcagtgaaatcgcactgaagcaggcgtgggacgcgtttaataattcacgtcgttacagcgatttgcgtttgcataaagtacgtcgccatgacgaagcacagctgactaaagccgcgcaactgatggctgatattgctggagaaccgtttaacgagcgtgaagagcagccgctggtctctcatattcgcgaactctttggccgctggaagagcgagttgaccgtctttaaaactcgtgcagagagtgggcaaaaccctggccgtaaagagatagaagaaggcctagtattgctgaacgggatcctcaacgagaaagaagaatactcggtcattgaaaaagtcaccgcagcggctgacgatctcgaagatttctcggaagtctgggacgatttggtcagcttctacaaaaaccaatacgtcacctggcagcgcttgagtgcggcgttaaatggcagttttaaagctaaccgtaatgcgttggaaaaagacgaaacggctcaaaaagcggtgcgcgagctggaagctatattcggcatgcccagcccttacggagaactgcacagaataattccgcttattgaaaccgttgaaattattaatcaacgtctagttgaagaatatcgaagccatgcgctgctacagatcgatagtcatatcaatgaactgaagcaaagtatgctggagatgcatgttcctgctgacttacagcactcgcttttacacccgatgcagcaatcgcgtaagaaagtggagctgaacggtctgatccctcagattatggaagaggaggctgaggttcgggcgctacaattcaaagcaaacgaacgactgaacagttggattgaagaacagcgcaagaaagtgcctgaaccaaaacctgcccctcagccagggattatcgacccagtagttaaacctgaacccaagctgaaaaaaactatctacgtgaacacgcgtaaaacgatggaacgagctgcgggtgtggcaacgctggataacgccgaacaggtagacaaagccctggagcaactccgtaaaacactaatggatgccattaacgcaggtgaacgcgtacagcttcagtaa

SEQ ID NO: 183673 - DNA, 603 bp, Klebsiella oxytoca
atgaatgacccgatccttgaatatcgattaaaacagttagaagaacgtatcggcgacgaccgttttttgaaaaaccaaggttccggcaatgagattggcttctggatttttgactatccggcaaagcaagagcttcaggtccgcgaataccttcactttttattcaaaaaactggacaaaaagtacacctataaaacgctaaatatcttccaggtcatcatcgatatgctggaagaacgtaagctctttgaccgtatctgccagcgagagcctgaacttggcttggaaacactgaaaaagcatctggcagccccactaagccagaaaaaaatcgcggaatatattgcgcgcactgtcgatcttccggcgcagcaatttgtcattctgacgggcctcggtaacgcctggccgttggttcgtggtcatgagctaatgagcgcacttcaggatgtgatggggtttacaccactcctcatgttctatccaggcacctacagtggatatgatctttcaccactcgctggcattcactcccgtaactattaccgcgccttcagactggtacccgaaaccggaccggcggcgactttgactcctcgttaa

SEQ ID NO: 183674 - DNA, 618 bp, Klebsiella oxytoca
atgacaaacgctatgataaaaaatgacaaacgctggattggcgatctgctgggcggttcgttgatggtccgagagagccgaaccattgctgaactgttgctttctgaaccagatgaaacgacctggcagcagcaaataatcaaagaaaatattcttcaggcttcctccacaagcaccgcaaatcgttatgcccgaaccttaaggctgcgattaatgaccctggatcgggagtgctggcaactgattgctgatggcagtgaaagcgagcgtctgcaaatactattggttgcattgatgatccagtctccaattgttgcggagtttatcgctgaggttgtaaatccggctcgtcaacagtttaaagaaaaacttggtatgaactgctggagtgaatttgtggatgagaatctgcgattgcacccggagctggctgctttttctgattcatctatccaaaaaatgggtaacaatctgattaaggcactggcagaagctggttacctggatagcccacgccgccgcaatttacaaaacgttttccttctaccggatgttgcaacggccttgcatcgtttaaacaaagccgaactgctccctattctggagggtaacgtatga

SEQ ID NO: 183675 - DNA, 279 bp, Klebsiella oxytoca
gtgacgctcaatacttctcaggtcagttactacatgattcagcgtaagaaaggtgtaacccagcatatctctgccatgaaggcctgtatctctgtccgctccggtcgccggatcgaaaaagagcagaggaaatcatcaggtgagcggcacttgcgggcacgtcatgcccccaggaagcagtctggctcagtgatgtgcttccttttctcgcttcccgcccgcagaccttaccgatatcaggttgaaaaactgtattcactgcggtactggcatctctag

SEQ ID NO: 183676 - DNA, 465 bp, Klebsiella oxytoca
atgcataaatccacgttacaaaatctgaagttatacctggctctcgacagtgatggtcattacgtgatttcgaaagagatgaagcacacttctgacgctcagtggttctgtccctcctgctcttgccccgtgaaactccgcaacaatacctcaggagaagatgactggtttgtacacaaccccgatgaggcaactaaaccgctattggcaaattgtggttatctcaacactgaaatcaaaaggcgcgtcttcatcctgcggttacgcacgatgattgacgaactggagacgttgacagcaacgcggtactggttctgtgtatggtgtaaagcgcattatgaaggggagaaacactgtaaagcctgcaacacggggatatacagcatcagccatggcgactggtgctggaattataaccagaagggaaattatgagacgacaataactcagtccaactcgtgctga

SEQ ID NO: 183677 - DNA, 216 bp, Klebsiella oxytoca
atgaccactcagaataacaacaccagcctgctcaacgacaaaatggtcgatatggcattcatcacccgctttacgggtttaaccgacaaatggttctacaagctgattaaagacggtgaatttccgaagcctatcaaactgggccgcagttcccgctggatgcaaagcgaagtcgaagcctgggttcagcagcgtatcagtcagtcacggaagtaa

SEQ ID NO: 183678 - DNA, 642 bp, Klebsiella oxytoca
atgagccagaaggcctcaggtaaaaacgtctctaatcagtactacgcccgccgcataacagaaaccattgataaagccctggaatgctatccccggttgttggcgatcaggtttgaccttcgctttcctgacgaagaagaacgtctggactgccctacacgttactacgactaccctgacgttatatcccgcttcattgactcagtaaaatcccagatagccgaagacattaagcgcaagagaaaagccggtaaaggatcgttaacctgcaagatgagatatttctgggtaagggagattaatcaggaggagtcaaagcaccactatcacgtggttctgttgcttaacaaagacgcttatccgtggccgggtaaaagacataccgaaacgtcattcgaccgctacagtgtgtttcagaaggtcattaatgcctggatacgggccattaaacgtacagactctgataaagactttcatggactgattcaccttcctgtttctggtttttaccagttaaaccgcaataactctgacttcaaagccgattatgaagaactaaccgaaagagccatgtatctggctaaagagcgcagcaaagataaatcagacggttatcgtaactttggttgctctcagaactaa

SEQ ID NO: 183679 - DNA, 261 bp, Klebsiella oxytoca
atgctgggtggtttttttgcaggcctgttatatacacctaaaaagaaagaggtactgattaaggagattgaacagttgctctccagtcaggacttttgcaggaatggtatgctggagattcccggtaaatttgtgaaggtgcatattaatagcgaacagatcaaagtggatgggcgctctttctccgatggtttcaatatgctggagcagagaaggcaaatgcatagcgtgggggcagtaaaccctccttggctaaaatga

SEQ ID NO: 183680 - DNA, 222 bp, Klebsiella oxytoca
atgaaaattatcggtaaacgtcaggcaatggcgatataccgccagtatccacagtcccagttgttccgcttctgtaccggcaaatataaatggtccggcagcatctgccactatgccggtcgcgaggtggaagatatcagcggtgtactggccgtattcgcagagcgccgccaggaccgcaatggttcgtatgtcgtattacgcagcgtaagcctgaattaa

SEQ ID NO: 183681 - DNA, 333 bp, Klebsiella oxytoca
atggacagaggggaaatctggctcgtttcactggatccgattgcaggccacgagcaaagcggaaaacgtccggtgcttatcgtatcgaaggcatcgtttaacaagctgacccggttacccgttgttgttcccatcaccagcggcggaaattttgctcgcacggcaggtttcaccgtttcactggaaggggcagggacaaaaacaacgggcgttattcgctgcgaccagcccagaaccattgatatggctgcccggaacggcaagcggctggaaagcataccagacgctgtggtaaatgaagtgcttgccaggctggatgcaattttaagttaa

SEQ ID NO: 183682 - DNA, 1134 bp, Klebsiella oxytoca
ttgttcaaatctgaaagcgaaatgcaaatgtggttgagttcagagctaaataaaacagaaggattagctaacttaataattccattttcagacgaagagtactcttatgttgataaaaaaatttcagacagctataattattgtttgaagacattattaaatactaaaatagtttgtgagaatcaagatatatcacaattctcagatgagattctacgtccggattttctattatattcagttgactacgaggcatggataattattgaaatcaagaatataccaaacccaaccagacaagccggcaccgaactgggagcatataccaatgcattgaaaacttactttccaaatatgtccgatggggatgtgataaatgtagtcatatctaatgactggccaactttaatcaaaaattatatattcaatgagattttttggctaaacaggagtattctttgcttacaaccagtaaaacatgagtctggaattaaacttgagtgtataagacctgcgattttaacaaaagcttatagcgatagaaaacttagaccaaatgactttagtggctatcaattttgtatttatggaaaggatatctattctggaggcgaggtaagtgatattgaaaaaaacatagaacaaattaagtcatcatttcaaagaatggttaataaagcatcaaggctccactcacatggtttcgcatttttatggagagatttcagaaagtacagtcttgcagcatatagtattacaattgtagatattaacccgttcaaaaataacttgtattctacatgtaatgaaaaaggcatagcagcagaactacagcatataatatgggagtacgaatccacaggtaatacctattcattatgggaaatcataaatgacgcagacttctatttgcgtgaaatcagctcaacttggcctgaagcgccatcaaactggataacattgcgtgaatttatggttgaagatgctgaaattattgaatttaaatgctgggggcgaatatcagaattatatgagaatgagttagctaatgagtacaataaaggaagatttgatctaaaattcactgaccctggatttggattttattttattaataacaaattattcacgtaa

SEQ ID NO: 183683 - DNA, 819 bp, Klebsiella oxytoca
atgaactcttcaaaaaaaactttcactcagtctgtatcttatgtgaaatttaaaaaacaaacgcaagacacttttgatttttctgttctggtctgttctgcggttccagtattgaaaagaaatattatccttttcgaaaaaggagttataaatgaaatcaccaaagcagactattatcagcctaagggagatataagcagtgagaaacaaaagaatataaacactgatttaaagcgacgggctcaagggtacaaaaacaaactgtgtaaatatacactacttagtaatttcagtttttttgaatcatttatttatgaaataatatcagagctaatatctttccatggtgggatagatgaattaattaataagtccaagtgcagaacccttaaaaatataaattcagatgatagctcagtagaaaaaaaccgacgacgattaagaaaaatatatgatgtaaaagggcacgccattggtgtatgtaaaactgcaactaataatcttaaaagaggagattataggttccctagcgaaatgttctcagcattcgggttgagagtaatatcagaaaaaaactcaaatataaaatcatttgaaattcctgattttttaaccaatggattcgcattcgaattaaatgatgactcagttgaaacatttcacaatataagagagttaagaaataaaattgctcacggtgacactgtcaatttggacttgaccgacataacagaaaaatgtaaatttctttctagtttagcgaaggattttgatcaacatctgtcgaaacatttttttatttcggaaaaatttgtttaa

SEQ ID NO: 183684 - DNA, 378 bp, Klebsiella oxytoca
atgcgcaaagcccgattcatcgagcaccagatcatcaccgttctgaagtctgttgaagcaggacacaccgtcaaagatgtctgccgcgaagcggcgtattacaattggaaagaaaactacggcggtatggaagactctgatatcaatgagatgaaagatcttgaggacgaaaaccgccgactcaaacagatgtttgccgatctcagtctggaatgccgggcgctgaaagacatcattgaaaaaagctttaacaccagcgataaagcgggtgctcgtcggttatctgacctcacaatttacgatgagcactcgccaggtatgcaggatgttatcgctgaacaggacggtgtacttttaccagcccgacgcccgacgtga

SEQ ID NO: 183685 - DNA, 279 bp, Klebsiella oxytoca
atgttatcgctgaacaggacggtgtacttttaccagcccgacgcccgacgtgatgaaccggtgatccacgcgttgactgagctggcggagcgctacccacgatacgtttttaagaagctgttccagctactacgcaggcaaggcaacacctggaaccacaagtgcgtgcatcggattaactgtctgctgaaactgaattttcgtcgtaggggaaagcagcctctgccggtacgcaaccccgcgccactggcgacgccggaagcgctaaaccagagctga

SEQ ID NO: 183686 - DNA, 435 bp, Klebsiella oxytoca
gtggtggatgactttaaccgtgaagcactggcgatagaaattgacctgattatcccggcccaacgtgttgtgagagtgctggacaggatcgcagcaagccggggctatccgcttaagatgcggatggataatggccaggaactgatctcagtggcgctggcgcagtgggccgaagaacatggggtaatgctggaatttatcaagccgggtaagccgacacagaacgcgtttatcgagcgctttaaccggacgtaccggacagaagtcctggatttttatttgttcaggacactgaatgaagcacgggaaatcacggagcgctggctggccgaatataacagcgagcgacctcatgaatctctgaataatctgacgccgcaagaataccggctgatggctgaaaccccggaagtctcaaaaagtgcgtggaactaa

SEQ ID NO: 183687 - DNA, 918 bp, Klebsiella oxytoca
gtggaaaaaatcagccctgcaacagttcagtttatcaagcttggtgaggccggtgaatgggagcagcagtgtctgtcggagggcacgcttcggtttggttatcatgaaactccgaacagtctttgtgttgaggggcaatgggccgacgtgcacgagatatggcttaacatccgcaaggggaaaaaaggcaatgcgagcagtgacgttaggcagatcaagaccttttacatggcggacgcagagacgctattcattaccttcaggggtgggtttctgtactggtgtcgacccgcgggtccggttaaggtgctggcggatggtagtcgagtccgaaaaacaatggaggggtggcagaacaccagcattgggggagcactgttaaccacagatcacctgagcggtgacctgttaaaggttcagggataccggggaacgatatgtaacgtaagcgcacatgattacgttgttcgtaaaataaatgatgaagatctccctgcggtatctgatgcgaagcagtctgaagagacttatctgaaggctataaaaaagctttgtcagctgctgacctggcaggatttcgaactattggtagaccttgttttttcaacaagcgggtggcgacgcaccagtattgtcggtaaaacacaaaaaacgctggaccttgagcttgaatctcccaccaccggagagaaagcgtttgtacagattaaatcacatgcggacgcatatgctttcagcgagtacgaaaagcggttcagagaaaccagtgcctatgaacgaatgttttttatctggcacagcgggtcgttatcggaaaatatcaaagtcgatggcatcacgttaatcggcccaaataagttagcagggcttattctggacagtggtttatcaaggtggcttcgaaaaaaagtttcgtaa

SEQ ID NO: 183688 - DNA, 2292 bp, Klebsiella oxytoca
atgcttgaaagaattcatcaaattactagcgtaggtttattccaggatatccgtcctgctggtatgtcctttaaaaaaatgacctttgtctatgctgataatgggcgtggtaaatccacccttgcgtctattctgcgttcctacactgaattaaatccagatattgtacggcacaggaaaacgattggggaaacaacccctcaaaatattcatctgcagttttctcagggaaatcgtgcgatattcgataacggcacatggagtggtaagtattcagatgtgcacgtcttcgacctagattttgttgatcgtaatgtttactcaggtggtgaaatcagcgctagccatagaaagcgactgctgagttttgcgctgggcagtgatgcggtagcagcgagggctgcttttattgatgcatcagacaaggcagaggaggccaagagagttacgagactggcaagtgaaaagctgacggtggcccggggaaatgtaacgctagcaagatacataaagcctgttcaggaagagaacattcaggaaaaaattgcattagtcgaatcagaactggatctctgcaaaagaacagagacgatccgcaaccgtacgggctatcttccgttacctctttacgctcctgatttcagttcttttttttccatacttgcatcgagttatgacagcctaagtgcgggtgcagaagaggtcgtctgtgcgcatattgaccatatcaatgtcgaaggttttgagcgatgggcgagtagcggccttgattatataaaagacgaatattgtcctttctgtacgcaaagcttggagggtgttggactgatccggtactaccgggagcggtttaatcttgcatacaaagccttacttaatcaggttacaggcctagataacgttgtggcgacaaccatgcgcgttttcaatctggccttacttgagagcaagattgagcaggcggggttagtgactgaaaactggaaagattgtctccagttgaacgtgagtctccctgatttagataaaattaaagctagtttggaaggtcttcagtcatctctgagtcgcttaacagaagccaagaaaagcgatccgctttcaaagacccaaggcgactatgaaaaagaaatcgctgatgcagtaactgcaatcaatgatgagctttctgcctttaattcgggcgtggaaactgccaatctggatattcaggcttataaagaggcgcttgaaaccaaaaatgaagaaaccctgcgggttacattatcccagcatgaagcaacccgacttcgtctatcacctgaggtagtaggttttatctctgattatcagaccgctaaaacagctgaagtgacggcctctgaactaaaggaaacacggaggggtgaactgaatgcgatcatggactcgacccttggaaagtatcagtcctcaattaatgatttattgatgaagtttggtgcaagctttcgcatcacagaaattaattataactatgccggcggtggtgagcctaaatctgaatatgcaattgaacttagaggggaaaagatttcgctaacgggggaggaatacagttttcggagctcactcagtgaaggggacaaaaggacgctagccttcgcattcttcatctcagtcttgcttcatgacgttgatcttgaaagaaaaattgtcgtgattgatgatccgatgtgtagtctggacaatcatcgcaggaaccacacaatcaccatcattaaacagatataccttcgcagcttgcaggtaatcatcttggcgcacgacctgctctttatccgtaccatgcgagatgagttcctaaaaatacctgctactcaaatgcaggacatttcagccttacgcattgtccacattgctggtgatttcagtagtttggacaaactagatgtcgatctggaatgtgaatctccctactataaaaatcatcggctggtgagcggatttgccgatggtgctcatcatcagcttcacgacacggcggtggcaatcagaccgcttcttgaggggtatctgcatcgacgttttccggggcgaatttcaccgggaaatctgtttggagaggtagtaatgcagattgcacaagcacaaccgaacgatccgttattcttcgctaaatcactggtacctgagttgaatgaaattaacaattatgctggtcgctatcatcatgacacgaaccctcaggcatcatcagaacccatcacggcaggtgaactgatgtcttactctcgacgggctttgaatgtgatttatcgcggaaacgtatga

SEQ ID NO: 183689 - DNA, 3501 bp, Klebsiella oxytoca
ttggagacgactgaagaattaagcaccttcctgacggccgctacagttgacggtattctcgggcgcctcctctatcgcggtgcagcttggtcgttgatgcgtaaggatggcgtattgccgcaaaacgctccgccgcttggcgcaaccatcgaaacagatcttgccgagcacggttttgccctgcttcgaggcgcaatggcactgcgggctcaggctggtgcttcgaaactcactggcaaggcctttgagcgcgcagccaacgccttcgaagctctggtgcgtaatggtaatccagagtcccctgatcgcggattccgccgcaccattgctgctgcagcctaccatctagccggtttctcggccgtcgccttttcaatcttcaacgagacagaggaagaccttaacgtctcacccggtgaaatagcgatccgacaccttatactgcgcgatctcgatcaacttcgcggcttcgtccgcaactggttggatgacggggctcacggcgatgagcagatcgcggcgacgctgcagggcgaagacactgacgtcgacgaagtgctgtcgacaattctcaatacgacgatctgccgtgccctggcattttttgacttcgcgcttgaaacgggtgaagtcgagccgttcgaagccgcacgagggctccttactaccgctgtcgggcttgctgacaatgctgagaacgtccctctgtggtggatttcgaacctctgccgtcacctgatcgacgacctgtggcaacattcactacaccagaatttgccgactgagccacccaagggtgcggaggaaaaatatcccgacctacggcggttgtttatatcttcactttacgcccgcaagacctcagaggtggagctatggccatcgcagcgcgaagccgcccagcgctccacagacgtcacagacgatctggtcgtcgccctgccgaccagcgcgggcaaaacacgagtagcagagattgccgtgttaatgaccctatcctccgcacgccgggtgctaatcgtcacaccgctgcgcgctctttcggcccagaccgaacgatctttcaggaagaccttcgcgccactagggtttagtgtctcttctctttacggcgccagcggcctttccgccggtgatgaagacgccctccgcacacgggagatcatcattgcgacgcccgaaaaactcgacttcgctctgagaagcgaccagacgctgattgacgatgtcggcctgatcgtcctcgacgaaggccacatgatcggtcctagtgagcgcgaaatccgctatgagacgctcgtgcagcgcctacttcggcgcacggatgcggcagagcgccgaatagtttgcctttccgcgatcctgccaagcggcgacgaactcgacgaccttaccgcatggattcgttccgacgaacccggggagcctgtgcgttccgactggcgcccaacgcgccagagattcggcgcacttacctggcgaggtaaggacgcgttgctacggctcgatctagacgacgatggccccttccttgacaaattcgtcgcggaaaaaccagcgcgagggaaggagaagaagccctatccacgcaagaactcgcacctcgctctgttcgcggcatgggagttcgcgagccagggcaagcgcaccttgatcttctctacccaagcgaactgggtcgagagctacggcaaacaagtcgtggacctctgcaagcgaggctatctgaactcgttgctggaagacgaggctccgatcgcccgcgccctggaagtcggtaaggaatggttgggcgaggatcacccagccgtggccagccttaaggtgggggttgccattcatcacggccgactgccgagcccgttcctacgcgaactggaactgctcctaaccgaaggaacgctaaaggtcattatcgcttcgccgacgctctcccagggcctcaatctcaacgctgccgtgctgctcgtgcccgcgctatatcgcgcctcagagaagatcaaaggtgaggagttcgcgaacgtggccggccgcgccggacgtgcattcgtcgatgtcgaggggctgatcgtccatgtcatgttcgacaaaatcaaatggcgaaaaaaagaatggagggaactggtcgcctctgccaaggccaggacgcttaaaagcggccttatccagatcgttgccgaaatccttaaacgtctatcgcgcgagggagtcctggatcgagatgatgcctgggaatatctcgccaacgcccgcgaggcttggaggtcacctgacgaagaagcaggggtggcagaacgacttgccgccgctgtggtatacgacgccgccaccgacgatgaagacgagacggacgacgaggaggaaaccatcgacgaggagcccctgtctcagctcgtcgaacgcctcgacgccaccgtattcggtctgatcgaatccctagacgttgatcgcgccgatctacctaaccttctagacgaggcgctcaaggggtcactctgggctcgccaaattgctcgggaggacgaggatgtcgcttccctgcaccggaaggtattcgaagcacgcgctggtctcatctggaaagccaccaccaccccaacgcgacgcgggcatttcgcgatgggagtcgggcttgaagctggcctcctcatcgacgctatggcggacgagttggccgaactcatcgacagggcagacagtgcagcattgagcggcgacatcaacgaactcgccgatgctctcggcggactcggcgaacgcctgctgttcatgcggcctttcatccctgacaaggcaaacgcgctgccgccgaactggaaagctatcctacgtagttgggtgtccggggaagaagtctccaagatcggaccgcagaacatgcgggcggtcgaagatgccttcacctatcggctagtctgggcgctagaagccgtccgcacccggcgcatgtccttcggctggtcgccggatacggtggcgggcggtgctgcggctgcggtagaaaccggtgtcccccaattaatgatggcgatgctgatccgcgcaggcctgccgtcacggcgtgcggcaatggcggccatcgaagatgctgagccagtcttcgtcacgcccgcagaaatgcgggcttggcttgaatccgacgagattacggccaaaaccgacgcaggcaactggccaacacccgacacctccgcgttatgggcccgcttccgaaccgaagctctcagcggaggcatccagaaatggtccgtcgaacgctacaagcgcctactcgataccgagccctccccgcccgctggcctctatcgaatcgtcaccgacgaaggggacgcgcggacttggctggcaacccccgactatcagcggatcgccgtcttcaagaagccagcggttgatcccaagcccagcctattctcggggcggttgccgggcaaaacccggctagtggatgctctacgcgtcggccgcggaaagttgcgttggccggctgccgacgcctaa

SEQ ID NO: 183690 - DNA, 777 bp, Klebsiella oxytoca
gtgggcctatatgagaagtggtgtgagtccattaaagaaaatgacgaacgcaagtattactggacgtatgtcgagaaggacggcggccgcgatgatatccgcgaggaccttgctgagaccattcgctcgcactacgaccgacttgaacgcatcgccgatgacgtagggcgactaggatacaaggttgcagccaagatcctcagcgaggcaatgcctaatacccccaagggccgctctggcgacctcggcgaaattcttgcgacggaactagtggaggaagaaatcggtctgcgggtacccgtgcgccggctccgatacaaggacggccgtaacatggccatgcgcggcgatgacttcatcggcgcgggctaccaaggcaataagctctggctactgaaaggtgaagctaaaagtaaccagaagcttggcaaaaccacggtcatcgccgcccgcaaggtcctagaccgcgacaatggccgctgcacgcctgactcgctgctgttcgtcgccaatcgcctgttggagagcaacgacgctggcgataacgcactaggtcgcgaccttcgcgacgaagtgggtcttaagtccatgcaagccgatcgcatcgaccacatgctcttcaccgtgtcgggtaacggccctcatgcttccctgaaagagaaccttgaagccgctggagtcaatagggaccactacgtcgtgaacattcacatcaaagatcatcaggatttcattgcggcaatgtacctagaggcggaagctcttggagacgactga

SEQ ID NO: 183691 - DNA, 162 bp, Klebsiella oxytoca
atggacggaccccacggccgtagacaaattctgtcctcacgacgaggcctgttcgaaggtctccggactgacaccgccgagatgattgtggcgctgggcccggttgtagaacacttcaatgtgatcgaagatatccgccgggccagataccaggtttcatag

SEQ ID NO: 183692 - DNA, 2034 bp, Klebsiella oxytoca
atgaacacattaatccatgaaatgggcgtcattgacaaaataggaaataagcatcccgtttatttcaaagaaggagttaatattgtaacaggtaaatcatctaccggtaaaagtgcattaatagagatatttgattattgctttggtagtgatgaatatactgttcctaagggagtgattactgatagtgcagccgtttactatattttcataaaaatagacgaacaaaatatagtaatggcgaggcgtcctgatattaataacaaagctttttttagaagggaagagcattattctacggaaataatcaatgctgattactttgttacgaatctttatatcgacatagaaagatataaaaaattcattactggtttctttctggacatagacgatgtcgatgtttcattaacggctaagtctaatcggaagtttaatcggaaggcacctactccatctattaggagttttacctcctttatgctgcaacatcaaaaccttgtggctaacaaacatgcattattctatcgttttgatgaaaaagaaaaaagggatcaagttatagaacatacaaaaatttttctcggtttagtcgaccaagaattttttattcaatcgcaagaaaaggaaagactaaccttagagttaaataaactacttcgagaaaaagaaaataattcacgtgtctctacaaagcaaaaacagcgcctttcccccgtgcttaatcaattgtatgctttaatgggttttgaaagcgaaccaatctcactgaatgtaattctgctcaatccacgtgatgcaaaagaaaaattagacaaaataatagttcctgagaaaataaattataactccaatgcaaccactgagttttataataacttaaaaaaacagcttaacttaaaagtttcagaattaagaaaactccaaaggcaagcatcttccatcgctaaaaatatagaagaagaaaaacgtttatttgttaatggtagcaaattaggatggaaagataaaatacaggtggcttcttctgtctgtccattctgccatacccaaaacaatgagttattacatagtgcaaaaaaattacaggatgcaattactaaagtagttcataatctttctcatattaaacctataaaggcaaaatttgaatcatcgttagtagaagtaaaacgaaaaatcgaagaattaaaaaatgagataacaccgctaaatgaacaaatcttagttatagaaacatcagagaaacaaatatctgcgcaaaaaagtctatatgagaacatcctcataataaaggcaagattatttatgttattggagggaataagtttaggagatgatattgaactagacaggaacattaaaactgttaaaaatgatatttataaaatagatgaaaaattaaaaggttatgatataaaaaaaggaattgaaaatgcaaatactaaagtaaataactacatgaacacaataggcaaaaactttgagtttgaagaaagttacaagccaattaacttgcacttttcctttgagactttcgacctctatcatttaactgagaaaaatgaaaaaatttatttaagatctatgggaagtggtgccaattggttatatagtcacattagtttatttttagctttacatcgtttttttgctgagctgggaaatctatgttcgataccatcaatattattcttagaccaaccaactcaagtctatttcccaaattttagacgagacgaatcggtaacatttaatgaaacaaaagcagcagaaaggatcgaccgaggaaaaaacgaacgagacctagatgacgatattaaggctgtggaaaatttattcagccagttatcttcttattgtaatgaaattaagatcgctaatggattctcacctcaaataattgttacggaccatgcagatgatctaatcctctccaatggaactgaatttgaatcattagtcaatggaaatcgatggcgcactagaggtttaatagacccagtaccaaacctagatgtgtctacagagtaa

SEQ ID NO: 183693 - DNA, 462 bp, Klebsiella oxytoca
atgagtagcattatcgattcattatatctattgaagtacaacccttttagatttagcgagcatttagtttcattttattcctcaataaatcaagtagaacataatttaatactcgcgccaattgtcattccgctatgtactcattcaatatttgaaagtaggcttcaaggcgctatttttggggaaaacaaaaaaagcactatgtggtcaatatttaatgataaagccaagttttatgacctacaagaacgaattgaagaattcaaatatatcacagcgcaaagcatacagtattgtctaattaacgactggctaataatagacaccgagagccttacattacatagtgaaaaaaaccaaaacaaatcaataacatcacaaaaaagcgccataaatttggcaaaattatttagcaaccattcagtgatggaaatattcgacttcttgggagtacaaccataa

SEQ ID NO: 183694 - DNA, 1128 bp, Klebsiella oxytoca
atgaatggtagccaaaccaaaaacgcagcgcttacaaccgctttagcatttcattatcaggtattgataggacttgataagtgtttttcactacaagacgagcaatccatttggtttgaaaaagatggcgatatcagtcttgttagcaataagattgatgaatcaacacagacagaggcgaagaactatgcggcacctctgacagatcatcatgaaaatttgtggaatacattgaagaactggctcgatgccaacttcaagcatgaaaattatggttttttgatcctacatactactcaagcttttgggtcgacaactcggctagcaaaatggaattattgttctccagaagatcgacttcaaattcttaaagatatattttcagaacgttctaaagaagagttagaatcagaaaagcccaaaaacattgtcaaattgcagaaagcagtgatggaatctccatctaaaaaattgatggaaataattaagaagatgtcgattttcactgaaaccgacgacctcaaagctttgaagaataaaattctaaagcgcccaattggcataccaaaatataatttagaatgctatttagagggtcttgttggatttgtttatgaacaggccaataactcctcatgggaaatcagcagtaaattattcaatgcaaaatgtgaagaacttacttcactacttcataaaaaagagtttactttcccaccattcaacggttatgaaccaaccgatcttgagatagaaaaatatcaggacaagctttttgttaagaaaatcatagatatcgaacatcatgctatgatccctgatgctataggtaactgggttgaattacaaaactctttgattgaagaacttgatgaatatccattatatgcaaaaaaaaccaaggcatatcaaaaacagattgtaaaacgttttattattaattattcttcggcacagctaaatttaaaagaccaattgaaagattcaaagatattatataataatacagttaatgaaactccatttaacatgggaaatgaaatcccaccaattgaatataaaaacggactaatccatgatgcaatggacgatgatgataaaaatatcaaatggaagattgagctatga

SEQ ID NO: 183695 - DNA, 948 bp, Klebsiella oxytoca
atgacgatttccctgcataccacccggacaagcgcccctaacgccgcagcggcgaccagcgtatccccgctggacccgtcaggctcctcaaaaacgaatttttctaaaaccagaacggacatttatcagaccgttaccgacaacatcattgcagcacttgaaagcggtgtaaaaccgtggtcctgtccgtggcaacgcgtatcgggcatgtctggtctgccatctaattacgcaaccggagcagcctacagcggtattaatatcatgctgttatggtgcagcgcatctaaacaaggtttcagcgattcacgctggatgacttacaagcaggcacaggcggcaggtggacaggttcgcacgcgtgaacgtggcaccacagccattttctacaccacgctggagagggaaaacgacgccggagaaatcgaccatatcccgatgctgaaaactttcaccgtgtttaacgttcagcaaatcggcggcttgcctctgacaaaggtaactgtcagcccggaagcgagatttgccccgttgccgcaggctgaaaatctgttcaggaagagcggcgcaaacatcattgagaaaggacaaaacgcctttttcagcccatcaactgatgaagtctggttaccggagcgccatctattcgctgatgcggctaacttctacgctaccggcctgcatgagcttgtccactggagtgggggtaaaaaacgcctgaaccgtgaaatgaaagggaagtttggcagtgcggattatgcagaggaagaactggtggcggagctgggaagtgcctttctgatggcggacctagggattgagggagaggtacaacatgaaagctacattgcttcctggctgaaagcactgaaaaacgacaggcgctatattttcaaagcggccagcgccgcctccaaagcgcatcgttatctgatggataaactctga

SEQ ID NO: 183696 - DNA, 747 bp, Klebsiella oxytoca
atgctgatttcgacatatcaagagcgccaaacacgcaacagagaaaaaataaaacaactgctgaacttcctgaaagaagaaacctacagcgatttcaaaacgctgatgctgctatttggtttccgggatcataaatcgctttattcgctgctggcaaaaactgagcaaatggggttaatccagaagcatgtgctggaatcacggacaatgaagatttcattatgggggatcaccagcgacgggctggcggtggtgttaaccccggatgataaaatctttcctgcgcggtttgaaccatcaaaaatcaccggctggacgctggagcaccatcttgataatcaggccgccagacttattctggagaagaaaggcgcttcgggatggattaacggcgaccgggccagctttctcagccagtttcaggtaaaacatcgccctgacggattactgacgctgcccgacggtaacattattgccattgaaaccgagcgccgcctgaaaacccgagcccgctaccagtcgattatcgccagccacctgctggcccgtacccaaaaacagtggatttacgtattttatgtagtacccgattcgcagaaaaaacgtgcgcttgaactgctgtttgacagcatcaggcatgtcatcatcaaccatcagcacgtcccgctggaagaacgccatcgtcgggtgtttcgcatttatacctttgatgaactaaagcgtctgtcattagacagctctacgtaa

SEQ ID NO: 183697 - DNA, 1860 bp, Klebsiella oxytoca
atgattttaaataagcttgccgcttcactgtccccgatagtgaacgggatgctggcggtgctggcttttatgcaacagcaacaactgatgctggcattattagcggggttgacgatgccgttttttgcatcgatgaaaagcgatgaacggcagaaagccccgttatggaaaaagctgattattgctttttccctggtgtgttttctctctgggacactggccccgatagttatcggatccttccagtggctgtataagaccagactcaccagtgataatacggtactggcgtggtcagtacggattgctttcactgtgaccgggattatttttcatattatacttcgccgcgtattcacgccggaactggacaaaataaagaaacatcttgttaaaaaaaccacccttgaacgcgaattgcgcaccgatgtccgcaccgtaaagtccctgctgccggaaacactgcattatgatccgctggattatattgacctgaataaaggcatttttattggcatggacagggagaacgaaccaatgtatctcccgttaaaagactggcagaaacaacacgcggatattattggcaccactggagcagggaaaggggttgccaccggcatattgctttatcaaagtattctggccggtgaaggtgtgtttgttatggaccccaaggatgatgaatgggctccacacctttatcggaaagcctgcgaggatgcaggaaaaccctttgccttaattgacctgcgaaaacagcaataccagctaaacctgattgaagatattacgccagatgaactggaagaattgttcgctgcaggtttcagcctggcggaaaaaggacaggaagctgacttttatcggatcgacgaccggaaagccgcccgaatagccgcacaatttgtcatccataatacagcctcaaccattcgggaagtttataacggagactatgttcaaagtattgcagataagataaaagcctttttcggcaagattgaggaactggccttgctcaatgccatcaatgcccctaccggattttcgcttaataagatatttgatgaaggcggttgctgttacgtcatcggttcaatgcgaaacagcaaaataattaccgcacagcgcatgctgctggttcgcctgtaccagttagcagaaaggcgcgaccgtgtaacagacataccccgccccattgctatttatctttcagaactgaaataccatttatccaggccagcactggagggattaggtgcggcgcgggataaaggtgtgcatattattatggaccaccagtccattgccgatttaaaagactgcccggcagatttgaaaggtgacgccgttgtcggagcggtcgttgagaacgctaaattcaaactggtttaccgggttatggacccggatacggcggaatgggttgcaagaatgtcaggcactattctggtggatgatgaactccgtaaggctaaaacggataatatgctgacggagaccatcgacagtgagcgcacaatccgccaggccgaacgtttctttattgacagtaatatgatcctgaacctgcccgattttgtcagctttatctttacgacaaaaacgctaccttctgcctcactgatttcaccgataaagatcagaaagcgtcagctaaaaatcttctcggtttcccctgatattgccgcatcggcggcaccggtgaaaatcgcactggattttgacgaggatgataaaccatccatacaggatgtaatgacaacgcacccggatcttttcttcaacgaaagcgaagtcaaaccggcagagccccaacctgatgagggagaacacctgtccccgctggatttttaa

SEQ ID NO: 183698 - DNA, 330 bp, Klebsiella oxytoca
gtgattgtcgcactgagcatattggttcgttatttcttcgcgtcaggtagtgcttatattgtcgcgatggtaccggtctttgccatgctggcgaatgtttctggcgcaccgataatgctcaccgcgctcgcgctattattcagcaactcttatggtggcatggtaacccactacggcggtgcggcagggccagttatttttggcgttggctataatgatatcaaatcatggtggattattggtgggatattagcattgctgacttttattctgcaaatcaccctcggggtatggtggtgggagatgttaatcgcctggggagtaatttaa

SEQ ID NO: 183699 - DNA, 2289 bp, Klebsiella oxytoca
atgattaaattgtatgaccacggagtctatatatcacatcagcacggtattattgccgctgataaggggtcagtcgcgttagagaagcatgaggcacgcaagggaacgatctcgtggtcgatcctctccgcccataatacttcagggaatgaacagcagttaaaaattaaatttgattcaatggcctcccacgatattacttttgtgggcatcatccagactgctaaggcctcgggaatggaacgttttccattaccctatgttctgacgaattgccataattcgctttgcgctgtcggcggcactatcaacagcgacgatcatatatttggtttgtcctcagcacaaaaatatggcggcatttatgtcccgccccatatctcagttattcatcaatatatgcgcgagatgatggccggcggtgggaaaatgatcctgggctcagacagccatacgcgctatggcgctttagggaccatggcggttggcgaggggggcggcgagttggttaagcaactgctcggagagacctgggatattgattatcctgagattgtcgccgtgtatttgacaggaaaaccctcgcccggcgttggccctcaggatattgccctggcgataattggcgcggtgttcgagcgcggttatgtgaaaaataaagttatggagtttgtggggcctggggtggcgacaatgtctaccgacttcaggaatagcgtagatgtgatgaccacggagaccacctgtttatcgtccatctggcaaacggatgaagagacaaaaaactacctgcgtattcacggcagggaacaggactattgtccgctctcagcaaaagagatggcctactatgatggctgcatagaagtgaatttaagcaccatcaagccgatgatcgccttgccttttcaccctgccaacgtatatgaaattgatacgcttaatgagaatttgcaggatattttgcacgaggttgagattgcggcggataacatttcccagggacgcgccaggctctccctgctggataaagtcgaacatgggaagctgcggattcagcaggggatcatcgccggctgcgctggcggaaattatgttaacgtggtcgaagcggctcatgccttgaaaaatcacgcctgcggtgacaacgttttctctctctcgatatatccctcatcccagccggtgctgatggatctgaccaaaaaagggataacgaccgatttattaagcgctggcgcgattatgcgtaccgcattttgcggcccctgcttcggcgcaggcgacacgcccatgcataatggactgagcattcgccacacgacgcgtaattttcccaaccgggaagggtccaaacccgggaatgggcaaatgtcggccgttgcgctgatggatgcccgctccatagcggcgacggctgccaatgggggcgtgctgacatcggcttccgcgcttgattgctgggaagacattccgcagtctgaatttgatgcttcaccttatcggagtcgtgtttatcaagggtttattaaaggagcgacccggcaatcgctgatctacggccccaatataaaagactggccggagatgagtgagctgacggacaatattttgttaaacgtgacctcaaaaatcatggatccggtgaccaccaccgatgaactgattccatcaggcgaaacctcatcatttcgctccaatccgttagggctggctgagtttaccctttcgcgacgcgatccgggctatgtcggccgtagtaagaagattgcggcgctggaaaaattacggatcgagggggacgatccttgtcgcctggatccgcagcttgaggcggttttttcccggatccgccaactgccggggcaggaaaatgtcacgcttgagcagacggagattggcagcatggtttatgcggtcaaacccggcgatggttccgcacgagagcaagccgccagctgccagagagtccttggtggcctggcaaatattgcccagcagtatgccacgaagcgctatcgttcgaacgtgattaactggggaatgctgccattgcagatgaaggcgctaccggagtttgaggtcggcgacttcatctatatcccggggatcaggtcagccctggaaaccgatcttcgtcagattaccgcgttcgtgatcggccacgatcgccccattaaagagatctctctttacatggaggggctcacctcagcagagcgggagataattaaggcgggaagcctgattaattataataaattacgcttaacaacccaccatcagtaa

SEQ ID NO: 183700 - DNA, 2700 bp, Klebsiella oxytoca
atgagcaataatcctccgttaagattcagccacagccatcatctgctttcggtgaaaggctgtgacgccgagcccgatgtactggcgtttgaaggcgatgaagccctgagcaaacccttccgctaccgtattgagttcaccagcgctgaccataccatcagcaaagagatgatgctgatgaaagcggcttccctgacgctgcaggccccggttgaccagggctacggcatcaaaatccagcagccggtgcgggtgattcagggagtggtgacgggttttgaacgccttggcacctcaaaggatgaaacccgctacgccctgacgcttgagccgcgcctggcgctgcttgaccgttcgcaccagaacgccatttaccaggatatgtccgtcccgcagattgtggagaaaatcctgcgcgagcgccacggcatgcgcggccaggattttctgttttcgctcaccagagagtatccgcgccgtgaacaggtgatgcagtacggtgagaacgacctgcactttatcacccgcctgctgggcgaagtgggtatctggttccgcttcaccaccgacacgcgcctgaacatcgacgtggtggagttttacgacagccagcaggggtatgagaaaggcctgacgctgccgtcggtgccgccgtccgggcagcattcgcagggtgtggactcggtgtgggagatggagaaccatcatcacgtggtgcagaagcaggtcagcacccgcgattacaactaccgccaggccacggaagacatgaacaccctcgttgatgcgaccaggggagataccaccacttacggagaggcctatcactgggcggataactacctgacggcgggaaactcccatgaccgtaatccggcaccggagtccggggcgttctatgcccgcattcgtcacgaacgctacctgaatggccagacgcagacccgggccgtcaccagctgcccgaccctctctccggggatgctgctgaaagtcaccggcgggtacgaagtggctgaggtatttgcgcagggcgtggtcatcacggcgatgcacagccatgcccggcgtgatgaagactttggcgtccggtttgacggtatcccggacagcccggattttagtttccgccctgagccaggcagtcgtccggtgatggccggcaccttaccggcccgcgtcaccagtaccaccgaaaatgacacctacgggcatatcgataaggacggccgctaccgcgtcaacatgctgtttgaccgggacagctgggagaccgggttcgagagcctgtgggttcgtcagtcccggccgtatgccggggacacttatggtctgcatctgccgctgctcgcgggcaccgaggtggcgattggttttgaggacggtaacccggaccggccgtacatcgccggggtgctgcatgactcggcgcacggcgaccacgtcaccatccgtaactacaaacgtaacgtcctgcgcacgccggcaaacaacaaaatccgcctcgacgatgagcgcgggaaagagcatatcaaggtcagcacggagtacggcggcaaaagccagctgaatctcgggcatttagtggatgccgataagcagaagcgcggtgaaggctttgagctcaggacggacagctggggggctatccgggcgcagaaagggatttttatcagtgctgacgggcaggcgaaggcgcagggccaggttcttgatatggagccggcggtcagcaacctcggcgatgcccgggagcagatgacatccatctcggatgatgcgcagaaggcaaccgcgaacccggccgacctgcaggcgcagattaaactgctggaacagcagctgagggacctcaaaaaatcagtgctgttgatgagcgcaccggacggaatggcgctgaccagcggacaacacctgcaggtgtctgccgggcagaacctgattgccacggccggaaaaaatgctgacgtcagcgtggtgaaaaatctgttcatcggggtgggcaatgccctgagcgtgtttgtacgcaaactcgggatgaagctaattgccaaccagggaccagtaatggtacaggctcagaacgacatgatggagttactggcacgaaaagaaatcagcattgtcagcacggaagatgaaatcaaaatcatcgcgaagaagaagctgactctgaatggtggtgggagctatatccgaattgatgcaagtgcgattgaatctgctactgcaggtgaatatcgtacgaaagcagggcactatgagcgtaaagcaagcgcatcagaaaaggtcacgctgcctgtatttcctgtaatggaacctggcgaacaaagtttacgctttgctttccctggtgccgatagtgtcagccaaagtatggactggatgacaaatcagccgtacaacattactgacagtaatgggaagatcctggcgactggcacggtagacagttcaggccgcttcccgaaaatagttcttcctgaaagcgatacattaaacttaatcattgggcgagaaacctgggttaaagaagatcttccgacatcagtagcagaggctgaggcagacagtgcggaagatatagaatcactggagcctgatattgattcggatgataccgagtcagctgaaggtcatacttctgcattaacggaatcaatgattgcaaaactattaaatttaactacgacagggtga

SEQ ID NO: 183701 - DNA, 417 bp, Klebsiella oxytoca
atgttaaagaaaatttggaagtccacttttttctttataatcgtgctttctagttttagggcatttgctacttgcctaaaggaaggggataaagtaagttttacaggagttgttagcgaaaaattatactatggccctccaggctggggagaggataaagcgaatgatgagaagttacatgaatggatattgcatttaaagcagccactcacatgtgtaaaagacgcagatactgacaaccaaagctggaatcatgacattcaattgataatgcgtgatagtaatgactataaagtaaataaaaatcttcttgggaaaactgtcagtattgatggcataatatttcttgccgagaccggatatcacatgacgccagttttattagatgatgccaagtttcaagttgcagacaaatag

SEQ ID NO: 183702 - DNA, 1842 bp, Klebsiella oxytoca
atgcgctttataaatgctatttatcatgcatcgacgaaaacggtagaatatgagtcatcgagtggcacaagattgttaaaaactggtgggtcactgaattggcgattcaataacccagggaatctcatttctgtaaaaaatcagcaaggaaaaatcggtgttggagttgtttacaatccagacaaacattcattcgcaatattttccagcataaaagctggtgataatgctaaacgatctctgctcaaaaggaaatataaggattatactattccagaaatgatgaaaaaatatgcgccggggaatgatggtaataaccctgaagcttatgccgattttatcatgtctgaaagtggggtcactcagggggagaaagtaggagatcttgacgatacaaaattcagtaaggtaatcaaggcaattagcaaaaaggaaggtggcttgaagccgggtaccgaaaaatgggtgtatgtgacaaatgtgactgtttctgatggctcccgaccagttgctgatgtgccatttaaagtgacactaggaagcactagctacgagtggaaaacagatgcttacggcaaactcaagacaatcatccatacgaaacaaggaatggctattgttgttaaatatactaattccgcaggaagagaggatgttgtttattctgctgttgctggagatgaaacgaaaaatatactacttacgagaaatttctcgcaattttctgcaaagacacttgcccagactccaaaagccccacgtgagaagagcactcaaaaaccgattgagtacacagtcatgtcaggtgacactctctcaaaaattgccgagcgttataagacaagcattggtgaaatagccaaaaacaataatataaaagatgtgagtaagatctttccaggtgagcatttgacgatatatggtgtcaatactaatggcccttcaatctatatcgtttcacctggtgacactttggcgaaaatcgcagaaaaaaatggtgcaaatgttgaggatattgcgcgacagaataatatatcagatcctaataaaatatatccaggtcaatcaatttctatatgcaaaaatggtagtaatactgcgagagagaccgacaaatcagcagttaatcctcccatctcaaaaacagtgagtaaaaatccactgcaaaataaagaagtaaataccaataaaaaaacgctggaatcggttggggggaaaaattctggcaatccgattgcgttactccctcatgatcagagagaggctccatggatggcggttgcatttgaagagggtaagaatagatggaaatggggacgggtgagggaaggcgatggcggaataaactatcataagaaaactggcattaatatgtcatctatggtgggtaactctaatccgtggtgtgcttcttttgtaaattattgcctcaaagagtctgggtatgcaatatctggtagtgcaagttctcagtccttctcgaaaaataagaattttgtaaaaatacctcaacctatatatggtgcaatagttgttttccgtaaaagaggggcgtggactggtcacgttgcctttgtgtattgcaagtttaaaaatggggaatatggtgttttaggcggtaatcaagcgaatagtgtgacagtaaatccactgaagaaagtttatcttgaacaattaaattatgagcttatagggtattatgtcccggcttcatatcatcctaatgcggttaggatagttaaaaatggcggcgacttatcatcagactttgaaagtattgataagttaagaaaaagtcttgggtctgacatgctaacacttgatgatactaaaactcggtga

SEQ ID NO: 183703 - DNA, 522 bp, Klebsiella oxytoca
atgaaattgttatttagtgttttattattgttctgttctagtgcttttgcaaatgaatgtataacaaaaacagatgttgattttctgaaaaaagtatttatttcaaacgataaaaatgggctgattgcgcttgcttctaatggagtaaaacataatataattaatgatgaggttttcaagaacaaaagcattacattaaaaagcctctctgagattacttatgcatgggggcggaaaagaaacgatggtagtccttttcacttaagtcttaaatttcctggacaaaaattatgtgtttggcgggtaacatttactcttcctaaaaagatacgagaacagtgtgatgatgacggagcctatgggtatttcataaacttcattaaaattggtaactctcttaagttaagcgatttcacatctttatttgtcgtgctggatgatggcactttagcttgctcaagtgcaaatgagtttatgatgcaaaaaattgtgagtattgagaaggacatcttgttggaatga

SEQ ID NO: 183704 - DNA, 249 bp, Klebsiella oxytoca
atgattcatactaccaatcccgtcatcaaacacaaagccggtttactcaatctggctgaagaactcagcaacgtatcaaaagcagggcaagactacgaaaccccgcaccccgaaaggactgacgcgaggtactttctgtccatcgccgctcttctcatctttcttctcattcctgccttaaattccttattctgcgtcagaatattcacagctatatgtcttatccctgaaaatcgcgcatccagttga

SEQ ID NO: 183705 - DNA, 1209 bp, Klebsiella oxytoca
atgtcatattcacttaaacatttgcctgaatgctaccccagacctaaacctctgaaattttttcgttggcttattgctctggttgtcatgctttcgttcagttttatattaatgcgtatatttgggcgttatattgaaaacctgtacttttggacgtttgctttaggtgtaccaattgctttatggagtgttttgttcgcttcttgtctccttctgtgggcattgcaggatagcaaagcaaatgctttcgacaaacagcgagaacagtggatccttagagaaacccgtaaggcacggcgtgcactgcaggtgctgaatgcaacatttattaccggccactcatcagttgctcagaaagaggcagctattgctatgcaaaataacgatagcattattgtttcacaggtcgaccgggatggtaatgaaagctccagaatgagccaaatttcttctagtccgcaggactcgctaaaattcgtgataacgaatattttttcgcagttgattgctggtattccttttgcacaaatccctgacaaagtaccactggtagtattttttgatgtaacaacatcgctgcctctggagagtattcgccattactgggacgaggcctggcaaaaaaataatattactcttcctgttgaatacggtgaagggagtggactcagcttaattgaccgctggctgaatatacgtattaaagataaagcaatgttattgatcgtggggctccagtttaatcctgccgtttctgacaacacagctgaggccggtgtagcgctgctgctgggtaatcgcctgacgcaggatatactcgaacctctcgcgttgctgcatcggccagatgcttcccctccaggtgaactgagcgagggaatgaacatggccgcctggaacgtcccgctcaaagaaaatatcgtgaaaaatttatggcttgccgggctgacgggtgggcagcatgcagaagtgatcgcgtgccagaatgcacatcctgcgcagtctgtagcggacgactccgtcatttcactcgacaggtctatgggacatgccggagcggcagccccctggctggccatcgcggccgccactgaaatcacccgacagacacagtccccacagatgattatctgcggtgatacgacacagaatgtgctgtggagcacgctcattaccccgattgcttcccgacaggagatggatccgtga

SEQ ID NO: 183706 - DNA, 1275 bp, Klebsiella oxytoca
atgccagcaaaaggcttttatctggtgcagggcgacaaaaccacctgcggcgggagaataactaccggggcagaggatcacacgctgtttggtaaaccggttgcccgggaacaggacagcgtaacctgcggtcatcatcccgggatttacaggatagccggtggcatcgacaatgataccatacacggcaggcgaatggccggaacactcgacagctacagtacctgtccgtgtaaggcaaagttcattccatcgatgatgaatgatacgtatgagaagagcagtggtgcttccgttgcagaatcagcagcaggctttacggccgccccgactcagatttctcctgagctgcctggttatctgaccggtgaacaaaagcaggcaggatttgtatccgattatccagttttacgaaatactcataatttccccgatggtaatttgagggtaatgttgaatgccaataaccacaacgtcatgctacttacgcttggggaggtttttgagtatttgacatctatgggattctataaatcagggtggtccttcgtttcccaaagcaaacccggtgaatttgttgttaactacggtacaagtataaaagacgcatactccacttcgaaggtattatatcagctaggtaaccttggcataactgcaacagtatatgttaaccacaagggaacagagttaataaaaataagtggttatgcaggggtccggaaaatattaaatgcacctgtgtttgccgcaaaaaatccacagatcatcaagtatggaataggaagttacggactaaataacgctataaaagatggttttcttttcggtctgatttatgtatctgtggctgattccgttggctttatcttaaatgatgagactacattagcgaaattcatagggaagtgggctgttgatgtgcttaaagtcggtatttcttcagcgataacctggggggctggtgcttacgctgtaggggtattctcaacaattgccgccccattagttgttgtgctggttgctggtgcattatccgcatgggcactcaataaattagatgatgagtttaaaattacagacaaagtcgtttctctcattgaatcggcgcagcaggagtttgttgagaaagcaaaagaaatggagaaaggcttgtgggatttgggcgcaatgtatgttgatggtatgctttcccgtgggaaagaggttgttgaatatgaggtgaaaaaatacttaagacaaacattagacagttttgaaaaggagtggttttaa

SEQ ID NO: 183707 - DNA, 435 bp, Klebsiella oxytoca
atgggggctttttcatttaaacgtagaattggaatgtttttggggatgctgtgtctttatgtacccttgatcttaggggggggggtattttcctttaatacgcttaaagaatatttaacatttccatctgaattatcattctcatctttttttgtttatgggttttctgctgtatttatcttgtcccctgtcgcatttttttcattatggcctatttttctagggcgcagagtttcgattcagatacaaaaatatgtaactaagtacatgattgtattgttcattgttacggtcgtcattcagattggatttaaggtttatttctcaaataaacttgaagataaaggatacgttgcctgtccagacatccctaaaggttggatgcctggcatggcaacaagatatgtaaaagatccccggaattgccgtcagtaa

SEQ ID NO: 183708 - DNA, 171 bp, Klebsiella oxytoca
atgagccatatggaacgtaactcggtgcgagcggcgtatatccataaagcggaacatctggatgagcgcaagctgatgttgcagtggtgggcggattttctggatgcgaaccgggagagggggattacgccgtttgactatgtgaagagcaatcggggtaatggagtgtga

SEQ ID NO: 183709 - DNA, 885 bp, Klebsiella oxytoca
atgttttactctcctttgagatacccaggtgggaaatcaaaacttacagcttatgttcttgagatcatgaagctgaacaccctcgaaggtggaacatatgttgaaccttttgctgggggatgtgctatcgcttggtatctactgattaataaacatgttcgtaaagtgtatatcaatgacttagatccagcaattcatgccttttggcacagtgttctgtatagaactgacgaactttgctcgttgattgattcaagtatcattacaatggatgagtggcataagcagcgagaaatatacagaagtaatacatctgattttcttaagttaggttttgcaactcttttcttgaatagaactaatcgttctggaattatcaaggctggtgtaatcggcggaaaagaacaaactggaagatataaaattgattgccgatttaataaagagcgggttatcgaacaaataaaatcaatagctgctatgcgtgactctatacgcctaagtaacttagatgcaactcattttattgatgaggtgcttcctgtagtagaagataaagctttaataaatatagacccaccttactacattaaaggaaaaggtttatatcaaaatttctttgagcataacgatcattatcgtctatttgaaagcgtaaaacggattactcatccatggattgttacttatgatgatactcctgaaattcgcggcatttattctgaattttctcctgagccatttggtttaacatacacagcacaaaccaaatataaaggggctgaagttatcatacactctccagatattatcaaggctaattttaaaccagatgttagctttaatgaaataaagagacattatcgagaatgcgataaacaataa

SEQ ID NO: 183710 - DNA, 1521 bp, Klebsiella oxytoca
atggctcaggaaaataaaaagtggtgggaaaacagagtactacgctcagttgataacttaaaactttggagggataaccctcgcctagacccatctagccaacctgtgcgtgttcgagatttcgttgaagaattaatatccgatgtaaatgataaacaggattttatcgagttaattacatcaatagccaaccgtgggttcgtatcattcgaccctattgtggtatggcaaaatcaagctgataagaatttttatgtggcggaaggcaatcgcagagtaatggcacttaagttacttagaaatccagaaaaagccccaatgacgattcgtcgagccgtaagtaagctatcaaaatcgattgatagggatacaatagaaaaaattaaagtttgtgtatcacctagttatgatgatgctcgctggtatattttgcaacgacattccaatgccagcaatcaaatcagatggcaacgtttacagcaacaacgttatataataaccgtatatgactctgttggtcaagatattgatatgacaatagagttaactggatttaaaagagcttcaattgttgaagctttacgttatgtaaaaatcagagatatagctacgcgacaggaagttactagttatttatcaatagaagaaagggagcaggtatacagtcatcgcataaatatgactgtccttgaacgttggtttggtaacagccaagtaagagaagcatggcatatagaatttagcgatgtcggtgttgtcattaatgcaaaccttaacgatttttatgtcgcgtatgctaaattcttaaaattgatgttaaataagaataatgaactaggaattgttgttaatacccgaactattgattcgcatttccaacaaatttttgagtatttgcctaaaattcgacaagcgtcagcggaagatcaagatgaggccgctgttacagcgcctacggctaatcctcaggaaaatgagccaaaaggtgatgataaaacggattcaggccaagatttaaatggacaaggaagagagccagaagacttgaagcctaccttgaaaggtaaccctaatcgtgggcaactaactgatgaatatcatgaaataaaagttagaagctataaaattagagcactttttaacgagttgcaaaagttacctcttcgtaagtatcctaatgtttctgctgcatcgattcgaattttcctagaactatctgttgatgaatatatcaacaattgtgaattgcaacaagacgtgtctaagcgggcaaagaggccttacaatgacgtaacacttagccaaaagctgagtatcttacgcggagacttgattggcgataaagaagctgacaaaatcatcgatcagctattacacaatagcaacgattttagcctgaatactttgaatgagtatgttcatggaacaaaagttcataaaattgagcgccaattcttaaatcgtttttgggatatgttactaccgttcttcagtatattgattagtttaaaggaaatataa

SEQ ID NO: 183711 - DNA, 126 bp, Klebsiella oxytoca
atggaggtacccgaggttaagcgcctgaagtcgcttgaggaagagaacgccagactcaagaagctgcttgccgaagccatgctggataaggaggcacttcaggtggccctggggcgaaagtactga

SEQ ID NO: 183712 - DNA, 825 bp, Klebsiella oxytoca
atgtgtgatgcgaccggtctgtcgcaacgtcgtgcctgcatgcttataggcttgtccctgtcgacctgtcgctatgaggctaagcgtccggcggctgatgcgcatttatcagggcacatcactgagctggcactggagcgcaggcgttttggttaccgccgcatctggcagttactgcgccgtgagggccttcatgtcaatcacaagcgcgtgtaccgcctttatcatcttagagggctgggcgtaaaacgcagacggcgtcgtaaagggctggcaacagaacgtctgcctctgctccgcccggcggcgcccaacctgacctggtcgatggattttgtcattgacgcgctcgccaccggtcgcaggatcaagtgcctgacctgtgtggacgacttcacgaaggagtgcctgacaattaccatcgcattcgggattttaggcattcaggtcacgcgtattctggacagcgttgcactgtttcgaggctatccggcgacgataagaactgaccagggaccggagttcacctgccgcgcactggatcaatgggcttttgagcatggtgttgagctgcgcttaatccagccgggcaagccaacgcagaacggatttattgagagctttaacgggcgatttcgcgatgaatgtctgaatgagcactggttcagtgatatcgttcacgcaaggaaagtcattaatgactggcggcaggattataacgaatgtcgtccacattcagcactgaattatcagacgccatcagagtttgcagcacggtggcggaatggaaaatgtgaaggtaaacaaaccgacattactaactga

SEQ ID NO: 183713 - DNA, 1911 bp, Klebsiella oxytoca
atgtctcagcgatataaactctatcgtcgaaccagcggcatttatgttgtccgcatcagcgttccccaacgttttcgtcgatacgcaggacagtgtgagattcacatttcaacaggcactcacgatcttcataaagcaaagcagaagtccgcgctcctgttggcggtctggtatcagaccttacaagagtatgaacaattggattaccgatctttaagtgacagcgccccgctgcttgctggtgaggggatgatctcgctttctaactttgctcagtcaatcgaattgcctgtatcgcaattgattgaggaagtgatgaaccgcaatctgcctgtattttggctggtcacagggctggcaggtttttacgttgaggttctcgctgaggctgagttagaccctatcgatggcagctacgtgcttaactatggtgaagagcagggtattgagggggttgctaaaggctatctgcaactcactgcgcaaccagcgcatttacgtaacattattagcgacggttattcagaagcttcggtgttcaaaactgccggaagcgacgctaaaggcggttggtttttcacctccggttgcccggtaattaaacccgatacgctgttaatcaataaagtccatgcagaaagcctcaggcttgattggctggctaagaccactcctccagccgctagcatccatcctaccgtgcctcttgccgctccggtccccactatcgataacgagtatgttaatcgaaagcattacaccaagagcctgtcgtggctatgttctgaatatgtgaagcatcggcgcaagggcaaagtatcagaatcggccattaacgatattcgtaactactttgcctttatgattgaagcgatgggcgacattcagttggaaacctttgatcgtgattttctccgggcttatgagagcaaactgcgcacgatcccggcaaaccggaatcttgtcaaagctaagtatggggtgaaaacactggatgagttaatcgctaaagcggctgaatgtggcgacaggttgatgacagaggagtctgtcagaaagtatatcaacggtctttatggtgcaatgaagtgggccgttgatgatggcaagctgctgaaatcgccatgcgaaaacttttttccatccgatgataaagatgagcgagatcaggatcacactgacgtatttgaaacacatgagattaaagcgattttttcgttaccgtggtttgcggctggaactgttgaacgcaatgcgcaagggcgattccatcaatattgcccgtttaactattgggcacctttgctgggcttgatgacgggggcaagagttaatgaaatcgctcagttactgctgggtgatgttctggcagacgacggcgtctattatttgaaccttgaaagcgataatgaaagaggaaagaaactcaaaaatgctaatgctcgccgcaagattccgctccattccaagctgattagtcttggtttcatcgactacgtgaacgccttaaaagatgcagggtatgcccgtctgttcccggagcttaaaccgcataaaacaaaaggctatggtaggccagtttccgcatggttcaatgaatcgttgctggcggggcggttgaaactggagaggaacagaagcaaatctttccattcttttcgccactcagtttcgactttgctcaaggagaagggcgttagctcggaattacgagcgcagctacttgggcatgtgcgcggcgaaactgaaacggaagtgcgatatagcaaagacctcaaaccaattcatatgattgaagtcgtggagaaaattgatttttcgttgcctgaaatcgcgaaattcaatattcctgacgggttggatgctgtcagagatgcgcttcggagaaaaagaggcaaacaagcagactaa

SEQ ID NO: 183714 - DNA, 342 bp, Klebsiella oxytoca
ttgaaaaccatcgaaatactgcaatacaccttacgcacaggcaccggggccgcttttcacgccatcatgcaagaaatcagcgttcccctacactgccaccacgggatcgatgttgtttcgtttggcaactcgcttcatgacccggattgctactacctgattcgcgcctttgacaatgctgaaagcatggctgcggttcttgatgccttttatgcgagtgatgactggcgcaacggcccacgtcaagacatcattggcagcatagagaccagcacgaaaacagtgatgaacctcccgacggaaagtgtgaacgggctgcgggtgcaatcgtcggtttactga

SEQ ID NO: 183715 - DNA, 216 bp, Klebsiella oxytoca
atgttaatggcgacctacagacaaattgccgatgatgttaaatcccgaacggggaaagcagtcaaaacatgctggatcgctcatgttaaatcattgcatgggctgacccgtcgcgtatcaccgaatcggatcagcaccgaaagccgagtttacccttgtcctgaaaaatgggtagcggagatcgagcaatcactgagaaatctgggtgagctttaa

SEQ ID NO: 183716 - DNA, 927 bp, Klebsiella oxytoca
atgaatatcaaccaacaaacagcggattcagccttgaagcaattcagggctaaagctgtaattgactggcttgatgttgagatacgcactgaacgcccaacacaacaccaacacatccgcaaggcgctgaaagatataaccggtattaatcgctggtggactggtgcaatcgacatgcagccaggtgatgttacttacacctaccgcattcgctttcatgacaagctggcgaacaactatcagcagctccgtgctgcgctccatgcgttagccagacggttcacgtttgcaaccgaaccgactattgccgggatagagatcagttgtgacttttggcataaacaacagtcagttgaagcaacacgcgcctttacatatcggatgcaaacaagcctgttcgctccgagcaccaatcatcgccaatacaacggcgacaacaacagtaaccaatttcttgataagcccggcaatcgtatcaacccggcgtataacctgcggattggcaacaaagatgacgccatttcatggcagtgctatcacaaacggaccgacaagaagcagccgctgccgcttcgtgagcaacgtgctcgcatagaggtgacattgcagggtgacgcgctacagcaatacggcttcggtcttctctccgggctgcaacacttcccgtttgaaacactcgccagtcttttcacattccgccgtccgatagctgcggcacagatggcaaaaggggatctgtttcggctcgtttcaatcaactggatacgctcatacagggatgcaacgacggaacgtggcattcactcgttcagcactgtaggacaacgcgacaagaaaggcagaacgcggacagagagtagtcacctgacagcagacaaagaactgagtaacaggattagagcagcattgcgaaacctacacccgtga

SEQ ID NO: 183717 - DNA, 330 bp, Klebsiella oxytoca
atgaaagttaaaaccctttcagcaagtgagacggcttactttttgagagccaagctgggcgacgtcagagcatgggatgatctattagcggatatgcgacgcgggagggctagctatcacggcgaggtcttacttccagtcgggaagtattccgccactcgcccccctcgcccggtttatctatttagtgaagtatgtgagttcgtcgaaaaagcctcacgcctttgccctccccccgctaagccgcacatgctatctatgcttgaggttgacattgacctcaccgataagcggcattggagtgttcgcactccaatagcggcgagttga

SEQ ID NO: 183718 - DNA, 483 bp, Klebsiella oxytoca
atgaaaaagaccttcaaaacacgcaatgcagaacttgccggaattgggcgcacgtcattccggttagaagacaccacatggacggcgctcgatatgcttgcggcaaagcgcgggattcgttggcagaattgggcgagtgaagttttggcgacacaacctgatgcgccaaacaggacagctctgatacgtgctgcattggctgatgaattgatggccgagcagattcataccatcgcggaggctgggtcagttgaagcagatacccatcatgaaattatcggaaatggctattggcggttaaatgacgaacaactacagagcgagctagacggcgcaaccatcgtcacacgtgataattcatttgcggcgtttaccttactgactggttacagagacaaaagctacggcggatcaccattcgtgatcgtccaaaacgagctacgcggtcaactacatctcatgatcgctccaaacgttgattaa

SEQ ID NO: 183719 - DNA, 618 bp, Klebsiella oxytoca
atgaacagcaaccgcatctacgcctatcttcgtgcttccaccaaagaccaaaatgctgagcgtgcgcgtcaggatttgcaggagtttgccaccagcaatggcgttgctatctctgcgtggttcgttgagaacgagtctggtgcgtcactggctcgccctgagttgatgaagttgctcgatatagcgcaaagcggtgatgttctgctagttgaacaagtagatcgcctatcacgccttaatgcggaagattgggaaaaactgactgggatgattaaagggaaaggagtgcgtgttgtcgctctcgatctgccaacgtctcatatgatggtgaactctggtgacgagttcaccacccgcatgatgcaggcgctaaacagtatgatgctcgatatgttggctgctattgcccgaaaggatcaccaagaccgcaaacgccgtcaggcacagggcattaaacttgcgaaggccgaaggaaaatttaaaggccgtcagattgatactagcttgcatgagcgcgtgttaaagctccgtgacgctggctggtcatacacagaaatccagaaagcaacaaatgtagcaagaacaacgattagccgcatcattaaaatgaattcttga

SEQ ID NO: 183720 - DNA, 681 bp, Klebsiella oxytoca
atgaatattttgaaagaagcaattaagaaaagtattactaatcaagctgatgatacaactactacaccaatttcaattcgattgcccattattctaagcaatgagttagatgagctttcattaacactggatcgttcaaaaagcttcctcgttagtgagtttattaaggctgggatcttggaaacgaatgctttacttgccgagagttcagcattgactgatgaaggacaagatcataaaggaccgcaaagagagaacgatgagagtagctttctcgacagaaaaactttcatgctaaatacaaactataacaacgatgaaaacactcactttgatatgttgaaaaatcatgaagcggcagctttttgcaagggttggaaagagtatataagccagctttcgaagggggacacggtttatctataccaaagtggtgttggtattgtcgctgttggtatagttgatggcgacctggagaaaagcgaacatgatggtgtcgctgatgacaaatatgccaagtcactgaaagacttcaaaacgggattcaaggctatttccgctcgcagatttaaagaaatcactggtggtggggcaaactttcgccgcacaatggttgaattgacatcaacacaagctcatgagttacaaaaagagattgaaaaaatcactgttgcttcataa

SEQ ID NO: 183721 - DNA, 498 bp, Klebsiella oxytoca
atgacggaatcagactttatattaccgatggcagcgggagccgtgcttagctgggtcagttacagcatagttgctcacgtttcaataaaacggcagatcagcagcctacgagcaatatcatggggcattttgggaactctctctttggtgctgggagtgtgtgcgttttctgctatgagtgcagaacacacaatagaaaagcaaggtgctgtttgctcagataatacacctgaatgctatgcaaaagcgcaccacaaccctgtcagagagtgcaagcaggtaatggacaagaaagcgacgtttcgccatgtgtggcaggaaagtgaagctcaaccggttttcagcacctacctctggcacgacgaggaaaagaaaatgattcaagcatttggacaacaggctaaggccattaacagcatgaatatactgataccactgcaatacttttgtgtttttaacgccaacaccggggaaattatcgcggcttcatttgagtaa

SEQ ID NO: 183722 - DNA, 2268 bp, Klebsiella oxytoca
atgattaaaggaattttgaatatcagtgggttgggagtttatgaaaattatactcagcctgctgggatgcaagaatttggtgttaagaatttaatatacggctggaattactcaggtaagacaactctttcacggctgttcgcacagctcgaaagtaaaacgtcaaaccctgatttacaagggtgttcatttacacttgctactgatggggataggatcacacaggataatttcacacagtcaaatttaattatccgagtattcaattcggattttattcgagatactctaaattttagcggtcagaattttagaccaattcttcttctgggcaaagactctgaaaaggctcaggagaagcttactcactacgaagatttaaccaagcgaactctcgcaagaattattgcgctgaataaagaacaagaagagcttgagtctaatttttcctctgctaaaactaccgcggctgcaaaaattaaaaagacccttggtcttatagaagcatatactgcacgtcatttatcaagtgatattcaagctatcataggtaacaaaaattctcaacttctagaggaggataaactgcgggatgacttaaaactcgcattgactcctgaaaacgatcgaccgctaacagtaactagaattaatttaaccccatcaatttctcctctgtataaagaagcatgtgaagtgcttgcgacaacaccaagcctcagcaataccatcaaacatttagaggaaaatccccttattgaaaggtgggttgaatctggcttgcattttcattcggatcaagaaacatgcgagttttgcggaggttctttagatagagagagattatcagctctgaacgcgcatttctctaaagacttagcagagcataaaaatagagtcgagcgcctacataataaaattaatgctacattaataaatttagacttgccaaaagaagctgaatttaatgctcaatttcgtagtagataccgtgcttttgttcaaccgttaaccaactctgttggagcatttaacgatgtagttgagatattggctagtgatgttcaagaaaaaatcgattctcctttcaaatcgctcgaaccgcaagcattgccagaaggccttatagatgctatttccaatgccgtcgatgatatcaatcaggtgattgaggataacaataaactagctgcgaattttgtaacggagaaaaaacgggccgtaggacgtgttaaatttcactttgttcaggagtttataaatgaacaaaataaaactggacgtgatttaaaattaaagtggctgggtgctaagaaagaacgccttgttagatttgaatctatccttaaaaatgagtctgacactcagaaggctataataagtttggctcaattggggcgtgaggaaatcaataaaagattatcttccatgcttggtagtgaggctgttcaaattcgagtcgttcaggataatggacaagagcgctttcagttggtccgtaaaaatggcagggtagcaaaaaatcttagcgatggagaaaagaccgctattgccttctcttatttcttgacaaaacttaaagagttaactccacaacaattcagtgacgcaattgtctatatcgatgatccgatttctagtttagatgccaatcatatttttcaagtaacggccgcaattcgagaatttttcttccatcaggttccggcaaatgggaatttagaatggacaacacagtgtaaacaattatttgtatctactcataattttgaattcctacatttgcttagggaactaaaaccagatgggcctaaacaggctcgtatgtatttaattaaaaggataagtgagaactccacgaccttcggcaacatgcctaactctcttgctaaatatgcctctgaatatcatttcctttttggtgtcatccataagtttcacaatgctcccgtcaaaactgatcatgagatacttatgcttttaccaaatgctgttagacgtttcgttgaattgtatacttactctcgacttcccgggatttacaagggcacagtagaccagcgcgcggagatactttttggcgatgaaaaggccaagagaattctaaaggttgtccatttctttagtcatgcaaatagcatagagcgtttagctggcaataatgatttaattttcgatctggagcacgcagttaaagatctttttgacatgatttctgttaacgatccgctacattggcaatcgttggttgaatcgatttctccttag

SEQ ID NO: 183723 - DNA, 156 bp, Klebsiella oxytoca
atgctaaaccgaaatatcggtttgaacctgataaaaaaccccgaagagggaaatccaagaatgcgacggggcgctgaactaacagctaatgagcttgataataccgacattactcaggtctgtaagcaaattttgcaaggtaacatctatagctga

SEQ ID NO: 183724 - DNA, 243 bp, Klebsiella oxytoca
atgcataatgtgatgctgtttggtgaggggtggaatggagaagtcagggatgtcgaggaaggtgcgcgcaatcttttatacattcccaatcctcaggatccacgattgcgtgaagtagcattcactattgttgattacatctccgataatggcaatatgtatttggtcggttttcacggtcaggaacccctgatgccagatgttgaagaagcaatattaagaaacaatcctcgcccggtttaa

SEQ ID NO: 183725 - DNA, 177 bp, Klebsiella oxytoca
atgaatatcgttaattccttcctttattgcaacttcaaccccggactaaagaacagtggcgtttgtctatgtatgtatatagatgtgtatatagatgtgtatatagatgtgtatatagatgtgtatatagattatatgatacatatcgacacatataaaacaatgcctgtagattaa

SEQ ID NO: 183726 - DNA, 867 bp, Klebsiella oxytoca
atggataatgtgagttgcgattctttggatgaaatatatcaagacatacgcaaggcttttgaagagaagcttgaagcgttagtaacaaagctgaaaggttcagtccaatacgatgaactgataacaatgcgtgaaaaagcttatgaggttattgaggaatttaagaccatcgaggaggtactgccggagagaattgttgatgaatcccatccagataatttccgtttactacaggaatttaatgatgttaatggaattattgtgccaaaaccgtatgtctataaaaaaacttacgctgaggctcgggccagtatacagaaagaaatgtttgacggtcgaatttctggaattatcaaattagtggatgaaaacttctggttacattatctttttatggggtttaaggatttttactggagtgagtatattttatcaaatggcaataaaaaagatagttgcgagtttttactttatgcactactttatatcacctacgccgcagacagaaatgataaagcaaagactggtgattggcttagattaaatgaaaggtttgatagaattaaaagaaaatcagcatcaagccttggcggaaagaaaaaattaaaagatctcgattatctaaagccatatatatcttcagcgctgtccgatcattcccctgaaggtggttgggaaagcaagaggcaattcattgataccattatcccactcgttgtaaaacttgatggagaacacaattccgaaaaatggaagggagatccaataaaaagggaaaacacattacgtaatagaatcgataaatggttattggacgacctgcgggacaattatgataaatttattcgaaataagaataagcgttaa

SEQ ID NO: 183727 - DNA, 243 bp, Klebsiella oxytoca
atgtctcaaagtaactcaacacagcagacagtaaagtatgtaaatccagctaaaatgctcaggatcaaagatgtcatggaaaagctaggcatcgctcgtgcgaccatctatgactggttaaacaccaaatcaccacgatatgatccaacttttcccatccaacgtcgcctgggcactaaatcagttggctggctggagtcagaactggacgactggataaataatcgcccgatgtcaatctga

SEQ ID NO: 183728 - DNA, 363 bp, Klebsiella oxytoca
atgcttctcagtcaggtactcaacaccgttcataattttacaccggaggcgttttctgcgctttctgaactgctttcacctgaactcattgatgaatgcctcaccgatacaggtatcgtcactattcgcaaacgtcggcttccgatggagatgatggtctgggccgtgaccggaatggcattgtttcgttccctgtccatgaaccagatagtctcacaccttgatattcttctgcctggtaaacgtccctttgtggcacccagcgccgttgttcaggctcgtcagcgactggaagccgatgtcatccgtctggtctttgaaaaaacacgcctgaaccgccccggttttcctggagtgagttaa

SEQ ID NO: 183729 - DNA, 267 bp, Klebsiella oxytoca
gtggatgacggcgcgctgccgctggataataaccggtgcgaacgggcgatccggcaggtggtgatggggcggaatacgtggctgttcgccggatcgttgcaggcggggcatcgtgctgctgccatcatgagcctgctggaaacagcgcggctgaacggcgtggagccgtatggctggctgaaatcggtgctggagcgcctgccttcattaccgcaggagaggctgcacgaactgttacccttcgcgaaaaatctcctgatcgactga

SEQ ID NO: 183730 - DNA, 147 bp, Klebsiella oxytoca
atgaacaacccggccactcttggctgtgtcaacggcagcgtcattgaaagtcattttctggccagcctgaaatggcgcacctacgcagctctgaccagaataggtgcttttaatgcatcggctaatgttgatgtcaccttcaaataa

SEQ ID NO: 183731 - DNA, 714 bp, Klebsiella oxytoca
atgctcactacacccaatatgctggctgatgtatattatgtttttcaacccatgttcggtcgtgacggaaatattgttgccgtagagtgtctgacccgtctaacggacgcccccttgcccatggaggaattttttcgtcagatatctgtcacactacgctcgcagatccttctgcagcagatttcgcttgttgaaaagcatcggtcgtggtttcatcagaatgatattattgctacagtgaatgttgatgaatcaacattacagatactgactgatgacgctataatacaatgggtaagaaaaatcggttgtctgcattttgaaatgaatgagttttctgaatcgctggtgaaatccgggtcaatcattaacactctaaataaagagtattcactctggatggatgatttcggtgcagggtatgcaggttttatggcattagaaaataattcatttcaaaatataaagattagtaaaaaccttctgtggaatttatctgcgcagaacggcgggcaggacctgatgtgtgcattattaaattacttccatgtaaataattataaagtggtcattgaaggtgttgagactttgcactatgtttcatggttaaaagatatgccatggttcgctttacagggatatctgtggccagagaaaaggattgatgaacttatcacgacaccacagagggtaaaaacagaaattacactatga

SEQ ID NO: 183732 - DNA, 999 bp, Klebsiella oxytoca
gtgagtaaggccctggcagttaacgcgacggtatcgggccgtcagcgatttttcgattttctctacaaatggggcatgttgctgaccgtcgtcctgctgatcgccgtttttggcctggcgtcggacaacttcctcgacccgtttaacatcatcaacatcctgcgttccatcgccatcgtgacggtgatcgccatcggcgtatcgatatccctgaccatcggcggtttcgatttgtccgtgggctccaccgcctcgctggccaatgcgctggtggtttcgctgtttgtctggcacggcttcggcaccaccgaggcgatccttatcaccctcgcgctctgtaccttagtggggctgttcaacgcgtttctgatcgtgatcctgcgtattcccgacatgctggcgacgcttgccagcctgttcgtgattcagggcgtggcgatgacctacagctacggcgggtcgatcaccgaaaacatggtgctgccgagcggcgatatggcggaaggcgcgattccgggggcgttcggttcgctggggcaggtgccaacgatagtgatcattatgctggtggtgaccgttatcgctcagctggcgctctcttttaccacccacggacggcggatgtacgccatcggcggcaacccggaagcggcgcgcctctccggcctgcgcatcacccgttacaaagtggcggcgtacgtcatcgcctctctgctggcggggctcggcggcattctgctggcgtcgcgcatcggctcatcgcaggtgaacgccggcggcggctacctgatggatgcggtggcggcggcgtggattggcttctcgctggccggttccggtaagccgaacgcgctcggtacgctggtgggggcggtcattttaggcgtgctttccaacggcctggtgatgctctcggtgccctattacgcgatggacattattaaagggctggtgctggctggcgcgctcgcactgacttattttcagcgccgcatctaa

SEQ ID NO: 183733 - DNA, 201 bp, Klebsiella oxytoca
atgacgatgttgatcgggagctgcgcgaaaactttacccgccccggtggtggttgataccgcctgcaactgggtgcggattatctacctgactgaccacgatattgacgtgctagataagcagaccaagcgcgacattctggcgcacaacaaatcagtgcaggctaactgcccgcaaccaaccggcagggttacgcgatga

SEQ ID NO: 183734 - DNA, 150 bp, Klebsiella oxytoca
atgaccaaggcaaagaatattgaatttcgactaagcaaacttgagaaagggccagacaagaacgttctggccatcatggagataagggcgagagctattgcaggtagcttgctgaagcagattccctgccaggcgttgaaagatcgataa

SEQ ID NO: 183735 - DNA, 294 bp, Klebsiella oxytoca
atgagtgaagcaaaaccgcaggacggcagcactgtaaaaggctaccgcacattaaccgctggcgacattgagcgaatgaaccgccttaaaggcgtcagccgccacttctgtagtttgcttgataccgatcgaggtgaattgttggctgtccgtaatggcccggcaatgttaagcgctgagcaggctcgggagattgatgaagctttgcgctgtctggcaatcgcttgcaccaaaatgcaggaagcctgtatgtgggcatgccgcgcggtggctcgccctgacgctgattgctaa

SEQ ID NO: 183736 - DNA, 342 bp, Klebsiella oxytoca
atgaataaagaaccgcgcatatatggcagcaaatgggaccgtgagcgtcttctattccttcgtgcgcaccccttatgcgtcatgtgccacgagcaaggcagggtgacagcggcaacggtggttgaccacatcatcccgcacaaactgaaagaggctctgcgctctggtgacagccaggctatagcgaaggcgcaaaagcttttctggagccggaagaactggcaagggctgtgtaagcagcaccacgactctacgaagcagcgaatggagaagcgcggcaccgttatcggctgcgatgaaaacggtattccgcttgatccaaattctcactggttcagatga

SEQ ID NO: 183737 - DNA, 465 bp, Klebsiella oxytoca
atggcaggaagacgcccgaaaccgacccatctcaaagtggtaaccggtaatccgggaaaacgaaaactcaacgataaagaacccacgccagcgcgagaaatacccagccctccggcgcatctcaccgactggggaaaagtagcctggggaaaactcaccatgctactcgacggaatggggattctgaccgttgcagatacgctggcgctggagcgtctttgcgatatttatgccgacattttgcagctgcgcctcactatcgccgatgagggccgaacatatacggtgcagaccgatggcggctttttgattaaggcaaatccggctgtagccatgctggccgacgctgatcgccgtttcaaaagttatctggttgaattcggtcttacacctgcagccaggacgaaggtgaaagtagatggtggagaaaaagaagaagacccgctcaaccagttcttcggttga

SEQ ID NO: 183738 - DNA, 1743 bp, Klebsiella oxytoca
atggtggagaaaaagaagaagacccgctcaaccagttcttcggttgatcccgccacgcaatatgcacgggatgtagactccggaaaagaaatcgccgggcctgatatcagaaactcctgtaaacgacatctcaaagatttggaatcctgccatgctcgcgggttggtatgggatgttgcagcggcgcagcgtgctatcgacttttttgccaaagtactgaagctcaacggcggtgagcatgaaggtaaacccttcaacctgctgccgtggcagtgctttattgtaggttcgatattcggctggaaaaactcagacgattatcgccggtaccgcatggcttacgtcgagtcaggtaaaggctctggcaaatctccacttgcagcgggtattgctctttactgtctggttgccgacaaagaacctcgcgcagaagtctacgcagcggcgacgaaaaaagaccaggccatgatcctttttcgtgatgctgtcgcaatggtggatcagtcccctgcgttagcacagcgaataaataaatcaggcggcgcggggaaagagtggaaccttgcgtttcttcagaccggctcatttttccggcctatcagttcggatgatgggcagtcagggccacgcccacactgtgcgttgattgacgaaattcacgagcacaaaaacaaccaggttgtggaaatgatgcgcgccgggacgaaaggtcgtcgccaggcgttgattttcatgatcactaacagcggccacgacaaaaccagcgtctgctatgactatcacgagtatgggcggaaagttgccgaaggctcgattgaggacgacagtttcttttctttcatttgctcccttgacgaaggagaagaccctttcaaggatgagtcctgttggaaaaaagcaaacccctcacttggccacacttttaccgatcgttacctccgcgagcaggttactcaggctcgggggatgccgtcgaaggaaagtattgttcggcggttaaacttctgtcagtgggtggatgccgataacccctggatgagcagcgatgtgtggatggggtgtgaagaggactttgacctgcaggagatgcagggagaagaatgctatggcggcctggacctttcaggaactcgtgaccttacgtctctggcgctctttttccctaaaaaaagaaagctgctggtggagttctggacaccaaaagatactttgctggatagagcgaaaacagaccgcgtaccttatgacgcatgggaacggggaggccatattcatactacgcccggaaaggcggtgaaatatggctttgttgctgaacgcattgctgatctttccatgttgttcgatataaaggcgatcgccttcgatcagtaccgcatcaaatatcttgaaccggaactggagagcgcttctgtgtcggtaccgcttattcctcatggacagggatattacaaggcgcaggattctggactgtggatgcctcattccatcgaactctttgaacagatgctggatgatggcgtaatcattattaaaacaaacccctgcctccgatggaacgctgcttccgccgtaaccgaagccgaccaaaaagaaaaccgcatattcgccaagaaaaagagtactggtcgaatagatggtgtggttgcgtcagcgatggcaattggtgctgcagaaggttatgagcctgatgatggcgatattgagggtttttttgacgatccgatcatagtgggtatctga

SEQ ID NO: 183739 - DNA, 1308 bp, Klebsiella oxytoca
atggctaagaataaacagcaaccagggcgtgttaagagcgctcttttaaactggcttggtgttcccataagcctgacgaacggtgaattctggcgggagtggttcggaaccagcagtagcggaaaagtggtcaccgctgacaaagttatccggctttctgctgtctgggcgtgcgtgaggctattaagtgagtcggtctccacgctaccgctaaaaatctacgagaggcaggcagatggatcgcgaaagctggcccagaacaatcccgcctaccagatattatgcaggcgtcctaacccggaaatgacaccttcccgcttcatgctaatgattgtggccagtgtttgtctgcgcggaaatgcgtttgtcgaaaagctgtatatcggtagcaagctggtatcgttggtcccgttacttcctcagaatatggttgtaaagcgactcgatagcggaaaattgcagtacacctatacggataacggcattcagcggatcattcctgtagacaggatgatgcacattcgtgggtttggtcttgatggtgtgtgcgggatgatgccgacgatggccggggttgacgttttcggcgcagctatggcggtagatgaagcagcggcgaaaatattcgagaatggcttgcagagtaccggctttctttcttcgaaaactgcgctaaacgaagggcagcgagaaaggcttcgcaaggccctccagaactttatcggctctaaaaatgccgggaaactgatggttctggaaaatgagctgacataccagaatgtcaccatgaacccggaagccgcacaacttcttgaaagccgctccttcagcattgaggaaatatgccgctggtttcgtgtaccgccattcatggtcggccatacgacaaaacaatccagttgggcgtctagtcttgaagggatgaacatgctgttcctgacccatactctgcgccctctgttagtcaatattgagcaggaaatctcgcgttgccttctgaacagtgatgaggatttgtttgctgagttctctgttgaggggcttctgcgagccgatagtgcaggacgtgccgcgtactataccagcgccctgcagaatggctggatgtcgcgcaacgatgttcgaaggctggaaaatatgccaccaattgaaggcggggatatttatacagttcagctcaacctgactcagttgaagaatcttgaaaacagcaacccggcggttcaggcgctggctgtaagagaacttcataaccacgtattccctgatattcctttcgagcaatcgccacttaaacaggctgcttag

SEQ ID NO: 183740 - DNA, 855 bp, Klebsiella oxytoca
atgacaattagacaacttccggttgctccggcggggcgcccgtgcgcgggtgttaccagtgagccccagccctcagcgcttgaacgctggaatggtgggatcagggctgcatccgataatgacaactcgatttctatttttgatgttgttggacgtgattactgggatgagggtgtcacggcaaaacgtatatcaggtgctctacgttcgatgaacggtgcagatgtgacggtaaacatcaactctcctggcggcgatatgtttgaaggactggcaatttataaccttctccgcgagtaccaggggaaagtcactgtaaaagtgctgggtatcgctgccagcgccgcttcaattatcgctatggccggagacgatatacaaatcggacgcggtgcctttctgatgatccataactgctgggtagtagcgatgggcaaccgccatgattttgcggaattatcgacttctcttgagccatttgataccgctatggccgatatctattcagcgcgttcagggcttgatatcgcgaccgtacagcagcttatggatgctgaaagttatatcggaggcagtgatgccgtagaaaaagggctggccgacagtctgctttctgctgatgccgtaagcgatggtgatgactccccgtctgcagcgctgcgaaaacttgatgcgctactggcgaaaacaaataccccccggtctgagcgccggaaattaatcaaagctttaacaggtaacacgccgggcgctgttaccgatcccgatggtaagccgggcgctacccaacccaaccctgaaattttagctgagctggatgtcgcattaagcggcctggcgaacgcatgccagtaa

SEQ ID NO: 183741 - DNA, 1218 bp, Klebsiella oxytoca
atgtctgacgtgaacgatattcttaaaaaagtcaccgcctccattgaggaagcgaccggaaaatttaacgccaaagcggaagaggccctgactgaggcgaagaagaacggcaaactgtcggcggaaaccaaagacaccgtggataaaatggcgtctgaactcaacgcactgaaagaagccgaaaaaactcttaaagccgcgctgggtgaactggagcagcatgttgcgcagatgccgctggcaaatgcaaaacaggttgtggaatctgtaggtcagcaggttatttctgctgaagcgctgaaaacctttgctgccagcgtcgcggccagccagcggatttcaattccggtgaaggcggcgctacttaccgctaatgtacccggcaatattgttgctcctgaccgtctgccgggtattgataccgcgcctaagcagcgtctgtttatccgcgatctgatcgcgccaggtacaacggcatcaaacaccatttactgggtgcagcaaactggctttaccaataacgcagcggcggtcgcagaaaatacgaccaaaccgtacagcaatattgagtttgcagaaaaaatcacgccagttcgaaccattgcgcatcttttcaaggcatccaaacagatcctcgatgacttttcgcaactgcagtctcaggtcgatgctgaaatgcgcttcggcctgaagtatgtcgaagagcaggaaattctgttcggcgatggtactggcgctcatctggaaggcatcattccgcaggcttcagcatttgcggcagcgtttcaggttgagaatcagaacggtattgacgatctgcgtctcgcgatgttgcaggctcagcttgctcgcttcccggcatccggtcacgtcctgcacttcattgactgggcgaaaattgagttgaccaaagacacgctgggccgctacatcctggcaaaccctgcagctctgacggggccgactctttggggccttccggtcgttgcgacagaagctacggcattccagggtaaattcctgaccggggcatttagtgccggtgcgcagatttttgaccgtgaagaaacgaacgttgtcatctctactgagaacgccgacgacttcgagaaaaacatgatcacaatccgttgcgaagagcgtctggcgctggccgttaaacgtcctgaagcctttgtttatggctcattcactgttccggcgtctggcggtcagtaa

SEQ ID NO: 183742 - DNA, 279 bp, Klebsiella oxytoca
atgaagcttatcgcggttaaaccaatttacttcggcggtgtagttgtgtctgagggggagttactggagacgcaggagcagcacggtcgcgaactggtcaaaaagggctatgcacggctggtcgatgttgataattctgcgcagccggaacagccggaacagccggaacagccggaacagccggaacagccggaacagccggaacagccggaacagccggaacagcaggaacagcaggaacagccggaaaccgtgccagagaagaaggctaaaaaataa

SEQ ID NO: 183743 - DNA, 327 bp, Klebsiella oxytoca
atgttagagcttgaagtggttaaagagcactgtcgcattgagcctgattttaccgatgacgactcaatattgaccctctacatcggagctgcttctcgttacgtcgaaacatggactcgtcgcaaaatgtatgagtccgaaaccagcgaggggtatgcagatgatcctgattcaattctccctggcgatgatgtgaaagcagcgatgcttctgcttatcggtcactggtacgaaaaccgtgaaacggtctctgtcggtcaggctgctacagatattccgtttactgtcgaggcacttctccagccttacaaaatttatggtatttaa

SEQ ID NO: 183744 - DNA, 339 bp, Klebsiella oxytoca
atgcaggcaggacgattacgacacagggtcaccattcagaacttcacaacctccagaacgccttccggccagccggttgaaaagtgggaagatgggaaaaccatctgggccgaggttaaggggataagcggtcgtgagctgttagccgctggcgtagagcatgctgatgcgacaatccgggtctgggtgcgttttcgcagggatatttcagcaacatcccgattgaaggtgcgcaccggcccgtttaaaggcgcagttcttaacgttaccgggcctccggttcctgatatcaaaggtacccggctggaaattctctgcaaacaggggaccgaaaaatga

SEQ ID NO: 183745 - DNA, 276 bp, Klebsiella oxytoca
atgttgaaacccgtattaaccttatgcgtcatgtcaggcattctcgtcttatccggttgtaaagagacgaaatcagaagcctggtataaagaacatcccgatgacacctataaggtctatacgcaatgcctcaaggatggcgaggcaagcgacaactgcgagtttgcgcaccgggcagcactcatgtttgcccaggcaggtaaacccggcatcagggaaaaattcgagacactgtttcagcaggaagcccaaaaaagaaaatccgtcactcagtaa

SEQ ID NO: 183746 - DNA, 1032 bp, Klebsiella oxytoca
atgtccggtggtatttttgttggtatggacaaaaacatcatggatggattcaatgccgtgttagaaggtcagtcttctacctacggcaccctgatcagtgcgattatcgtcagttccttcaccctatttattacgtatcgcgggtatcagacgcttgtcggcaaactccagacaccggttgaagatgttgtctgggatgtggggcgcatgttgctgatcaccacctttgttttaaaccgcgatggctggctagatgccatcattgcggccattgaagggcttaaggacggcatcagtggcgatgataatgtctgggcgctgctcgatacggtgtgggaaaaggcacaagcgctggggcaaacgctgtttaatctcgatacctccacctacgttaaagtgaatggcggctttgccgaggtgttggtctggagcggtgcaatcgttctgttactcgctgcaacttttgtcaacctgctcgccgaaatcaccattctgttaatgaccaccaccgccccactctttattttctgcctgctgtacggttttcttaaacccatgtttgataactggctgaaaacactatttaccgcaatcttaacgatcatgttctctgccctgtctgtccggatcgccatcaactacctgaataaaatactggatgccgccacagcaacgtctgcagaaagcaatatggtgaccctggcggcgcaatgtttgctggccgggattgccgcaggcgtcgtggtgtatttttcagcgaaaatagccactgcgctgagcggtgccgccgtacaggccgtgttacagggtgcagccatgagcggactgagcgggctggcgagccaatctgccgacgtcgccagacccggcatgaaggccggaggccgactgaccgccaaaggtggcatggcagcagccgcgacaaccggcaggttcattgccgcaggggcgggcaaagccgtgaacgcctggcagaaacgtgccaccgccatcgaaagcatgaaacgccagaatcagcagcgtcaccgttaa

SEQ ID NO: 183747 - DNA, 141 bp, Klebsiella oxytoca
atgaaattcagcatcttgcttctggtgctgtgcgcgcttactggctgcgcgcagcatcagggcgacctcccgccggtttccggcgatccccagccggtgaattcccccgccatgatccaggagctgactcaccatgtctga

SEQ ID NO: 183748 - DNA, 684 bp, Klebsiella oxytoca
atgtctgatattcagcgtatcattaatgtctcgcgctcttttgaatccatcctgctggaaaaagaagagcgttcccgcaaaactgcctggcgggtggccgctgccgggctgattctggctgcactggcgatcacggccatgattattctgctgccgctgaaaaccactgacattgaattgtggtcggtggataaacaaaccggtcgttatgagtatatgacccgcattaaagtgcggaatattgcgtctgaaaaagcgctggcccattcactggcggcacactatgtcagtcttcgcgaagggtataattacttctccctccagcgtgattacgacgacgtacagttatttaacagcgacactgtgaaccgggattatctggacaggtttaacggcgaccaggctccggacgttatttttaataaagccgaatatgtcgtctatatcgacattatttctaatgtgcatgcgcctgccaccggaccggataacctggcaacactgcgtattaagcgcaccctccgtcgtatttctgataattcagtgaaaacggacttctggaatatccgcctcacttaccgctatgtcccgcatcagcaactgacggacagtcagcgtgaagtgaacccgctgggctttattgtcaccagctaccagcgcgataaagaactgaggaacgaatga

SEQ ID NO: 183749 - DNA, 1305 bp, Klebsiella oxytoca
atgaccgataaacctgtcccggacaagccggaaaaaactaccgcagagcgggaagcggaagcccgcgaacgcgcccatgcggcaatggcgtatcaggagccggagcagagaacatcccccggccagccggaagtgacccgttttcgtaaggcatccggtcaccgcacgctgatcgtcagcctgctgagtctggcgctggtgatcgccctggcatccggcggcgatcgtcttttcagtgcattgaaagggggtaatgagaaagaagccgacaccgcgccgccgccttctgccgggaagacgctgcatgagcgtcaaaatctgggcatggacagtaacccgtttggcctgttcgggccgcacacacaggacaaaacagaccctgccagccaggccgtcactgacgcgccaaccccgccaccggcaccacccgccctgaacaaggcaaccgcgctggctgacgggctgaacaacgcccgaacaatgccgggcgatactgcacgcacgtccccgagtgaaacgcgcagcaacgcagaaacgtccgacagtccgtcatcatccacgacgtacacatcctgtccgtcagtactgaccagaggtaaagatggccgcctgcgctgcccggagactgccgcgccggaaacggataacaacgacaatccgggcgtcgcccgcgtcaccggcgtcagacggttgggtctcgatcctgatctctatatcccggtggaccgctatatcccgtgttcgatgatgtggcgcttcgtgtccgatgtcggggggcatatttcctgcctggtcagtgaagatgtttacagcgccagcaaccatgtgacgctgatcccggcgggaacggtcgcccgtggcatctaccgcaccggggcgctgcaacacggacgcagcaggatgtttgtgctgtggacggagctgcgtacgcctgagcccggcagcctgcaaatcccgctaactgatacgcaggccagcggcccgctcggcgaggcggggatctcaggttggatcgacaaccatttctgggagcgcttcggcaatgccctgatgctcagtaccgtgcaggacgtggctgcggcggcgtcggatgctgccccggggaaagaccgcaataccgactacaccgaaaacacccgcgccgccacggcggaaatggcgaaaacgacgctggacaacagcatcaatatcccgcccaccctttacctgaatcagggtgatgtcatcgggatcatgaccggcaccgacattgatttctcatccgtctggcagctacgactgaaaaagaggtggtatgaacgctga

SEQ ID NO: 183750 - DNA, 279 bp, Klebsiella oxytoca
atggacataattggtgtggtgatagagccggatttcgggattatcctcaatggtggtcagcctgaggtgccggggaatcgagtgcagcagcgttttcatataggtggttttaccggacccggtttcaccgacgataaaaatcgtcttgccgtattccaccgctttttccataaagcggggaatatcctcactctgatagtagcgggtcagttcaacatctttgccttccgttcgctccctaccggtcacccggttataaaatcccgcatcaatccatga

SEQ ID NO: 183751 - DNA, 756 bp, Klebsiella oxytoca
atgtctaacattgtccccatgaattatgatgaccattcattcccttttgcttctgattgctggtttaatgccacagttgctgcaaagcatcacgggaagagagtgaagaactggacaattctggagtcaacaagggattacgttgtcgagttggcgcaagagcttgatattgaaccattcaattctaaagggcagatttctacccttttaattaggattgagaaaggccgttatggcggcacatggatgcacccagagttggcggtcgagttcgcccgttggttgtcagtcaaattcgcccgcgcctgcgaccgccacattaaaaatttgctgctgagtaaaaattttcagctcactgaagatcagattgtcggcctcatggtctgccagcaacccagttcctgggaaaaaaggtttaaagacccgttctaccaggcactgtcgaaaatgtccggtattccttattttggtcatgtcggcggatgtccggcgttgttcggtcagatcaccgctcgctgggtctacggtgtagcacttcctgattatgtctatcaggcagctaaacaggcagccggcaacagcaaggagaagattcatcagcatcttaagccggatgcgctggagaaggtcgagcagcaactgatcgccgtcacaaacattgccagttgcagcattgaccagaaggactttgaggcccgttgcatggctgcctttcctgtcaaagggcagatgaagctgctgtatgcggcggcataa

SEQ ID NO: 183752 - DNA, 297 bp, Klebsiella oxytoca
atgcagttcctgatggcgctggcgctccggatgggccgcacgctgggcgaactgcgacaaaccatgacggtcggcgaattcaggatgtgggctgaattcgaccgtatcagcccgatcggtgatatccgtggcgatattctcaatgctcagctggtttcagcgatgtacggggcgcagggaggtaaagtcaccatcgaagatgctcaactcaagtggagcacagaagaggacgaggtaatcgacagtggccatccatttgccggattagaggccgctttgctcgcagcatcggaataa

SEQ ID NO: 183753 - DNA, 186 bp, Klebsiella oxytoca
atggaaccgttattcgtagtctttggtgtttttggttggctaattaatattattattgttttttatttgattcgttttagtgtaagagctaatgatcaggtagcagccttgcaggaaataaataaaaagcaagatgcacaaattgatttgttaatacaaatagcccatcaaaataaaaacacttaa

SEQ ID NO: 183754 - DNA, 2379 bp, Klebsiella oxytoca
atggctcagactgcccctgaagccagtgatatcgttgctgatgccatgactgttagcggtgcatctgtttcgttttcaggtctcgatgtcgatgatgacaacgatgatgatgaagatgagaacaaactgcctcctggctggattgagggtgcaattgtcactctgaaagcgccggtgaattatcaggtatcgattgaggatggttttaacgttctgacaggtgacgccgtggcagaagtggcgccatataatggtatgcctgtaacgctgacatttagcggtaccgattatgatctgcagattgccacgtataccccccaccaggacgccgttccgggaacgggtggatcgactgcagcattgcgcgccagtgcgtcgccatccacgtatgattttacgacaaccagccagacgtttgctctgacctggcagggcgtcacctataccctgtccctggttgctgactacggcacaatgtccggtttgctggcggcgattaacggcgggctgaccggatcaggattgattgctcaggatgacggcggcgtgattcgtatcgtggaaatctccagcccgtggcgtggcggttccattacgtcatcattcctgcccgtgtcagtttttggcgacagccctgtgtttactgccggtacagcatccagtggcggaagcccggcggtcacagccagtgtcaggctggcatacgattccggtaccgcattttctggcctgccggacggcacgcagcggatttccctggctcaccgtggcaacgaataccagatagcatcgactgacggagcgtctgcgaccgtacagagagtggttaacggtgccgttgacaacacctggtcaggttttctgacccgtaccgtcgtggattttgccgcgtctggtatcaacgataatgaaacatggctcggcccctttctggcctccccgcaaaatgaagttgtggacgccttcgaggtcaactttgctttcccaaacggaatttgcggattccagaacaacgggaataagcgggttcgccatgttgagtatgaaattcagtaccgcgtatatggttccggatcagggtggacgagtaagcagggggtgtacgcgcttaaaaacgttaatggcctcggttttacagagcgttttaatctgtcttctcccgggctggtggaggttcgatgccgccgccgtaacgagcaggggagtaacaacgcgagggacagcatgttctggcaggcgctcagaggtcgtttgctttcccgtccgacctcctacgcagggatatcaacaatagggatcacggttgaaaccggcggccagctggcggcgcagtcagacaagcgtgtgagtgttgtcgccacgcgaaactatgatggcggtggtgacaggacaatcagcggggcattcctgcatctggcccgcagtctgggttatcgcgacgaccagatcgacatttccacaatcaacatgcttgaggctaactactggacgccacgaggcgagtattttgaccatcaggcaagcagtgacagcacgtccgcaaaggatattttcgacaagattgctgaagcaggcatggggtattttctgctgtctgacggcttactttccgtcgggcgtgaaggggtcaaaagctggaccggaatcatcaccccccaggatactgtcgaggaaatgcagacatcattcagggtgccttcggaggacgattttgatggcgtggatgtgaaatacatcaatcccgttacctgggcggaggagaccgtacagtgccggacgcctgaaaatccgttcccccggaaaacggaggcttacaccatcgatgtcgtcatgactgcggatcgtgcctggcgtatcgggatgcgccggttaatgaaatatctccatcaacgccggacgtatacggctacaacagcaatgctgggatggtgccatgattttggtgaccacatcattttgtcagatgatattcgaaccgggaaaacccaaagttgcctgattgacgcaatgacatacgactttcaggaaataacgctacatgtcaccgagcctctggactggagctatacaaatccccggtgctggatacagtttcagaacagtcgtccatcgtcgcggatgctgacgccgcagcggatagatgacttcactcttaccataccttacaacgacgatctgcacccggaagactggattatggacgaccctgatattgatctaccgcgtttgctgttctgcgacagtgaaaaaggtgcccggcatgggatagtccaggaggtcgccccctccggtgacagcaactgtcagattaccgcgccggaatataaagaaattttctacgcctacgacgacgccacataccccggcgacgtctcgtaa

SEQ ID NO: 183755 - DNA, 282 bp, Klebsiella oxytoca
atgatgaaacgaaaacagactgactggcccgccctctcttccttgttaatggcaagcccggtgctggcagcagacagcggatttaataaagccaatgagacgctgagtaacacctccactggcctgctcgggctggccgccgtcaccatcacgctggccaccatgtgggtgggatacaaagtcttgtttgacggcaagagcctgcacgacatgcgcaacgtcatcattggcgccatccttatcgtcggtgcgtcaggtttcggtgcctactgggcgtcataa

SEQ ID NO: 183756 - DNA, 1131 bp, Klebsiella oxytoca
atgaatataataattttattgccattcatatacatgtttattttgttattggtattgttaccattattgtttgtaaagaaacaatcgtataaatgcaccggaaagaatatagttttactaattcctacctttaatgatgaaaagaatattgtagatgttttaaaaagtatactatctcaggaacatgagaatcatttatcagtgctaataataaatgatggctcgacagatagcactgcggaggtagtagctaactggataaaagataaaaaaagctacgatcttatcaatatccaaaagaatacaggtactaaaggtaaagcactggcttatgcaaaaaaacatattccctcaacctcatatgctgtcatatgtatagatggtgatacaattctggacagaagagcaatacagaactgccttgatgctctctttgcatccaaaaaacttgcagctgtatgcggatttctgatgccaatgaaaactcaggaatgttctttcactggtgaaatccaacgagctgagttatatggtgtcttccatgggctgaaacgtgcccaaagtattataggaaatgtaaatacattagcaggtgcgcttgttgcccataaaactgaggccttaaaggaagttggatggtttgaagaatggctcgtagaggatatttgctggacatggcgtgcaaaatccagcggatgggatattggttttgccgaaaatgcttttgcatatactgaatgccctgccaatatgagtgcattatataaacaaagacgtagatggtatcggggtaaactggaagccttgaagacggtctactctaaaaaaaataatattacattatggccgtggtttattttctcggtttcacaaatcttatctccaatatcgttagctcttggagctatattctactcatgggaactgatgttattactttctggcaatttcctattgcatttagtgtatgcgcttagagcgctacatgatgctcaatttaataataaatggtttgctatcaaaagtgcattcattactgcagttatattagacgtggtcttattaactccccatatccgtgggttttatgatgagatttcaaacagttcaaaaagttggttaacccgataa

SEQ ID NO: 183757 - DNA, 795 bp, Klebsiella oxytoca
atgcatggccaatatcaatcagcaaatcctaagttagatagttttattaatactgcttcatcaatgggtgttaagccattagtaatatttgattatggaaataaaatttatggtggaggaaagcctattactgctgagcagcgtaaagcctttgctaattatgctgtttggaccgtcaaacatttagctccttcggtcaatacttttgaaatttggaatgaatggcatttagaaaaacccaggtcccattcacaaacccaagaatcagcagaacaatacgtgatgttggttaaagaagtatattccgcaataaaaaaagcatctccttcgacaattgtaatagcgggttcatttaaccctaccaaacctgaggaaatagcttgggaagaaaagattttcaatctaggatttcttaactatattgatgggataagtcttcatacctataacaactccttcagctcgtatctaactccttctgaaagccttgcatttgtcgataaaatggagcagcgtgttaaaagtatttcgggtgaatataagaaaatttatattactgaaataggtattagtgaccattatagaaatactataccccaatctgatatagctaactttgcaatagactattataaccaggctgccgatagaaattacatacaaggagtatggtggtacgattttatcaatgatggtaataataaaggaaatggagaggataattatggcatcctcaattctgaccttactgaaaaaccaattgcgcggtcaataaaaaatctgcgtaaaaaatga

SEQ ID NO: 183758 - DNA, 510 bp, Klebsiella oxytoca
gtgggctttaaactccgcacgggcaatcgcgccgtgggtcgggacgacgctgacaaccgcatcgtccaggtcgacgttatcggccaggctgttggtgtccagcgccacccggttttcccggtattcggtggcgtagggcagcacggcgtagccgcgccagtcggtctgaaccccggtctggttttccactttgacgttgtctgcgccgggggctttgatcagcaccaccgtgtcgttcatcggctggctcagggtgacgccgtcggcgtgagccagcacgccgccgctcaggccgtagtacagctgtttgataccgtcgctgcggctgtagccgacgttggcgttgccgtagccgccgcggtagttcagcgccgcgtagccggtgccgccgctgttgccctcaccgccgccggcgtagccggtctgcatgctgtagctcaggttgttgtcctccagcagcgtgccgtacagcccggcgaggctggtggttctgccgttcagatcgtttga

SEQ ID NO: 183759 - DNA, 201 bp, Klebsiella oxytoca
atggtggtcctgaaaacgccgttacgcgcgggtgaaacccggccttttgtggcgatggcgaaaatggatttatcgggcctcgggaaacttaccaaaatgctcagcggcagcgaagacaacctgaagctgttcgacaccctgtatctggaaggaatgcagcctgatgactggaaagccgaattccttgaacaagccctgtaa

SEQ ID NO: 183760 - DNA, 348 bp, Klebsiella oxytoca
atgacagaggatgatatctataccctgctgtcgtcgctggcagatgggcgggtttatccgtatgtggtgccgcttggcagcgacgatttacccgcagtggccgctccttacattattttctcgataccgactgatgttgccggggatgttttctgtgggcaggccgaatcgacgctgcacattcagatagacgtgtgggcagaaactaacgatgaggccagggcgttgcggcttgaggccctttcccggctggaagtgctttcacctaccgaagtgaccaaaatccctggttatgacactacaacccacttgcatcgggcaacgcttgaaataacggtcattgcctga

SEQ ID NO: 183761 - DNA, 348 bp, Klebsiella oxytoca
atgacagaggatgatatctacgctttgcttgctccgctggcagacgggcgggtttatccgcatgtggtgccgcttggcagcgacgatttacccgcggtggccgctccttacatcattttctcgataccgacagatgttgccggggatgtgttctgtgggcaggccgaatcgacgctgcacattcaggtagacgtgtgggcagaaactaacgatgaggccagggcgttgcggcttgaggtcctttcccggcttgaagtgctttcacctaccgaagtgaccaaaatccccggctacgacacaactacccacctgcaccgggcaacgcttgaaataacagtcattgcctga

SEQ ID NO: 183762 - DNA, 477 bp, Klebsiella oxytoca
atgacaattcttgagcggctatatgccagcagcggttcggaggttatccacgatacgctgcagatatcagcaggcgatgataactactggctaaccagtggctgggatgacgtttccgtgatgctggaaaatggtcagccggcgacgtttgaagccagcgcgatagatatcgccttaccagccaggaacgccgacgggacacaggatttaaagtttgctatcagcaatattgacggaagggtttctgaggcgatcgataaaatcctggatgaaatgaaatcagccacgctgacatttcggcggtacatttcatccgatctgtcttccccggcatcatcaccgtatacgctcgatatcaaatccggctcctggaccccgacagcagtacaggtcacggcgggctatatgaatatcctcaaaacagcctggccccgtaaacgttacaacctcgcagagcatcctggcttacgttactaa

SEQ ID NO: 183763 - DNA, 195 bp, Klebsiella oxytoca
gtgacatctcatcagttattacgtctgaaacaggttgaagaaaaaacgggcctgaagcgctctcaaatctatctgtatatgaaagacggcaccttccctcgctcaatcaagattggcccagccagtgtcgcctggctcgaatcggaaattgacgaatggatcaatattaaattagcccgccgctcaataagctga

SEQ ID NO: 183764 - DNA, 588 bp, Klebsiella oxytoca
atgattatcccgtcactgaattacgccgttttaaccgatgccttgcatgcattgaaggatggcaacattcgctactgtgaatcgctcggattcactttcgacgaaatgaatgccctcaaccaattatcactagacgagctgtttatcatcagtcgggagtctgcgcagtttttggctgtgacggttcatcacgacgcattacacctgcttctggctaaatcccgtaaggaggttctgcagcagcaacgtatcaatcatgccatccggctcggcgggtcaattgcgctactcaacaaatattttggcctcacctccaacgaagtttgccttcgccgccggttactgggcgtccgtgtgccttatggccggacgccagaaccggacgaagagacggatgcggccatctggcggcaatggcaacaatgccgggtggccaacctggactcggccgatgcgctggccgccatgatgcaggtaacgcaaaccctgctggcgaaagtcgaagggttatcactgaccatcgtctggaagcgtatcgcactttgcgaacaggaggcgtcagaccggagggccacacatgccggatga

SEQ ID NO: 183765 - DNA, 306 bp, Klebsiella oxytoca
atgacgaaaccgggttttattcagcatccctggacacatcagcgcggagattccatgcgcgcagcctgtgttattgagcacattgaaaatgagtcgatgcacggatgcggcctttattatgaaatatatcactaccgggttatatgccggttattgcaattactgcaaacgctgaacggcaccgacagaataacgctgacagaagaagctaaccgtcgagggtttacgcttgatgaaaccagcattaaagaaagtcgtcagtgttattccgacatcatcagggaaatccgcgagaaccaatattaa

SEQ ID NO: 183766 - DNA, 477 bp, Klebsiella oxytoca
atgacaattcttgaacggctatatgccagcagcggttccgaggttatccacgatacgctgcagatatcagcaggcgatgataactactggctaaccagtggctgggatgacgtttccgtgatgctggaaaatggtcagccggcgacgtttgaagccagcgcgatagatatcgccttaccagccaggaacgccgacgggacacaggatttaaagtttgctatcagcaatattgacggaagggtttctgaggcgatcgataaaatcctggatgaaatgaaatcagccacgctgacatttcggcggtacatttcatccgatctgtcttccccggcatcatcaccgtatacgctcgatatcaaatccggctcatggaccccgacagcagtgcaggtcacggcaggctatatgaatatcctcaaaacagcctggccccgtaaacgttacaacctcgccgagcatccgggcttacgttactaa

SEQ ID NO: 183767 - DNA, 222 bp, Klebsiella oxytoca
atgcgaaaacccatttatcacgtatttgtcacccgggaaagtcagcccgacccacagggtgaaaaaaacacctggtggacgaaagtcggcgtggcttttgcccatcacggtaaacccggcctgaacgtggtactgatacccggcattgccgtttccggaaagctggtgctccttgagcccagggatgacggcgaggcgacacaggatactcaggccatttaa

SEQ ID NO: 183768 - DNA, 630 bp, Klebsiella oxytoca
atgaataaatcacaattccagaaggcggctggtattagcgccgggttagctgcgcgctggtttccgcacattgatacagcaatgaacgaattcagcatcactagtccactcgatcgagcgatgttcatagcgcagtgtggacacgaaagcacatcatttacccagatggtcgaaagttttaactatagcgttgccggcctggctggttttgtgaaggcaaagcgcatcacgcaggaccaggcgaacaccctggggcgtaaaacttacgaaaaggttttaccgatcgaacgtcaacgagcgatcgctaatctcgtctacaacaatcgttttggcaataaggctgcgggcgatggctggaaataccgcgggcgcggaattatcgggatcaccttcctcgaaaattatatgaagtgcggtaatgcactgaaactggatttagtcagcaaccctgagttgttggagaaagatattaatgcggcccgcagcgcagcctggttttacacctcaaacggatgtttgaaataccacggagatttagtgcgcgtgacccagattatcaacggagggcagaacggcattgatgaccgacgcgcccgcttcctgaaagctaaatcggtactggtgggataa

SEQ ID NO: 183769 - DNA, 420 bp, Klebsiella oxytoca
gtgaaggcaaagcgcatcacgcaggaccaggcgaacaccctggggcgtaaaacttacgaaaaggttttaccgctcgaacgtcaacgagcgatcgctaatctcgtctacaacaatcgttttggcaataaggctgcgggcgatggctggaaataccgcgggcgcggaattatcgggatcaccttcctcgaaaattatatgaagtgcggtaatgcactgaaactggatttagtcagcaaccctgagttgttggagaaagatattaatgcggcccgcagcgcagcctggttttacacctcaaacggatgtttgaaataccacggagatttagtgcgcgtgacccagattatcaacggagggcagaacggcattgatgaccgacgcgcccgcttcctgaaagctaaatcggtactggtgggataa

SEQ ID NO: 183770 - DNA, 420 bp, Klebsiella oxytoca
gtgaaggcaaagcgcatcacgcaggaccaggcaaacaccttagggcgtaaaacttacgaaaaggttttaccgatcgaacgtcaacgagcgatcgctaatctcgtctacaacaatcgttttggcaataaggctgcgggcgatggctggaaataccgcgggcgcggaattatcgggatcaccttcctcgaaaattatatgaagtgcggtaatgcactgaaactggatttagtcagcaaccctgagttgttggagaaagatattaatgcggcccgcagcgcagcctggttttacacctcaaacggatgtttgaaataccacggagatttagtgcgcgtgacccagattatcaacggagggcagaacggcattgatgaccgacgcgcccgattcctgaaagcaaaatcggtactggtgggataa

SEQ ID NO: 183771 - DNA, 348 bp, Klebsiella oxytoca
atggctaacagtctgctgtacattgctggcctctctggtggcttcctctttccgttctgccgcggcgacactggcggcagcattctcttcggctcgctgttgctgagctttgatttcggccttgctggtcccgcgggcatgacctatgccgaatgcgccagcaatagcgcccagaatgacaaccaccagccccgcgatagcttctattcccatgattatcccaccagtaccgattttgctttcaggaatcgggcgcgtcggtcatcaatgccgttctgccctccgttgataatctgggtcacgcgcactaaatctccgtggtatttcaaacatccgtttgaggtgtaa

SEQ ID NO: 183772 - DNA, 549 bp, Klebsiella oxytoca
atgaacgaattcagcatcactagtccactcgatcgggcgatgttcatagcgcagtgtggacacgaaagcacgtcatttacccaactggttgaaagttttaactatagcgttgccggcctggctggttttgtgaaggtgaagcgcatcacgcaagaccaggcaaacaccttagggcgtaaaacttacgaaaaggttttaccgatcgaacgtcaacgagcgatcgctaatctcgtctacaacaatcgttttggcaataaggctgcgggcgatggctggaaataccgcgggcgcggaattatcgggatcaccttcctcgaaaattatatgaagtgcggtaatgcactgaaactggatttagtcagcaaccctgagttgttggagaaagatattaatgcggcccgcagcgcagcctggttttacacctcaaacggatgtttgaaataccacggagatttagtgcgcgtgacccagattatcaacggagggcagaacggcattgatgaccgacgcgcccgattcctgaaagcaaaatcggtactggtgggataa

SEQ ID NO: 183773 - DNA, 510 bp, Klebsiella oxytoca
atgttcatagcgcagtgtggacacgaaagcacatcatttacccagatggtcgaaagttttaactatagcgttgccggcctggctggttttgtgaaggtgaagcgcatcacgcaagaccaggcaaacaccttagggcgtaaaacttacgaaaaggttttaccgatcgaacgtcaacgagcgatcgctaatctcgtctacaacaatcgttttggcaataaggctgcgggcgatggctggaaataccgcgggcgcggaattatcgggatcaccttcctcgaaaattatatgaagtgcggtaatgcactgaaactggatttagtcagcaaccctgagttgttggagaaagatattaatgcggcccgcagcgcagcctggttttacacctcaaacggatgtttgaaataccacggagatttagtgcgcgtgacccagattatcaacggagggcagaacggcattgatgaccgacgcgcccgattcctgaaagcaaaatcggtactggtgggataa

SEQ ID NO: 183774 - DNA, 498 bp, Klebsiella oxytoca
atgtattattcacttttcttgcatccctcagataatgttgagatgtcatttaactttctaacaaatttttttaggagcaataacttagggtttgatgcttttttatttttgtatgctttgttaggattaggtcttcatctttatttttcaatgatatatgtaaaggatgaacaaggtacactacgttttcttatatttttgattccgtatttttgttatttcttcattttgtgggatctgattcaaatccggtactcagctggtatatcatttttgatgtttggcatatttgctgcgaataataaaaaaagagttctgctttttttaatcgctttcttacttcataattctatgatgttaccaattggcttattttatttatttttgatactaaaaaataaatatattaagcttttaatgattcctggtattgcgattgcgagtttagccggtttgcaattcactaggtattctgaaaaatataatgaagtttcttaa

SEQ ID NO: 183775 - DNA, 420 bp, Klebsiella oxytoca
gtgaaggtgaagcgcatcacgcaagaccaggcaaacaccttagggcgtaaaacttacgaaaaggttttaccgatcgaacgtcaacgagcgatcgctaatctcgtctacaacaatcgttttggcaataaggctgcgggcgatggctggaaataccgcgggcgcggaattatcgggatcaccttcctcgaaaattatatgaagtgcggtaatgcactgaaactggatttagtcagcaaccctgagttgttggagaaagatattaatgcggcccgcagcgcagcctggttttacacctcaaacggatgtttgaaataccacggagatttagtgcgcgtgacccagattatcaacggagggcagaacggcattgatgaccgacgcgcccgattcctgaaagcaaaatcggtactggtgggataa

SEQ ID NO: 183776 - DNA, 303 bp, Klebsiella oxytoca
atgaaaaaagtaatatcctccgctttattactcagcgctatggcgtcatattccacctccgtcatggccgctgacgcctgtgaagtggtgttatgcatgtacggtaaagccaccgggaacggcggcggcaatgaatgccattcggccgaacgagcattctttaacatagtcaaaaagaacaggcacggttttctgccggaccatactgccgatgccagaaaatcgtttttacttgaatgtgattcggcagaccccgccattatcagccagattatcaataaatttggccgcatgcgtggttaa

SEQ ID NO: 183777 - DNA, 303 bp, Klebsiella oxytoca
atgaaaaaagcagtatcctccgcattattactctgcattatggcgttatgttcaacttccgtcatggccgctgacgcctgtgaagtggtgatatgcatgtacggcaaagccaccgggaacggcggcggcaatgaatgccattcggccgaacgtgcattctttaatatcgtgaaaaagaacaagcacggttttctgccagaccatactgccgatgccagaaaatcatttttacttgagtgtgactcggcagccccggcaattacccgccagattatcaatgaatttggccgcatgcgtggttaa

SEQ ID NO: 183778 - DNA, 174 bp, Klebsiella oxytoca
atgcgagacgtcgcaattactgctggcgttgagttttacagcctgtacgactttatgaatacgacttatgcgaaaagcaacgcagagggtatgtggttagataacctgcacctgagtaatgccggtggtcgctttcttcttaatcaaattaacgcacactttctggagcaataa

SEQ ID NO: 183779 - DNA, 207 bp, Klebsiella oxytoca
atgggtgtggtcatccagggtggcactgcaccttatacctacgtctggaaaaaaggttcgtcaaccgtcagcgggcagaccagcgcaacgtttaataaggccagtgcagtttctggtgatgccggtgtttactcctgtgtagtcactgactctgccactccggcgaacgttatcacctcatctgactgcaccgtcaccatcagttaa

SEQ ID NO: 183780 - DNA, 201 bp, Klebsiella oxytoca
atgggtgtggtcgtccagggtggcacggcgccttatacctacgtctggaaaaaaggctcttctacagtcagcgggcagaccagcgcaacgtttaataagtccagcgcagtatcaggtgacgccggggtttattcctgcgtggttacagatgccgatggcaccgttatcacctctgctgaccacaccgtcaccatcagttaa

SEQ ID NO: 183781 - DNA, 717 bp, Klebsiella oxytoca
gtggtctatcaggggctcgagacggcgccggaaaactggcagcacgcgcaaaaccgcctcgccgactggctgcaaaccctaccgccgcaaaccggcatcatcgccgttaccgacgcccgcgcgcgccacgtattacaggcctgcgagcggctgcatatccccgtcccggaaaagctgtgcgttatcggcatagataacgaagagcttacccgctacctgtcgcgcgtggcgctctcctccgttgcgcagggcacccgtcagatgggctaccaggcggcaaagctgctgcatcgcctgctggagaatgaagagctgccgcttcagcgtcagcttatcccgccgatgcgcgttgtagaacgccgctccaccgactaccgttcgctcactgatccttcggtcattcaggcgatgcactatatccgtaaccacgcctgtaaaggaattaaagttgagcaggtgctggacgccgtggggatttcccgctcgaatctggaaaagcgcttcaaagaggaagtcggcgaaaccattcatacggtgatccacagcgagaagctggaaaaagcgcgcagtctgctggtatcaaccaccctatcgattaacgaaatctcccagatgtgcggctatccatcgctgcagtatttctattcggtgtttaagaaagagtacgacgtgacgccgaaggagtaccgcgaccggcacagcgaagtcatgatgtag

SEQ ID NO: 183782 - DNA, 258 bp, Klebsiella oxytoca
atgtttgaaaagcgtcaccgtattacgctgttattcaatgccaacaaagcctacgatcgccaggtcgttgagggcgtcggcgaatatttacaagcatcgcaactggaatgggatatcttcattgaggaagattttcgggcacgaattgaaaacatcaaagagtggttaggcgacggcgttattgccgattacgacgacccggaaattgaaaacctgctgatcgacgtgaatgttccgattgtcggcgtcggcggatag

SEQ ID NO: 183783 - DNA, 993 bp, Klebsiella oxytoca
atgaagataaagaacctttgcctaacgctctgtgcttcactcctcctcaccagcctgtcgggcattgcgaaagaagtcaaaattggcatggcgattgacgacctgcgccttgagcgctggcaaaaagatcgcgatatttttgtcaataaagctgaatcattaggtgcaaaagtattcgtccagtcagccaatggcaacgaagaaacgcaaatgtcgcaaatcgaaaatatgattaatcgcggcgtcgacgttctggttattattccctataacggtcaggtgctgagtaatgtgataaaagaggctaaacaggagggaattaaagttctcgcctacgatcgtctcatcaataatgccgacattgatttctatatttcgtttaataatgagaaagttggcgaaatgcaggcgcaaagcctggtcaataaagtgcctcagggcaactatttcttaatgggcggctcgccggtagacaataacgccaagcttttccgcgccggccaaatgaaagttcttaagccctatattgatgaaggaaaaattaaggtcgtcggcgatcagtgggtcgacggatggctgccagaaaatgcgctgaagattatggaaaacgccctgaccgccaacaataacaaaattgatgcggtcgtcgcctctaacgatgccaccgccggcggcgccattcaggcgttaagcgcccaggggctcgcaggcaaagtggcgatttccggccaggatgccgacctcgccggcgtgaagcgcattatcgctggcactcagacgatgaccgtttacaaaccgatcgctgaccttgccaccaccgcagcagagatcgccgtcgaactgggcaacgataaacagccgaaggccgacgccacgctcaacaacggcctcaaagatgtgccttcccggctgctgacgcccattgaggtcaacaaagacaacattgaccagacggtgatcaaagacggtttccacaaaaaaagcgagctgtaa

SEQ ID NO: 183784 - DNA, 1317 bp, Klebsiella oxytoca
atgccattagtcatcgttgctatcggggttgccctgttattgttgctgatgatccgtttcaagctgaacgggtttatcgctctggttctggtggcacttgccgtcgggctcatgcagggtatgcctctggataaagttatcgtctccatcaaaaacggcgttgggggaaccctcggcagcctcgcgctgatcatgggcttcggcgcgatgctcggtaaaatgctggcggactgcggcggcgcgcagcgtatcgccaccacgctgattgccaaatttggtaaacaacatattcaatgggcggttgtgctcaccggctttaccgtcggcttcgccctgttctatgaagtgggcttcgtactgatgctgccgctggtctttaccatcgccgcatccgccggtatcccgctgctctatatcggcgtcccgatggcggccgcgctctccgtcacgcacggtttcctgcctccgcacccgggcccgactgccattgccactattttccatgccgacatgggtaaaaccctgctgttcggtacgattctggcgatcccgacggttatccttgcggggccggtttacgcacgcttcctgaaaggtatcgataagccgattccggaaggcctgcataacccgaaaacgttcactgaggaagagatgccgggcttcggcgtcagcgtctggacctctctggtaccggttattctgatggctatgcgcgccgtggccgaaatggttctgccgaaaggtcatgccttcctgccgatcgcggaattcttcggcgacccggtcatggccacgctgatcgcggtactgatcgccatgttcaccttcggtcttaaccgcggtcgttccatggagcagattaacgatacgctgacctcctcgatcaaaattatcgccatgatgctgctgatcatcggcggcggcggcgccttcaagcaggtgctggtcgatagcggcatggataaatacattgcttctatcatgcatgaatccaatatgtccccgctgtttatggcatggtcgattgctgcggtactgcgtatcgcgctgggttccgccaccgttgcggcgatcaccgcgggcggtatcgccgcgccgctgatcgccaccaccggcgtgagcccggaactgatggtgatcgccgttggctccggcagcgttatcttctcccacgttaacgacccgggcttctggctgtttaaggaatacttcaacctgaccatcggcgagaccattaagtcgtggtcggtgctggaaaccattatctcagtgtgcggcctggtaggctgtctgctgctggggatggtggtataa

SEQ ID NO: 183785 - DNA, 222 bp, Klebsiella oxytoca
atgcacacatatgacgccgacgacccccgtgtgagtcatacgggggtaataccagacgatgccgtttccgcattttctgccgaactggtgattgagggttttgataattccggatttcatctgcgcatcggggattcatattattgtgcaaaaaattttgatgatctgatcgctgtttgtgtcgatttttttgggggtgataataatggcagttatcgttga

SEQ ID NO: 183786 - DNA, 309 bp, Klebsiella oxytoca
atgtctattttaattcgtggaaaatttctcggtgctcgcaatcgcgaatacactaattcgcagggcagtttctcgttctatgagatcggggttgaaaattcccgccctgacgggtggggcggctcacagtcagttcagacagttatccaggtaccaaaaaagctggttgattctgggattctgaataggattgcctcattacagggaaaaagcgtggagatcccaatttgggctgatgcctatgtcggtaaaaatggcgcggcgataaaatattttttggagagcgatcaaatcacagaaattaaatag

SEQ ID NO: 183787 - DNA, 174 bp, Klebsiella oxytoca
atgaaaattatttttgatgagatggatctgcgttcattagaggtgatagaaattgctcggcaattactgtcattttttgatcgttgtgacaactgtgattgtgagggttgccctgaatgtaattttttgggcgttgttcaggttagaaatgccgatggcacggagtttggttga

SEQ ID NO: 183788 - DNA, 1170 bp, Klebsiella oxytoca
atggctaaatcggtcgaggatacgctgttctttcgccataacctcgacctggcattgaacgaagtcggggccgatcctactcctcgcgctttttctctctctcgttttcaccaggagatgcgcattcgtcttgcccgccagcccgacgcgctgctgggaacgtcgacgcacgatactaaacgcggggaagatgcgcgcgcccggctttacaccctaacggaagccccgcagctgtgggcggaaaaccttgcgcgctggcgtcagatgaatcaaacccaggtgcgttttttgaacgacggtacggcgccgaacgcggcggatacgtggatgatctatcaggcgctcgccggcgtgtggcctgcaacgctgctgcccgacgataccgcagggctgaaagaactcgagacgcgttttcttgcttttatggaaaaagcgctgcgcgaggccaagcaaagaaccgactggatcgacagcaatgaaagctatgaaagcgttgtgctgaactatgcgcaacagctgttcgctgcggataattcgctctttctcaacgattttcacaccgccctgcagccttttatccgtgccggcctggtgaacagcctcagccagacggtcatcaaactgaccgcgcccggcgtaccggatatttatcaggggagcgaggcgctgaacttcagccttgtcgatccggataaccgacgtgaacctgacttcgccgtcctggcgcataacctcgatagcgaaggcccagagttatttgataacgaaaacgcatggcgagacgggcagctgaagcagtacgtcaccgcatcgtttctcaggttaaggcagcggcattccgcgctcttccattatggtgactgggtaccattaaaggtcaccggtgacagggaagagaatcttatcgcctacgcgcgcatcaacgacgaggaggcccttatcgtggtggttcctcgcctggcctttgacgtcgcggcgcacgggttggctgattccccggccaggctgtggggcaacactgcggtagccatacccgaagatctggcaggacgacattatcgcgatgcgttaaccggcgaaaaccgtcttgtcgaagaggcgctcgatctggcgtcagcaacggggtggttagtaacgcttattagtgaaaagaaaagtagagaggaatag

SEQ ID NO: 183789 - DNA, 1074 bp, Klebsiella oxytoca
atgttgatgcagcatatcggtgtcggctattttgggtattaccgagcaactgcttatgcgatgaaacactctcttatgcccgagattgcgaagttaagaatgaaggctctgaacttctgggataagcacgggatccgtgccgcagctgatgcttttgacgtatcaacgcgaacactctactggtggcgccggttactgcgcaccggtggtccagaagcactaattccaagaagcaaagcccctctggttcgccgttcaaggcactggcatcctgatgtactcaaggagatcaggcgtctgagaactgagttacccaatctcggcaaagagcagatttttgtcaggctgaaaccatggtgtgaagcgcggcattttacctgtcccagcacgtcaaccattggaaggatcattgccggagctcatgataaaatgcggatgatccccgtacgcctcagtgccaggggcaaagcccggttgataaaaaaacgctcagtgaagcccagaagaccaaaacaataccgcccggtaaaaacaggcgaactcatagggatggacgcgattgaactcaggatgggggacctacgccgctatatcattaccatgatcgacgagcacagcgactatgcgctggccctggcggtcccttcactcaacagcgatattaccagccatttcttcagcaaggccacaaagctctttcctgtcgctatcagacaagttgtcactgacaacggtaaggagttcctcggtaactttgataaaacgctacaggaagcctcgattaaacacatctggacctatccgtacacaccgaaaatgaatgcgacctgtgagcgatttaaccggacacttagagaacaatttattgaattcaatgaattgttgctttttgaggacctgaatttgtttaatcaaagaatggctgaatatctggtgctgtataacagcaaaaggccacataaatcactcgaactgatgacgccagtggactatattttacgtgagagtaaaaattgcaatatgtggtggacccatacatctccttgccttacggcgggtaagagactaacctga

SEQ ID NO: 183790 - DNA, 483 bp, Klebsiella oxytoca
gtgggacgtttaacagcaccagaacctttgtccgcttttcatcaggtggctgagttcgtcagcggtgaggctgtgctcgatgactggttgaagcaaaagggcctcaaaaaccaggccctcggagctgccagaacatttgtggtgtgcaagaaagacacgaagcaagtagccggtttttactctctggccaccggcagcgtcaaccatacagaagcgacaggcaatcttcggcgtaacatgccagatcccatccctgtcattatacttgcccgtcttgctgtcgatctctcattccatggaaaagggcttggtgctgatttacttcatgatgcagtgcttcgttgctatcgggttgccgagaatattggcgtacgtgcaatcatggttcatgcacttaccgaagaagccaaaaatttctacattcaccatggtttcaaaccatcacaaactcagcagcgaacattgtttcttagactcccttaa

SEQ ID NO: 183791 - DNA, 267 bp, Klebsiella oxytoca
atgaaatcagatgttcaacttaaccttagagctaaggaatcgcagcgggcgctcattgatgcagctgcggaaatccttcacaagtcacgtacagatttcattctggaaatggcctgtcaggctgccgagaatgtgatccttgaccgccgtgtatttaactttaacgatgagcaatatgcggagttcatcgacatgcttgatgcacctgtcgtagatgatcccgttatcgaaaaactgctggcaaggaaacctcagtgggacgtttaa

SEQ ID NO: 183792 - DNA, 366 bp, Klebsiella oxytoca; identical to SEQ ID NO: 99303

SEQ ID NO: 183793 - DNA, 738 bp, Klebsiella oxytoca; identical to SEQ ID NO: 99302

SEQ ID NO: 183794 - DNA, 690 bp, Klebsiella oxytoca; identical to SEQ ID NO: 99301

SEQ ID NO: 183795 - DNA, 1380 bp, Klebsiella oxytoca; identical to SEQ ID NO: 126316

SEQ ID NO: 183796 - DNA, 978 bp, Klebsiella oxytoca; identical to SEQ ID NO: 99298

SEQ ID NO: 183797 - DNA, 726 bp, Klebsiella oxytoca
gtgaaatgcagaatcaaagagatctatgatgagaaccaaggccgctatggttatcggcggatagcactggcgctcagaagagagggaggagcgttaaaccacaaagtggttcagcgcctgatgaatgtacttcgtctcaaagccgcgataagagttaagcgctacagttcatggcggggtgagcatgggcgcgctgctgacaatatcctgcaacgaaacttcaaagccagccggcccaatgaaaaatgggtcaccgatgtcactgaattcgccgtcagtggccgcaaactctacctttcacccattattgatctcttcaataacgaagtgatttcctacagtatttcagaacgcccaaccatgccgatgatcgatgacatgctcattaaggcatttgccagacttgatgcgggtaccaatccggttcttcattcagatcagggctggcaataccgtcatcgatggtaccagtatcagttacgagagtttggcatcgtccaaagtatgtcccgcaaaggcaactgcctcgataatgcctgtgcagaatgctttttcgggacgttaaaatcagaatgtttttacacaagtaaatttaaggatattgatgaacttaagaaagctattgaggattacatacgatactacaatactcgacgaattagccttaaatttaacggactcagcccggttgaataccgtctaaagagctatccaggcagaaattga

SEQ ID NO: 183798 - DNA, 510 bp, Klebsiella oxytoca
atgtccagacgtaagtacacctttcaacagcgcctcgaagtggttatgcactatttcgctaccgatgaaggctatcgcttaacttcagctcgctttaacgttcccagaacccaggtaagaatatgggttgcagcctatgatgcttatggagaagaaggtctgaagcccagggataagggcgtatcaatcgatcccgatatcagagtcgaagccgttaaggctgtactgacggggcagatttcccagacgcaggctgctgcgaaatttaacgtcgcgggttcagcctctgttgggaagtggatgaaggtgttcagcgaacatggagaggaagggcttcgttctctccgtgtgggcaaaaaaagggcacttcatatgattgatgatcctgttgcgcttgaggtggcactggagcgttcgaaagataaacgtattcaggaacttgaacaaaaagtccgccgtctggaattgcggatactttatctaaaaaagttgaaagccttagttcggtaa

SEQ ID NO: 183799 - DNA, 798 bp, Klebsiella oxytoca
atgcaaaacaaaatcaaagaacttcgtactcaactatcaatcactcagcgtgaattggcagatatggttggtaccagccaacaacagatccaacgtgtagagacagggaaagttgcggccaagttaggactggcgcaggcgataagcgctgtcttaaagaaaccattgaatgcagtttttcctggtaacgatactttattgcaaacggtgcgcaatcaaagtagccgtagtgatgatgatctggaaagcatcgccactaatggtattgaaatggatggctgcatttggacggtgaaactctggttacgagggcagcaagattatttgctgttacctatttccccggctgataagcgtcgtttttactcatactttcaggaaagagcagtgcctggttatgagcatttctttgttttcgactctgaacagcatcgttatgccttaaatgcgcgagaggtgattttccaccaattcttgtttgaagcgtttccacctatcccagatgacgaggatgatgatgcaaatgaaggaagatatgggaatgtgcatatcaccatggtgaatggtggccctgttattgaactttgttgtgagccagatgagactgaggacgaaagtgatggcgatatcggtcagttgaatgcattttttgacattctggaattagagccggaatcaacagagcgatatcagttaaccgatatagatggagaagattcttttatccgtattggttctatcgcgatggtgcgagtcgcacttgacgcgcttgagcctgtagaagaagatgaggagtga

SEQ ID NO: 183800 - DNA, 156 bp, Klebsiella oxytoca
atgggttcgcttacgaaacaaaccatctgcgcacagatacctattgaattggctgctgctgttgagaatctggcaaatgagttggaccgttctaagagctggattattaaagaagcgttgaccaatatgctggctgaaagagaacggcgtcactag

SEQ ID NO: 183801 - DNA, 885 bp, Klebsiella oxytoca
atgcgcctgccattcccggcgggcgtgtttgctttttacggacaaaataccatgcaaacagaagctgaaattttaactgatcataatgagctaatttgctcgaccagtattgaacgcatcgtcacaggacgtaatgctgcgctgggtcagatagaaatgctgatccaaaaacttgatgagatctcccggctaacttccagcattggtggcaatgtggcaaatcactgggccatgcgtcaggggcattcatacgactgctggctggtgcagcctgtggacaaggcgatgccggtaattacccgtaatatcgaccgcagtatctggcgcgatctgatgctgaagtccgggatgttaaccctgatggatgccgaagcccgcagtcaatgggcgaaaaatctggaggagggcgatcttccggcaataaccgaagccaatatcctgactacctttaagcagttacatcacaataagcaggatgtttttgagcgtgggataattaatgtattcaagggattaagttgggattataaaaccaataatccctattatttcggcaagaagataatcgtcaacaatctggtgaagcatgacagatggggctacagcctgaactggggctggcggcgcgatcaactggccgatctggagcgaatgctctccctgctggatgggaaaacaattcccgataaccggcatgatgtctctatccgctttatggattttgtgcgcgacaatccccatcagcaggttttcgaagacgatttgttcaccattcgctactttcagaagggcagcgggcatatcacgtttaagcgtctggatctggtggagaagatgaatgacattgtggcgaagcactatcctgggatgttgcctgccaagtga

SEQ ID NO: 183802 - DNA, 342 bp, Klebsiella oxytoca
atgaaaaccttacctgcaacaactcagcgggcggctgagccgtgcctgtctcccgtgacgatctggcagatgctacttacccgtctgctggagcaacattatggccttaccctgaatgacacgcccttaagcgatgaaaccgttattcaggaacatatcaacgccggtattacgctggctgatgctgttaactttctggtggaaaagtacgaactggttcgtatcgatcgcagagggtttaactgtcaggagcagtccccttatctgggcgcagtggatattttgcgggcgcggcaggcaactggcctgttgcggcaaagccatcatccttcgatacgctga

SEQ ID NO: 183803 - DNA, 327 bp, Klebsiella oxytoca
atgccactgactagtgccatacagtggggattaaagcgaagtttcacaccgaattttggcgcaaggctggtacaggaaggcaaccgactgcactacctggctgaccgggccaatatcaccggtaaatttgttgctaccgaatgtcagaagctggaagaagcattcccgcattttatccgccagatggaactgatgctgagcactggcgaacttaatccccgtcatgcgcacagcgtcactctctaccacaacgctttcacctgtgaagccgatactctcggtagttgtggttatgtctacatcgccatttatcccactcaacgttaa

SEQ ID NO: 183804 - DNA, 477 bp, Klebsiella oxytoca
atgactttcaatttatcaccacagcaggaactaccgctgacaacccggcgtactgttcagcgtgcactctcgctgcttgaaaaccatctgcgcgagcctggcgcttcattcacgtccacaacggttgtccgggactggctacgcctgaaaatgaccgggctggagcgcgaaatgtttctggtgctgtatcttaaccagcaaaatcagctaattactcacgaaaccctgtttaccgggactatcaatagtacggaagtgcatcctcgcgaagtggtgaaatcagccctgcgccataatgcagccgccgtactttttgcccacaaccatccctctggtgaagctgagcccagccaggccgataggcgcattaccgccagactggtaaaggcgctgtctctggtagaaattcgggtgctggatcactgcatagtcggaggcatgacagtggtttcattggccgaacgtggctggttatga

SEQ ID NO: 183805 - DNA, 483 bp, Klebsiella oxytoca
atgactgacatgattcatcttaacggtaacaaccggtttcttccctctgccggtgatgactccataccggtattagctgccacgctcgtcccagacgaacaacgagtgggattctggccgcagtactttggcaacatcccacaatggatagtccttgagccgcatatcttcgcttggatggaccgcttctgcgcggactacagtgggggcatctggcagttttacacgttgagcaacggcggtgcctttatggccccggaagcgaatgaggataccgatgaaaaatggtcgatgttcaacccgatgaatggcaacggagcggagatgagcgcagaagcggcgggtatcgccgtctgtctgatggcttacagccatcatgcctgtcgcaccgaatgcgacgccatgacggagctctattaccgcctgcgggactacgcgttgaaccacgcggaatgctccgccatcatgcgcatcatcgactga

SEQ ID NO: 183806 - DNA, 123 bp, Klebsiella oxytoca
atgagaaatcatcaggttctctcgttgccgcaaggggcgttcacccgcgctcaggccaatgctattgctgcagcgtatatcaatgtcaccattgcggatgatcagggtaacctctgcgcctag

SEQ ID NO: 183807 - DNA, 672 bp, Klebsiella oxytoca
atggaaaataacgatgagattgacgttgagtatgacgatgtgatgcttgcagagaaacacaacccccgcagtattcaggcaatgatgggctggctctatgacaaagccgtcagcgggattgccgggatcgagtcggctgaaaccctggcagaacgctatctcacagatgcggagggggatgtgacaaaggccgctcacgtgatgatccgatgggagagcgttaaggcgggcagtaccggctttttatccggagtgggaggggtggtagcgatgcccgtcacgctgccgttgaatatcaccagcgtgctgtttctccagacccgactggtggcagccatcgcctgccttggcaaatgcaatctggctgacgaacgtatccgggcactcgccgggctgtgtctgtgcggtaacgctgccaaagcgctgttgcaggaagtggcgttacaggcgatggacaactggacccggcccttcacacggcagattgtggagaaagccctggtgctgatggctgcccgtgcaggtatgcgcaccggtggtcagtttattcgtctggtgccactggccggaggtgtggtcagtggagtagtggatgtcaccaccacccgcacgattggccgcattgcctgcaccacgtttctgccaccttatccggggcaacggaaatcatga

SEQ ID NO: 183808 - DNA, 1182 bp, Klebsiella oxytoca
atgaaaaaataccgtccacatcagaaaaccatgctggctgttgtgctcagcatggcggcgtttaatgcctctgccgcatggaccgtcaatggaaccttctgccagtcgtacagcgatgacggtatggttctgctacgggttaagccgtcaacgattggtattattgagaataagccgcagtgcggcggtcgtggcaccactgaacttgccggtagtcatttcaggattaataacacttcttatccatccagtgtgatgtgtaacagccagtcccaataccaggctgtgcagacaaccgtggcaacccgtgatattcagtcagttattcatttattgaaagaaaacaaaaaagtcagcatgagcacgtttggttcctcttttaccttcagtaccgctgattttgccagcgcgtgcggctcagtgattaatcagaaggtgaccgatttcgatcctcagtcagaatacaaacgagacatggggaagatgggttacaaacaggatgaaaacggccaatggcataaacaatccaggcaggcatattcacgcgaagctgacccggaaatagctgccagttacaatccaaaagcgggcgttgctgaaggttctggaaaaggtgggttccatggagacggagccagtaaaaatctttatggcccgggtagccaggcacaaaaagatgcagaagcggcaaacgaagcccgccgcctcgcggcacaaaatcgtgtgtcgaaaagtaccactggaataacagaaccagagaagcagacagctcagcagtttgtcgatttcccggtgaatgcgttctgcaccctggataatgggaaaaatgtgggagtctttgccgctgcagggcaggattatcgttacacctacacggataaaaacgataaaaccgagctggagttaactgaagggctgttcggcgtgaaggccttccattatcacgcaccgctgggcatggggtctgccagttacatccgctttaacaaaggtgtctatgactacattctgctgagtaaagacaccggtcatgaagagtttcagggtattcgggtgtacaaaaacggtgacctggtttcggctcatgagtgcaaaacccgtctgacgctcgatacccgccagcttcctcaggacggtcacgtcgacaacgaaaaaatgggtgaacacttcatcctgaactga

SEQ ID NO: 183809 - DNA, 168 bp, Klebsiella oxytoca
atgaaaagatgtgcaagatgtaacaaaagaaggggcgccatcagccgcctgcttgggcttgataaggaatactgcgacgagtgcttgtttgatactgagcaggaaatcagggaaaaacacattctccccgtcaggcgtcagaaagatgacagtgaagggaaagcgtag

SEQ ID NO: 183810 - DNA, 945 bp, Klebsiella oxytoca
atgcagcctaaaattgatgtcagtgtcattatcccggtattcaatgcgcaggccactatcggctatctggtacatgaactcatcagcgagcaaacactcaatattgaggtgattgttgtggatgatggctctaccgacgaaacatcgaccatactcagcgccatcaccgatgagcggctgattattgttcatcaggaaaatcagggcgtatatgctgcaagaaatgctgcactggcagtacaccggggtgaatgggtggtctttctggatgcggatgaccggattgaagaaggttttctctgggagcggctgaagagcgcacgagcggctcaggctgatgttgcccttttcaatggctggcgtaccaacaggagttgcctgcagcggcgaccggttcatcgtaagcagctctatgctcagctggtcagcgggcatgcgtggatacaatattgcgtggcacagaaagaatggccgcattacctgtggctgcagatgattcgctcatcttacatcaggaagaatgatctgcgctttcaggagggtaaaagccacaaggatatcctctggacgattcatcttgctgctgccaacggccgcttttatttcgccgaccgaaaggattatttctacatcacgaatccggcatcgattacccaccgacaggattattacgagatccgggcacgcagctacattgacgttatcagcgagattcttgctctctcatccctgccgcagctccatgaaatcagaacgcctctgagaaggcatgcgctggttgagtgtcgccattttctcgggctgtaccggcgtaaaattgccaaccgaaagtcggtccggatgctgttcaggcaacgaatcgcgttgcgtcagctgattgcaggggttagcagcctgagcgacttcttttttctgctgaaactcgtgagaaagatttatctgtag

SEQ ID NO: 183811 - DNA, 1257 bp, Klebsiella oxytoca
atgactaaatgcaggagagataattgcaataaccttgtttccagattcaggccagcacgacaggaaagattatgtgataaacattatctgatatttttatccggagccaaccgacgtgaaaggagagcaaatacccgatgtggatactcaccctgtcaaaacacattatcaggaacaaggaatgaaaagtattgcagtgcagtttgccgtcaacgtgattcaaggaagttcgataacttcaacgctgaaagtattctgagttcatcgtactggacacatatggaaaattcaatcaaacggaatctttatttgttagggtcagtttcgaatatgacagaaatagtgaattactatcatttatatttacgcaagtctcattaccaacgaagttatactcttccactcagtgaccttcaggagaaattaacacttgcaccgctgccttttctggatatcagccatttgtatccgaacgcaaaagggggtgcaaatactactgagaatatgattatagcaccttcatttattaatcgccggaataatgatgctatcccgtttcagggacagggtttcggggggattcagtcaacgggggagttgataccgtttaacggcagtctgtatgacagtttaattgaacggtttggttcagaggaagtgaatgcagcactaagagaaattacacctgctaaacgtttctatggtaatgctcccagaaagattgagtttggtggtattgagagacaacttcccttgttcactttgctttataaggaattgtggcgtcttgggcatcacagggtttcagaatgtttgatggaaataaaacaactgttccctgaataccctctctatctagagctactggcgattgtgggcttccatgcggtgttatccggtgaccccgatcgcatcatggcgctattatgccgtatttttagtcaatgctttaatatcaactcgtcattacgcgagccacacaagcagtttatcgacctgatgtaccgcttattgcgtaagtatctccgtcactacttcagtgttgaaatagacaacagagaggttgtggtggcgttctacaatgggttctactcacaggagataatcgcggctggtgatgccgaagatgaagttctgtgttatcgctatttcactggcataaaacgttctgccactacctttttctatgtaccacagaaggagaaggaacacgttgatttatggcgtcttataggggaagacctgacttttgagtaa

SEQ ID NO: 183812 - DNA, 1569 bp, Klebsiella oxytoca
atgtctttaaataaaaaaacagaaaaagaaaacaggacaaccttccctttgtactgtttacctgagcaattaaaagatacagttgagcgtgtaaatatgtttacaggaatgtcaatggaattgacggtaaacattatttttaccatgctttcgattatctgtcagtatcttgtcggtgttatatcgccttactcaggtatatcagggccatgctctttataccttcttacgcttgccgagtctggtgaaggtaagtcatttctgtcacgactgctaatgagacctgtttatagtcgatttgaggaaatgcaacttgaatacagagatcgatttgttctctataaaagggagcatctgatctggaaaaccgttttacaggggctaaatgctaatcagcggcaggctataaaaaagggatttggggtcgaggatgctcatgctcagttggaagagcattataaacgtgaacctaaacgtcctgttgagccaaagttcatctatcaggacgtgacatttaaagctcttatccagggcttaagcctgcatgctgaagctggcatcatcatggatgaagcgatctcttttttcagaagcgggttgaaaaatcacccaggcctgttgaataaaggctgggatggagggaaatattcatttgacagaacggatggtgagaactacgaactcccattatgtctgatgctttcactaatgattcagcctggcgtatttattaattatttagaaaaacatggagagatggctaaaagcagtggtttacttgcccgcttccttgttatgaaggtaaaaagctcaatagggcaacgtaatagccttattgatgaagaagggctgaatgcagtattagctccgttttatgaccacattcaggggctgttaagccttcttgaagcccggttttatgatgacagtataccgaaagatcaactgagactgtcagatgatgcaaaaatgtttcttcaggaaaaacagagagaaattgagcaggctattttaccaggcgggaagttttcacatatacgggattttgcgtcaaaagcaacagaacaggtattacgactgggggcaataatgactttttattcaaccaaaccaacaggaaacagttcagcagctgatcttctttatactaagattatcgacgcacgtcaggtaagcaatgcactgacaatagtagaatggtatttgcagcaggcaagcgatctgttttatccactatcagagcgataccagtttgaatgcgatgtccgaaacctctggaactttatacttaaaagactgaacaaaaatcagggtgtaccatttcctaagtctgagctgcttcagtctggtccgggccgtctcagacacacagataaattaacacccgcgttaaaccaactaatcaatcagaaactgtgttgcattatacgatacaacggttccagcatgttacacattgcaggttattatccaaacggttctgtatgtacaggtggtgttactcactcctacagcaccgtacaaacgcaaaacctgaaggatgaagatttctggcatgttgatttataa

SEQ ID NO: 183813 - DNA, 291 bp, Klebsiella oxytoca
atgacgaatctgctacaaacagaatccctggtttacgcaaaccggcataacaacgaacagaccgggcggccactcctaccagatgttgaaaaacgtacccgctttgcaatgggcgatgacatcctgctcagcatgaaagacatcaccgctcatagcggtcttagcgacaagcattactattcccttatttccagaggcctttttccccgcccgctgaaaataggccgctccagtcgctggaaaaagagtgactatgaagcatggttaaacgagcgcgctgctgccagataa

SEQ ID NO: 183814 - DNA, 855 bp, Klebsiella oxytoca
gtgggaagatccaggaaggcaaaactttttgtggatgagcatggcgatacaccggggaatcattactggcatcggtttatgtcactgtactatgtagaacatccatcaacattgggtaagtatgcttacagtagattcagttcccttgaaccgcttgagcaggtgtatataggcgaattaaaaaacgcttttgagatatggtttgatgtgcttcatgccaagcccccctcagaacctacaacctttcagaagatgttccttgatgaacctatgtcaagtttgatgataatagatgaaacgctggtgtacgatatcttcttccgttttatctatgaaagggatatcaagcgggaagagatctcagatcgtctggatgcacttcttgccgatgataaaataccgtatccctgtctttttgaagtttcatgctatttttacatcattgctacacgaatttttgccgacgaaaattttgataataaagaaattcagttttttagagcaatgtttgaggctatcaatagcttaaaagagttcacaagcaagcatgatgcgtatctgcaagagaaaaacaaggaactgcataaaaaaatatcaggtaaaggaggtgaaaacaaatggtcaaagatccgtgcagaagtcatccgattactgaaagaagaaattagctcaggccaatgtttaggacggtttaacagtaatgctgatttgactgaatacttacttcctatggtagaaaagtatattcgtatctgcgatataaaatcgcccgatgatttgttttatatgctcgaaagctggtcaacaagccctaaatcagatatctcggcactgtatgggctgttggtcatctaa

SEQ ID NO: 183815 - DNA, 810 bp, Klebsiella oxytoca
atgaaacttgccgattcagaattattcggaactgttatagtaccagaagattttagtgaaatactaaccctggctacttttgatattcataatgaacggaatatttacatgtggcgaggacaaggtgatattgcatggccaatacatagctcggcatacagacgcctcatgaaagatagagactatccattaggggagcatgtaatgcgagattatgagcgagagttattactaaatgctcagcatcaaggttatcatttcgaaaatggtagggaattaagtgattttgagttgctggcaaagcttcagcatcatggtgctgccaccagaatgatcgatgtatcaagaaatatcctggttgcattgtggtttgcatgtgattcaatgcgtgataaaacaggccttttatttggattgcattattcggcaatcaatggatttgaagggcgtcctgataaacgctcttataatcaggtgtttgatagaaagactgatatagcgacaaatgaagatgatttcgatgatactccaacattatggcagcctcctgttgtgacaaaaaggattgccgcccaaagtgcacaatttctttatagccgggtcagcaacgatagaacaggaagtctgagtttcagatgcggtgagaatatcgtgaacatgatcgcaataacaccagaaatgaaaactaaatgtttaaaaatattagagaacacttttgatatccggaggtttacattattccctgatattgacggcttttgtttttccaatagcacaaattttggatgtcacagtaatgaaagatggtga

SEQ ID NO: 183816 - DNA, 2130 bp, Klebsiella oxytoca
atgtccaggctgactgatttaatagctaaagcgaaggccaaagacccgcaactaggcgctgatcttgatcgagaaatcaagatcctgtcgtcacgtcttccctttggtcttaattttgaaagacatagccctgaagttgttgagttgccattgcgacctattcgtaaaggagacaaggttcgcgttttgccagagcgtgggtccactaagcaaggggatcaacggttgtggcaagttaaagccatccataaggcgaagaaggtagctgatctcgagttgctgggcgcggctgatattgagactcagactgtagcgctgaacgaccttgtagttattgctgaatttcgtgacacgatctggccgggtctggttagtacgggaaaagtgcaacgcagtggagacaaacctttccattcagtcatcaatggcgagaactaccatgtgttgaaggcgttgacctatacacatagaggaaaagtggacgccatctatattgacccaccgtataacacaggggcaaaggactggaagtacaacaacgactacgtcgaaggtgacgacatctatcgacacagcaaatggttggcgatgatggaacgtcgcttgctggtagcgaaggatttactaaatccaactgactcggtgctcattgtcactattgacgaaaaagaatatttgcgtctcggcttgttgttagaacagatattcccagaagctagaattcaaatggttagcagccaaatcaacccagcggttgttgcgaaagcgaatggtttcggtcgtgccgacgaatacctattcttcgttatgtttggttccgctggcccacaacgtgttgcgctggatagagaatgggtttctgcgaaaggacgaacacacacaggttctatacgttgggatttgttacgtcgttcgggtgaaaacgctgctcgccacgattctccaggctgcttctatccgatctatgtcagtccgtctggtccgagtgtgcattcagtaggtgaagccttgcctgatggagattcgagtccagaaaaaattcctggcactattgctgttcttccgatcagaaaagacggttcggaaggtcggtggcaatggacgccaagtacgtttcgtgagcggttgaaacaaggtcgagtgaaaatcaccggcaatgttaagaaaggatttgttgtcaacattttgaaagatggggagtttgcaaaagttactggtggtgaattcaaactcacgggttacgacaagaacggtgcattggaagtcgaatcgaaagagctgaatactgtgctggctattccggggactcaatggcgattgagttcacatgatgcaacacagtacggctcacggttgcttgcaaatattttggtgaatagaaaatttccattccccaaatcgctctatgccgtcgaagatgctcttcgcttttttgtcgctaacaagcccgaagcaatcattctcgatttcttcagcggttcaggaacaactgcccatgcggttatgcgtctgaacaaacaggatggcggtcgtcgtcaatgcatatccgtcactaacaacgaagtcgcagccagcgagcagaagcagttgcgcgagcagggcttacgtcctggagatcctgattgggaaaaatggggtatctgtgactacatcaccaagccgcgagtacaggctgccatcacaggtaagacacctgagggcgaaccgattaaaggcggctacaagtttaccaacgaattcccaatgtccgaaggattcgaggaaaacgctgaattctttaccctgacctacgaagctgagaagtcggttagccataacctggcctttgcgcgcattgcgccgttgctgtggttacgcgcgggtgcaaaaggcaaacgtattgacaaactgcctgctgaaggatgggccgtgactgatacctatggcctgctgtcggctgtggatcaggccacccccttcattgaagccattagccatgccagtgacgtgcgtgtggccttcatcgtcaccgacgatgatcgtcatttccagtctgtcaccaggcgtctgccaaaaggcgttgagccggtacgtttatacgaatcgtacctaaccaatttcagcttcaccagtggggaattaacagaatga

SEQ ID NO: 183817 - DNA, 2574 bp, Klebsiella oxytoca
atgaagttcactctcaaagactaccagcgtgatgctgtacgtgattcgctggtgaatctcagaaaagcgcgccgttactggcataacgaaaatgacaaaagcgccttctctttaacggctgtgacaggtgcgggtaagaccgtcatggctgcagctgcgtttgaagcattgtttcacggcgacgacgagtttaatttcgatgccgatcctggcgcggtagtaatctggttcagtgacgatcctgcactgaacgagcaaacccgctttcgcttgatggaagccagtgaccgtatcaactacaacgatatggttgtggttgaacatcctttcagtcggcgcaaatttcaggctggaaaaatctatttccttaacacgcagaagtttggcaaaaaaagcctgctggtacgcgggttcgatgataaaggcgggctcttcgaagcagctcctgatgcacaggcttatacgctatgggataccatccagaacaccattgaagacccggatctaaccctctatctggtgctcgacgaagcgcacagaggtatgggctcgtcaacggcttccagtgaagctgctaagagtactattgtgcaacgtctaatcaatggttcggctggagtgaaaggtattccagtagtgtggggtatttctgccacagttgaacgtttcgacaatgctattgccaatgccggtcatcatgtcaaactgccgaacgtggtggttgactcagctaaagtgcaggaatcgggacttatcaaggacgatatcattcttggtgtaccggatgaagccggagacttcgatactgtatgggtacgccgtgctgccgacagactcagggaagtgaccgatgcctgggcagagtatgcaaaacaacaggaaactgcgcgcgaagtagtgccgctgatggtattccaggtaccaaatacacctgacccgaacgaagtggggcgttggctggatacgctattctctcgctaccccgaattgcccattgacagtgttgctcatgttttcggtgaacataccacacagcgtttcggccaacaccaggtacattatattgaaccgcagcgggtgcaggaatcaacttgggtgcgagtactgattgctaaagatgcaatcagcactggctgggattgcccgcgtgccgaagtaatggtttccttccgcgctgccagcgacaaaacgcatattacgcaattactggggcgtatggtacgaactccactggccagacgtattccgggtaatgagcgcttaaactctgtcgaatgcctgttgcccaagtttaataccaatacagtgagagatgtcgtcaataccttgtttaagggcgatgatacatctcctccgagcggacgtatcttggttaaccctgtggagatgaaacctaacccggcggcttcagctgccgtatgggaagtatttgaagcgctaccttcacaaacccgaccacagaaaggagccagaccagccagacgtctgaccgcgctggcacaggaactggttgatgacggcattcttgatggggcagtcaggaaagcccatgctgctttgcacgctgtcctggaaaaattccaaacagaaaatgctgaaaaaatcaaaaacaagcgcaatgcagtgctcgtagtggatggtaaagctgtggttgccagcctgaagaataaagccatgaccttcaacgaattctgggaggaggcggacgtagcggtgattgatgacgcctaccggcgcgcagcccgaatcttcagcccagatgtttcacgtacctatgtcgaatatctggccgataaggtcgcggatcgagaagaggatgctgaggagtatttggaagcaatcatggaagctcgtgtgaccgttgctggtttggggctagtaatagaggtgcaggattacttcgatgccgaggctgataaactggcgaaggcgtggctggctgagtacgcgcagcagattaagaccttgaaagatgagcgtaaagaggcttatcgtcaaatcgccgaaatgagtaccgaaccgcaggacgtggatctggtcaggccggagaacaagtttgaaatgaccagggcgcgtgaaggtgagaaggaaactgaccttcctgtctggaaacaccatttgttgtgtgacgaaaacgggaactatccggctcagttgaaccattgggaaaccacggtttttgagatcgaaaccaaacgtgaaggatttgctttctggtatcgaaatccacaatacacagggcagtcgtcactaggaatcgcttatattgaagccgaacaatacaaaattgttcgtcccgatttcctattctttgccgaacaggatggcgaaacgattgtggacctggtagatccacatggcctgcatctggctgatgccttgcctaaactgaaaggactggcgctatatgccgaacaccatcctgatgcttataggcgaatcgaatccgtcgccgaagtaaaaggtaaattacgggtgttagatttgaaacagcaagatgtacgaaatgctatagctgtagctgaaaatgcagaatcattattcagcagcaattttgctggctattatcagtaa

SEQ ID NO: 183818 - DNA, 588 bp, Klebsiella oxytoca
atgccaccattcataatgaataagataaactcgcttaaaccttttgagggtgggagctgggatagaaaagatatagcgattattatttttaaacggttattaagaaagcagttattaacagcccagaatgattgttgtgcatactgtggtttaccattaggtgaaacagggaaaacagaaattgagcatttagttgcaaaaggtggacctaaaaggccaaagcatgtagagtttacttttgaagttgaaaatctttatttatcgtgcaatttatgtaatagtcctttgaaaaaaggcactaaagaaacacttatttataaagatcctatctcttattctaactgtacttttagtattgtacatcctagatatgacacacctggcatgcattattcatgggttgtaagcgctgtagaggttctcatacaaggaatttccgacaaaggtcgagagagtattaaaatgtttaaacttgactcaactcctcataatgaagcacgtgctagaatagaaatgtcaaggagatataaaatgctcattgaccctccgcaaattgcactgataaacgcaatactccaatataattga

SEQ ID NO: 183819 - DNA, 1443 bp, Klebsiella oxytoca
ttgtttacactattatcatttaacattacacacaaagagaatgaaatttatgactgcatatttacagataatcaaaggcacatccgaaatctcccgttgagtagtattgtcattggagaaaatggttctggtaaaagttatttgctatcacaggttgcagatttcttcagatttattcaaaggatcataagcaaagaaaagaaaccatattacaaatatgaatttgcatcagtgaaatatttgattgattcagatttaattgttataaaaaaggacaggaataaggttttttgttttgttaatgatgttccctctgatatatcccacgtaagattaccaactaaagtaatagctatgtcctttatggttaatgataagttttctttttcgaggttcgaagaagacgatttttatgattatcgtggagttagagcaacgtctaatgcttcttatactagtacaattaaaagaatgataaccaacgcattaatattgtcgataggttatagagataaactaaaggcgataaaagatactttgcattttttgggtatgagtgaaaaattagctattacttacaatctcaataggaaaactttattaaaaagacaaccgccacttaatgctatactaaggaaaatagatgcaattttgcgacgaaagcagtacgttaatgagaatgagttttacaaaataaaagataatcctgaagtcatacttcatgatatagctattttgagcgaggaatgcagggagaaaaatggtaggatacatctcactcttgaccttagtgatgaaggggagggaagtaaaacatcattattccagtctttatcacgcttggaaaagttagagtttatatctaaccctgacgtggaattctataaaaaagataatttttcatttgaagaaaccagttctggtgaaaagaatattatttttaccatccttaatttaattgcaagtatcaaaaagaattcattgattttaattgatgagccagagttaagtttgcatcccacctggcaaatgaaatacattaatttcataaagaaatcaatagcttataattttgattgtcatcttatatttgcatcgcattcacattttatggtgtcagatttagaatcaaaatcttcatcactaacatctataaatcaatgtaatgggaaaagaatatgtgaacatattgaatatagcacatatgcttggtctgtagagaacatactgtacaaggtttttcatttacgtacaattagaaatgctcaagttgaaatggatctttatgaattatcaggtctcatatctcaaaaaagctcagatattaagagagtggagaaaatacttacgcatttggaaaggatagtattagatgtaaatgatcccttaaatgtgattatagaacaggggcgaatctatattggtgacttccatgataaatag

SEQ ID NO: 183820 - DNA, 1869 bp, Klebsiella oxytoca
atggagacaccatccacgaacgaacctgtggtagaagagcttttcagttatcttgatctggagaatcccagaagttttctgctttttgccggtgcgggatctggaaaaacccgtacgttggtcagtgtgctggagaaaatgaaacaaaggtattcttcggaactgtctagatgcggaaaaagaataggcattattacgtttacaaatgcagcctgtgaggaagtacaaaggcggttattttttgatgccaatttcatggtttcaaccatacacagtttttgctgggacttgatcaacccatttacatcagatataaagttatggcttaaaaatgaactcgagaagagtattgaacaactcacccgcgacattgaaaaaagcagaaaacctgatggtattacggcgcaaagaaacagacggagtttagccagcaaaacgaaacggctgcaatacctcgataaaattcaaaaattcagctattcccctacaagcaacaggcctgaaaaaggggcgttaaatcatagtgaagtgatcaacgtcaccgcttatctcctccaaaatgaagctctgctcagagagattttatttagcagattcccagtacttttgattgatgaaagccaagacacgaataaatatcttatcgaatcgttaattatgacacagcaggagcatcccaccaaattctgcattggattgttcggcgatatgatgcagcagatattcagcgggggaaaatccgacttagcctctcctctcccccctggatgggagtcaccagagataataattaatcaccgttcaccagtgagaattgtcactttgattaactccatcaggcaattcaatgatgcatatattcaggagccgcgccctgacgcccagcctggaactgcgcgcttgtttgtggttgacatgaacacccacaaggaaagagctgatattgagcgtcaggtcgctgaatatatggctgaacaggcggctgatactgaatggaataacaaacaatcagtcatggtactgacgcttgaacaccatatggctgccagacgtggtgagttcgaaaacttctttctgccccttctagaggtcgaaagattgggtgatgcagcaatcaatggggatagccaagagataacattcttatcctcacaactatggccacttattgacgcaattcgcagtgatgatgattttaaaattgctacaatcatgcgtaagtactcccctgttttttcgagttcgcgcctcgaatatgcagacgatccactattgctcttccgtgaagcacaatgccaaatagacaagataaaagtgcttcttggcgagaacttggcgttccccattctagaagtgtgcaaactgattcatgaaggggaattgctgatcttgcctgaggctttccagcttcacctagcgctggtgccacataaggatgatgaatccacggaggaagtggacgtcaacaaagagcatgaagcatggagcagatctttgagcgcatccgtccgtgaactggaaaattatattagctatatctcatctacatcttcctacgatactcatcagggagtgaagggactgcagtttcctcgagtcatggctattctggatgatgaagaggcccgtggattcatgtttagttacgataagctactgggagtcataccgcactctaaaacggatcaggaaaacgaaagtgcggggggggactcttcgccaaaaagatcgcgccgccttttttatgttatctgcagcagggcacaggagagcctcgctgtcgttgcatacactaaagcgccctatttagttgaacggaccgtaattgagtcaggttggttcgtaaaggaagaaattatgcatatgtga

SEQ ID NO: 183821 - DNA, 2397 bp, Klebsiella oxytoca
atgaaaattgaatatattgatatccagaactacagaaagcttaaaacttgcagaattcgtctgactgacgaagaaacactgctcgttggggcaaataacagcggcaagacgtcagcaatggatgcgcttattttctttctggatcaacgaggaagaacggctgcgagcatcgcatcgggtaaatctccatcttcacgaaaattaggcgcagccgatttcaccctatcaaattggcatcagcttaatcaatttggtcaagcatgggcgaacgccgaagaggttggcgaaaaaatcagtgactggcagcccttatgcccaacgctggatgtctggttaaaagtcgagaaaaatgaagtccatcgggtacggcacctaataccgacattaaaatgggatggcggactgttaggcattcggatgatttatcaacccaaagatcttgatgccctaaaagcagattttattgcccacttcaaggccgctgagcagcttaaaatctcggcagaaaaaaatgccgaaaaagctcaaggtggttcagcatctgagctcagtgatttcaaattttcagtctggccgggatcgttgcgtgaataccttgaaagagaggtgtctaaagcttttgagataaaatcttacatcctagatcccgcaaaacttatcacggaccaaggaagcaaattcctccctcaggttcttgtcgaggggcaacttccgctagatttttatcctttcaatggactgttcaaagtagatatcattgatgctactcgtgggttttcagatccctatgtggcaaccggttctcagcatggtgcctctaatctggctagccagattaaccagtactacaatcggcatttaaaccctaccgatcttccttgtgacgaagatttggatgccctcgaagccatcgcctatgctcaacactcctttgatggaagacttaacaaggtgtttaacaaacccttgaaagagatagagacgctggggtatccggggttcagcgatccccatatcagattatctagcagggttaatccgatcgataatttggaccacgaagcggccattctttttgagatccagaaaactagccacgccgcaggggggccgctgatgagtctgtcagagaaatataacgggcttggctacaagaatctgatatccatggtttttacaatgatgagctttagggatcaatggatgcgcgtcggtaaagccggcctaagaaaaccagaggaagatgtctttgttgagcctcttcaccttattctgattgaagagccggaagctcacctgcacgcgcaggttcagcaggtgtttatcaaaaaagcttattcggtgctgcgcaatcatgatgatttgcggacttccaagaggttctcgagccaactggtggtcagcacacattcaagctaccttgcgcatgaagtgggctttgaaaagctcaggtacttcaaacgtaaacccgctacaggtccgcatgacgtgccgactgcggacgttattgatctgtcctgtacttttggcagcggtaaaatccgctcggatgatgtcttacaaacggctcagttcgtggctcgctatctcaaaaccacacactgcgatctcttttttgcgaacgggattattctagtcgagggggcggcagaacgtatcctgatgccgcattttatccgtaataatcccaacgctaatacaagcttggacaacagctacatttcgattctggaggtaggaggagcccatgctcaccggctgagggcattgattgacatacttgggattcccacccttgtcgtcactgatacggatgctcaaaagcctccactcaaactaccggcagatgttcaaaaagttagctcaggaaataaacccaaagctatcaggcctgaatttggcaaaggatacattactggcagccataccataaaaatttggctcgatgttgagggagcgctggatacggtccttagaatgccggagcatgagaaaattcgtggtaaggtcaggattgcatttcaatatggtattcccattaaatttggaaaagaggaggaggccgaggctttcccgtacacatttgaagatgctattgcattgacgaatcccgagttgttcaaaaaagtagaaaaacctaccgggatgatgaaaaaaatgcaggatgctcttaacctcgatacgcttgaacagtgctgtgaaaaactctatttggcactcaaagatgataaagccgagatggcactcgatttattgtactgtgctgaccccgccgaactcgccgcgcctaaatatattcaagaggggctggactggcttaaaaaagagctggaagtggcgagtagagaccttacgccggaagtgccgaaagtcactgacgtttgggagggggaataa

SEQ ID NO: 183822 - DNA, 210 bp, Klebsiella oxytoca
atggcgaaaacggccaatatcacgcaaaaaagagatatcttcacaggaaaatcggacttctttacctgtttatcacttactttcaaagcgaaacattttctcaccgaaaacgttgttattgctatcaccttgttgagcaaacagagatgttatcccggcgatgatatctgcaatgtcaaacacccgatgtacgggaggatttatgtctaa

SEQ ID NO: 183823 - DNA, 1575 bp, Klebsiella oxytoca
atgatgaaagcctatatgcttacgctctgcgcgctggctttgccagcatccgccgctgcggcggatacgaccctgaatgaaattaacgcccgactcgaaaggcttgaggccgaattaaaacagtcgcgcatccaattacaggatgcgacgcgaaaaatagacgctgcggaaaaaagagcggccagcgccgaaaaaaacgcggcgcgcgcgcaagaaagattacagtttgtcgaacagcaaaccgagcaagacctggcgcgaataaaaagcaaaccgtcgcagcctcttatcgcacaagagaaggatcgggagattaaattcggcggctacgcgcgcagcggaatattgaccagcaaaggcaccaccagcaccgtaggcccctctctgacgcctgcgggcagtaccggcggcagcgtcgggcgcctgggcaatgaatcagatacctacgtaaccgccgatatcaactaccggcgaaaatatgataataacagccagctgcgttattacatgaaaatcgccgagtgggataaaacgtataataccgacagttcattcaacggtcagatgaacgtacggcaggcgtttgtcgaaatgagcgatatgccttcgtttagcggcgcatttaaacaggccacgctgtgggccggcaagcgtgaagaccgggataactttgatattcactggcttgattccgatatgatgaatttaatcggtaccggcgccggtatttatgacgtgaacttgtggggcgatatcaaaaccaatctcgccgtatacgggcgtaatttcaacgatatcgatacgatggacaacgttgaatataacaacatgaccggcgcggataacacctatattcaaaactacaccttctcgctgaataaccggctggacagctggcagtggatgctcaacgggttatactcgcaggacaacgataaacgcattaacgatggcctggcgtcggataaagcggcctcgcaggggttcaacaccatgctggcgtaccatggcgacagcttctacggcctgcgtcccggcagtaccaaaacggccctgctttatggccgcgcgctgggagcggaggttcgcggcccgggctccgacggctatctgataaacccggcatggaccgtcaagtttgcctcttacgggacaacgtccctcaccgacaggctgagcttcgcgccgctgatcgtcgcccaaagcagcaatagccgctatatcgattcagaccattacgactgggtgaccctgaacgcgagaataattcagcagattaatcagaacttcgccctgcagtacgaaaccagctatcagtatatggatatcgatccgaaaggctttaatggcaacagagctgccagcggcagctattacaagctgacgtttgctcctactttcaagatgcagaacgtgacggacttctttgaacgcccggaaatccgcttttttgccacctggatgcgctgggacaaatcgctggatgactactcctcgacggacaccttcggcagcgccggataccatagcgcggggacgttattcttcggcgcccagctcgaaacctggttctga

SEQ ID NO: 183824 - DNA, 630 bp, Klebsiella oxytoca
atgtttttatccagcctgatggccattgccgccgtactcatcatgggcgtgatcagccccggcccaagctttatttacgtggcccgcaacgccgttgcgcgctcaaggatgcatggtctggtcaccgcgctgggaaccgggacgggggcggctatcttttcgattatggccatgatggggctgcaaaaagtgctgacggcagtgccggaaatgtttattggcctgaaggtcgcgggcggcctctatctgctctggctggggtataaaatctaccgcggcgcggcgcagccgatggattttgcggcaggcggcatggcggcggaacattccctgctgaaaaccttccgcgatggcctctatacccagctcagcaacccaaaaacggcgctggtgttcgcctctatttttaccgccctgctgccggagcgcatcccgctggccttttactatatcgtgccgctgatgagcttcctgattgacgtcagctggtattcgctggtagccctggtgctctcttccgcgcgtccgcgcagcgtctacctgcggatgaagcgtaagatcgatatcgtcaccgccacggtgctgggcgcgctcggcctgcgcctgattgccacttcgctgtcaaagtag

SEQ ID NO: 183825 - DNA, 516 bp, Klebsiella oxytoca
atgcatgactatggcatctggacgattattaccccgctggtcaccattattctggctatcctgactcgccaggtgatcctttccctgctcaccggcattttcgttggctacgcggtgattaaccacagtattatccagggcgttggcgctaccctgaacgggattatcgaaaccttcgcttccgccggtaatgcgcgaacgattgtttttatggtgatgatcggcggtattatgcggctgattgtggtgaccggcggcgtgcggaaactggtgcagtttctgtcggaaaaaaacgatttcgtcaccaataaaaaatcggtccagctgctggcgatgctggtgacatcgttgatttttatcgagagctcgataaaccagctgatcgccggggcatcgacgaaaaaccttgcccgacgctataaagtctcaccggaaaagatgtcctatattatccagacatcctgcgtctccgtctgctcatcggtgatgatcaacggggctttgttgaataaataa

SEQ ID NO: 183826 - DNA, 1188 bp, Klebsiella oxytoca
atgaaaaccaaaactaaagatattgcaaccctggcggtacacgctggaaaccaatccgatccggtaactaacgctatatttacgccgatcgtcacggccagctcatttattcaacctaacctttatgaaggcggcgatttttgttattcccgggtctctaatccaacgcgtcaggcttatgaatcggcgcttgccgagctggaaggcggcatttacgccaccgccaccgcatcgggaatggcggccaccaatatcgtgatggaactcttgcccaaagatgcccatattatcgccatgaaaggcgtctatggcggaacctggcggctgttcgaaaaattaaaaacgcataccaccggcgccacgatttcctatatcgatttgaataatgagcaaagcctgatggccgctattcaggaaaataccgctttaatctggattgaaacgccgaccaatcccttactggaactggtcgatatcgcgaaagtgtgccgtattgctaaagcacgcgccattactacctgcgtcgataatacctttgccagcgcctggaatcataagccgcttgaaatgggcgcggatatggtcatgctctctaccagtaaatatgtcggcggacattcagatttaattggcggcgcggtaatcaccaataatgaaacgctggcatcgaagctcgactttattaaaaccaccatcggttccattgcctcgccattcgatgcctatcttgccctgcgcggtatgaaaacgctggatctgcgcatggcgcgtcagtgcggcaatgcgctgcgggtggctgaatatctggaaaaccatccggcgattgccagcgtctattatcccggcctgccgtcgcacccgcagcatgcgctgtgcaaaaagcaaatgcgttcaggcggcgcggtggtaaccgcaacgctgaagggggatatccagagtctgaaacgcttcatcggcggtctgcactattttgtgctggcggaatcgcttggcggggtggagagcatgatcaaccattcggcttctatgtcccacgggtcgatgtcaaaagaagagcgggaggctattgggatttacgacacgacgctacgtttctccgtcggtattgaacatatcgatgatttgctgcaagaccttgacagcgccttcgccgcgatgggcatcgcacaggataatcatcatgcatga

SEQ ID NO: 183827 - DNA, 561 bp, Klebsiella oxytoca
atgaacgcaaaagagattgatggtgtatttcactgtgattgtggattttcctggtcgcgcggtaaaaacggtagccataactgcgccgatggtttgcgggaaaaggtacggcagctggctgcggagaatgtaacgatgctccgcctgctgaccgatatcagcgaaaaccacatggagtacttctctgagggtgaagacggcatgtttgcgggagtaccgctggattacgtatccgaaatcaacatgtacgtttcccgcgacgttaacgcggagaacccattcccagcgaccgacgcttatctggccgggattaaggctgatggggtggaatggacagaaggtaatgagcccagcgagtttggtcgatactgggttcggtatgaaaccgatactggcccacaatactgctcggcgaaatggatggagcacaacttctgcgcttccagcgataccaacatccataaaatctggctggcagaccattcgcgctcaatcagcagcctgaagggtgtaactcattacacaaagctccctgccgcgttagaaggaggtgcattgtga

SEQ ID NO: 183828 - DNA, 213 bp, Klebsiella oxytoca
gtgagcgcagaattaacttctttctctggcctcctaagcgacctgcgctggggcgttgataagcacgttttcaactacgaaaacgaacatgtttggatgggcccgtgcgaggtcggcggttttaccgactgctgctattacgggtacgaatgcgagcgccacaaaccaatgcgagaagcggaagacaagcagctgcgcgagggggccaaatga

SEQ ID NO: 183829 - DNA, 186 bp, Klebsiella oxytoca
atgagcatccaatacgcaacagttgttatgcaactcgaagatggtcgtattgttcagcgccctctcaaaatagaagagcgtcgtttcatcttggcgattctggaagaagacggaaaactggcggtatgcccgtgtgagggcgtcgcgttttctaagaagggaaagattcaggagcgtgcagcatga

SEQ ID NO: 183830 - DNA, 390 bp, Klebsiella oxytoca
atgactgatatcaccgaactgacaggcgtcaccaagcactcaaatcagcatcgtctctcaagactaatcatcgaagcacctaacgatgaattgcgccaattggctgttgaagttgagcaatacactgatcaactcattgaggcgctggagaaggcgcagcagcaaacgactgaaagcgaaaaccgcgttcgcaagcagaatcgccacatctgtgagctgttcgacgataacacagcactgtgccagcgcatcgccgagctggagtcccgcaccgtcaccgtgaagctgcctaatcaaactcagtttgatgatccgctatcagcgtatgaggctatcgagaagtgcaaagaggcgctgaccgatcagggtatcaagtgggaggctgagtag

SEQ ID NO: 183831 - DNA, 312 bp, Klebsiella oxytoca
atggctaaacgtatgcaagacaaagagagcattgccgggatgtcctggctggttctgctgatcatggcttgctggggtggacttgtccgctacctgatagatgtgaagcagagcaaggcaacatggagcttgatcaatgctcttgcccaaatggtggtttcagggtttaccggcgttattgctggtctggtgagcattgaaagcggattgagcatttacatgatactggccacttccggaattagcggggcaatgggttctgttgctttgacctatttctgggagcgcattaccggagttaaggcgccatga

SEQ ID NO: 183832 - DNA, 543 bp, Klebsiella oxytoca
atgacagcagatcagattatcgagggcatcctcggtaaagaagggggttacgtaaataacccgaatgataaaggcggcccaacgcgctggggtatcacgcagactaccgcccgcgcatatggctatagcggcgatatgaaggcgttaccacgggatacagccaaagcaatttatctgtcgcaatactggacagaaccgaagtttgactgcatcgccgagttgtcgccagccattgcacaggaattgtgtgatactggcgtgaacatggggccacgtgtcgccagtacattcctgcagcgctggttaacggcgttgaatatgcagggcaagctatatccggatctgaagacggacggcgcgatcggcaatctcaccatcgccgccctgaaaagctatctggccgttcgcggcaaagatggcgaaaccacgctgctgaaggggctgaattgtagccagggcgctcgctatcttgagttggccgaagcgaggccagctaacgaagcgtttctatacggctgggttaaagagcgggtgagcctatga

SEQ ID NO: 183833 - DNA, 339 bp, Klebsiella oxytoca
atgattattttttccctgctggcgctggtggccgtgctcgttctgttgctattgcgcaaatatacccggctggagtttgttggtcatgcccggttactgcttaaagcatggtctgtccgcttaggcgctgccggcgcgttggtcggtgtatgggcccaatcatttccggacgcagctcttcatgcctgggcgatgctgccgccggatatcaaagatattctgcctgcaaacattgtggcaatgattagcccggccctggtggtgctcgccatcctctctcaatacgtcagacagccaaagctgaaagaaatagccgatgagcagcaggaggcgcaatga

SEQ ID NO: 183834 - DNA, 276 bp, Klebsiella oxytoca
atgagccttgaatttataagcgggttggtagtcgttctgcttggattaatcgtaggcgcatttggcattggtcatgctcgcggaaccagcaaggcggaatccaaagccgaacagcagcgcaccgaagagaacgcggccgccagcgtcgccgcggcggaacgtaaagcagaagccacgaaaggggccagcgatgtacagcagactgttaatcacatgcctgatgacgatgttgatcgggagttgcgcgagcaattcacccgccccggtggtggttga

SEQ ID NO: 183835 - DNA, 150 bp, Klebsiella oxytoca; identical to SEQ ID NO: 180134

SEQ ID NO: 183836 - DNA, 294 bp, Klebsiella oxytoca; identical to SEQ ID NO: 180136

SEQ ID NO: 183837 - DNA, 186 bp, Klebsiella oxytoca
atgagctttaaacatgaacttggtcaggtggtaaccgttactatcagtgaagaagaagggcatatcaaagctcgcgcagaatatacacatggccccaatcagtaccttattcattatcgtgcagcagacgggcgagctgtagacgcatggtttgaagaaggggagctgtctccatctgcactgtag

SEQ ID NO: 183838 - DNA, 2016 bp, Klebsiella oxytoca
gtgccgaagtcaaagaaccagacgctccgtcgcccgaaagccagcgcaagaagtaattcgtggtttcgtatgcaggccagcgccgacaatcaggctgaaatattcatttacgacgaaattggttactggggggtgacagcccgacagtttgttaacgacctgaaggcgctgggcgatgtgactcatatcaaccttcatatcaactctcccggtggcgacgtctttgatggtatcgccatttttaatgctcttaaacatcatggtgcgtcaatcaccgttcacatcgacggtctggccgcatctatggcctcggtcattgccatggtgggtaacccggtcatcatgccggaaaataccatgatgatgatccataagccttggggctttgctggtggtgatgccaacgatatgcgtgactacgcagaacttctggacaaggttgagtccgttcttatccccgcttatgcagagaaaaccggaaaatcttcgaatgaaatagcggcaatgctggaagacgaaacctggatggacggcaaagaatgcgtcgcgatgggttttgccgaccagaccaccccttctcttcaggcgatggcctgtatccagtctaaacgtattgaggacttcgaaaagatgccaaaaagtatacgcaacatgttaacgccgccacgagcaaccactcagcgcgatccgcagcaacctcaggggcagcagccgacggtcactcaaccttccggggccgacgaaaataccatccgcgcccaggttatcgcagagcaaaaagagcgcgttaatggtattaacaacctcttcgcgatgtttggtggtaagcattccgaacttcaggcgcagtgtgtagccgatattgattgctctgtcgatctggcaaaagacaaactgctggcgctgctggggaaagatgcttctccatcggcgaaaaccacgccagcgcacacccacgcaggtaacggtaattttgtcgccgatggtattcgccaggcattgatggcgcgcgcaggatttgaagatcaggaacgtgataatgtctacaacgggatgaccctgcgtgaatatgctcgtatggcgctgactgagcgcggtattggcgtatccagctataacccgatgcaaatggtagggctggcgctgacgcacagcacctctgattttggcaatatcctgcttgatgtcgccaataaagcaattctgcaaggctgggatgaagcggcagaaacctttgaacagtggacgaagaaaggccagctttccgactttaaaacagcgcatcgtgtgggtatggggggattcccttctctgcgacaggttcgtgaaggcgctgagtataagtatgtgactaccagcgataaaggtgaaaccatcgcgctcgccacctacggggaaattttctctatcactcgccaggctatcattaacgatgatctaaaccagctcaccgacgttccgatgaaaatgggccgggccgccaaggcgactatcggcgacctggtttacgctgttctgactaaaaacccgaaactctccgatggtaaggcgttattccatgccgatcaccgcaacctttcctccggtgcgatttctgtcggcagcctggatgatgcgcgtaagctgatgcgcctgcagaaagaaggtgagcgatctctgaacatccgaccggcatttatgctggtgccggttgtactggagacgctggccaaccagacgatcaagtcagcgagcgtcaaaggggcggatatcaatgccggaattatcaacccgatccagaattttgcagatgtgattgctgaagcccgtctggatgatgctgatgctaaagcctggtatctgatggcagccaaagggacggacactatcgaagtggcgtacctgaacggcgttgatacaccttatattgatcagcaggaagggtttaccaccgacggcattgccaccaaagttcgtattgatgctggagtggctccacttgactatcgcggtctggttaaatccagtggtcaatag

SEQ ID NO: 183839 - DNA, 327 bp, Klebsiella oxytoca
atggctaagaattacattcaggcaggcgcaactatcccgctcaaaaacgccgggagtgaagatattctcagcggtgatccggttgttgtcggcggcatgattgctgtagcgattaccgatatcgcggcgggcagtgtgggggatggttttgccgaaggggtattcctgttacccaagttgtctgctgatgccgtgactgcgggggcgaaagtttatcttaaagccggaaacgttcaattggatgaaaccgatgcggtactggccggggttgcttgggaggacgccgctgcaggcgtaaccgttctggaagtcaagattaatggctaa

SEQ ID NO: 183840 - DNA, 294 bp, Klebsiella oxytoca
atggctaatgcttttgacaacctggctgccagaatggatacgttaacggcgaaccggctggggaggccggtcactatcaatggtgatgattatattgccgttgaaagtcatttgttgctggaaatgggccaagttgcaggggatggcattagtttggtcatctttactgttgattatcagccagcacgtggagacatggttacctataacgggcaggcttataccgtgactcgttggttacccttcaacagcaaaccacaaatctggattgaggaggacataggtgacgattaa

SEQ ID NO: 183841 - DNA, 396 bp, Klebsiella oxytoca
atgacttatcttaagaaagatatattaaacccagatggtgagaatattcatctttttgaattgtctgccttcagtcgtatgacatatattgagttcatggttgaagagcgaaaatcattaccgactgatgggcttccacctgatgaaaattttaaaattgcgaccttattgactatgcgcgatcaggccatgcttgttgctttatccttgagtgaggcagatgacgagcagcgcgaggggaaagatatctttccggaaattatgcgtaaatatcctccaggattactgggtagcgcggccttaatggtccgtatgctttcagggatggtccctcctgtcattaatgaaaccgaagagactatagaagaggatgcaccggatctggaaaagtcctga

SEQ ID NO: 183842 - DNA, 483 bp, Klebsiella oxytoca
atgacaatactcaaccgcctctatgccagcagcgggccggaggtcatcattgaaacgctgcagattaatatcggtgatgcggttcattacctgtgcaaaggctatgaagacattacagccaccaccgagaatggcgataccgtaacgtttattgcctgtgcgatggatattgcattaccagcccgtaacgctgatggcacacaggatttgaagtttgccctttgcaatattgatggggttgtttcgactgctattcgtaacgctatcaatgaccgtaatccggcatcgctgacgtatcgtagttttatctcaacggatttaacggcacctgctgctgtgccctataccctggcgattaagtccggatactggacggctaccgaggtgcagattaccgctggttacatgaatgttctggatacagcctggccgcgatatcgctatacgctcccatcattccccggtctgcgttacatcagctaa

SEQ ID NO: 183843 - DNA, 381 bp, Klebsiella oxytoca
atgtttaaccctgataaatacctttcagtcacctggctgaagggcggtcgcacgtacccagaacttgactgcttcggcattgtgaacgaaatccgggcggaccttggactgcctctctggcctgagttcgccggggtaaccaaagacgacggcgggctcgaccgtgaagcgcgacggatgatgctttctctggagcgctgcgaaccgtgcgaaggcgccggtgtggcctgctattccggttcaacagttacccatgtcggtatcgtcgtcaatatcggtggcctgctgcacgtggcggaatgtaatccgggaacgaacgtaacgtttctgccgttgccgcgatttaagcggcgatttgtcaaagtggagttctggcaatga

SEQ ID NO: 183844 - DNA, 3069 bp, Klebsiella oxytoca
atgaccattcgattttacccgtcgcggctgcccggtgaaccactcgaaacgcatgaacatggcgttaccaacattcgcagctggctggttgccaatgtcgaagactatgaggatcgggaggttccaccgctggccattgagctggagggccagccggtaccacctggcgaatgggcgcttcgcatcatccgaccggagagcgacgttcgcatatatccggtgcctttcgggcttgaagtagcaacgatcgcatggataggggttggtatcgccgtggcaacggcggcctactcactgttcatgatgggtaatattgatgctggtggctacacgtcatccaccggacgcagcctcgacctgaaccccgcgaaagcaaacagcgcgaaactgggtgatgcgattcgtgaagtgtttgggcgcgtgcgtatttatcctgattatgttgtgcagcccgttacccggttcgatgctgccgatcccacgaaaatgcgggtgcagatgctgctgtgccttggtgtcggagctctggattataccaatggcgatatccgggttggcagtacgcctgcatctaccctgccgggattcagcagcacgcattatccccctggtgcggacgtttccggcgatgagcgcagtgaaaactggttcaactctaccgaggtgggcgggacgtcatccggtaccggtcttgatatggcccagacgtcgccggacgcggacgacatcatcgcagacagcatgaccgtggccggagcagacgtaacgtttaccgggctggacacggatgatggcgatgatgacgacgagaacgacaattctctgccggatagctgggtagaaggcgcgattgttgagataaaggctcccgccaactaccagatatcaacggcggccgggtacagcgttatcgcgagtccgctgctgacggagatcgcgccggtggttggtatgccggtgacgctggggtttaactcagtcgattacgatttgtttatcgcgtcatatacccctggccaggctgcggtgccgggcaccgggggaagtgcggtaaaagttcaggccagcgcagcacctaccacctacgacttttcgaccagctccagcacgttcacgatcacgtggcaggggatcgtttacgcggtgtcgctggtggcgaactatgtgtcgatgtctggacttctggcggccatcaccgaggggctcactggctccggcctggtcgcgcaggataacggcggcactgtagtgataaccgaggcggacagcccgttcgcgggaggggcgctcacatcctcttcgctgcctgctgccgttttcggtgatgcccctgtttacaccgccggcacggcatcaaccggcggcagcccggcggtaacggagaatgtgacgcttgcctataacagcgccacgggaacggccttttccggcatgccggatggtatgcagcggctttcacttgctcaccgcgggaatgagtacaggattgtgtccgctgacggcacgacggcgacggtggcgcgtctggttaacggtgcagttgatgagtcatggccgggattcaccgccaggacgatgatcgactacgaggcaaccggactcaacgacacgctgagctggctgggtccataccttttctgccctgaaaatgaaaccgtagatatgttcgaggtgaatttttccttcccgaacggcatctgtggcttcgacagtaaggggaaaaagcggctccggcatgttgagtgggagattcagtatcgcgtctacggttccggatcggggtgggtgagtcaccagggagagtacgcgctcaaaaacatcaacgggttaggtttcactgagcggatcaccctcagttctccggggcttgtagaggttcgctgtcgacgtcgcaacgagcagggctccaataatgccagggattcgatgtactggcaggcactgcgcggacgactgctgacgcgtccttcatcctatcccggtgtgtcgctgatggcggtgaccgtcgagacgggcggtaaactggcggcgcagtctgaccgccgcgtaaacgttgtggggacgcgtgcctatgaaaccggaacggccagaaccatttcgggggcgctgctgcatgtcgggaactcgctgggactggagatggatgtcgataccattaacggcattgagtccgcgtactggacgccgcggggagagtattttgatttcgctaccggcgacagtatctcggcactggaaatgctgcaaaagatcgccaacgccgggaagtcacgttttctgctgagtgatggcctggcgacagtaaaccgggaagggattaagccctggacaggtgtcatcaccccgcatgagatggtggaagagctgcagagtggtttcactgtgccatctgacgatgattacgacggcgttgacgtgacgtacattaacgggaccacctgggcggaagagacggttaaatgccgcactcccgataacccaacaccggtgaaaatcgaggattacaaactcgacggggtattgagtcaggatcatgcctaccagattgggatgcggcgcctgatgaaatacctgcagcagcgggtaacgttccagacgacgaccgaactggacgcactctgctacaacgttggcgatcgtattgtgctgaccgacgatataccggggaataacacgatttcctgtcttgttgaggagatgacaacggctggcggtgtaacgaccttcaccgttacggagccgctggactggtcttttgaaaatcctcgcgcgctgattcgttaccaggatggctcggcctccggtctgatggtggcgaccagagcaggggattatcaactttcagtcccgcatctgagtgagtttgatgaccaactgaaaatcaatttatcgtctgcaaccatcgagccgatacggctggtgttctgcggctcgacacggcatgtctatgatgcgctggtggcagaaattgctccacagtctgacggcacctgccaggtgaccgctaacgaatatcttgaatcgttctacgcctacgacgacgccacataccccggcgacgtcgtttaa

SEQ ID NO: 183845 - DNA, 2604 bp, Klebsiella oxytoca
atggcctttaacccggagctggggagctcgtctcccgctgtgttgctcgataacgccgagcgcctggataagctggtcaatggccccgctgcagatgttcccgaccgtggtggtgaccctctttattcatggcgccagatgatggcgaaaaacgatgaaattcgtcaaagcctggtacctctcagcaggcagtatatgacgctggctgatgcacaggccgatatcgcgaatattccagaaggcagcagcacctatgtgcgtagcccggacggcagcgcgctggctgacgagtacatcaacaacggtggcacgctggagacaacggggcgggtgatgccgtccggttacgcagtggaacaaatatctgataccgttcagcgtctaatgacagcgctacacgtcatggcggagggcggcacaagctctggttcagatgttgataccagcgaaacagtgcagaatctgatgaccggatttaacgtgctggctgagtcaattaataatctgtcagtgggaaaccagcaaaatgccagcggattatccaggctggtctcatcagtccagatttgcactgaaatgctgaacacgctggcgtctgagatcgtaactcctgacggtgagtcgcggtatggatatgcggcattttcagttcccggcacagtcagcgcatccaatggatcatttggcaccgatacacgctaccgcaggactggtctgatcccggttcgcaagggtgacgttgtgcgcctcactgtttacaccacatcggcaaccgcaggccacgcagctgctctttacgattcatcaggagcgtatgtgggcccgctggggattatgtgcgcgtcgtatgcagcttaccaggcacgttattaccaatgcgaaatagcccaggatgggtttgttgtagcaaatacattagaccagagtgcatcttcttctgttgatgtcactggtgcggccctgacgattgaccatcgtcttcgtggccgggcagcagatgcagtcatcaaaatcaacaaacaggacttaattcctgtccgcctggataatggaagcattagcgccagctcaattacgcaggatggaatcgttaattattccaccgggctgtattcctgcaccggcggcagactcctgttcagtggtttgcctgtagcctcatcgccggggcagagcagcagcctgtataacgttgtgttctatgatgctgccaaagcccttattgcatatcgtcccgttttctccagctctggctacgttattattcctgaaaatgctgcgtactgggcgcagcagataatcaccgacagaacgccggactggtctgctgtctcgattgtttatcacaactatgtttacaaggacgagctgtataaattgctgtcgtcagagcgcgagcgcctcggactggactatcccaacgaatattatttacaggatttcagcggcgataccgatattgagtggattcagaacgcaatggactgggtacacgatgctggtggcggctggctgataatttcatctgactatgttaaacagcagttcatcatctccgaagcggttattcaccgcagcaatgtctgggtcattctcgacaatgttgagattaaattgcaggacggcgtgcacgacaatctgtttcgcgctgccggtgttattgtcaatccggatgatccgtttggcctgtgcctcgacctggaaataacggaaaatgtccgcctgattggcacgggttaccctaaactcagcggcgctgatgtggcgtactatgctgatattcctgctggggcgggtccacgctactggattggcgacgaatatggctggcgcggtacggggctgatttattacggtacgcagaattttgaaatcggcggctttaaactccagaacgttaagaattgggggactgatttcggttatggcgccaagaatgggtacatccatgatatagacctttggcaaccgaacaagaatggagacggaattcatttcaccaacggtgccagccatatgcgggtacgccaaattttcggctatgcgcgcgacgactgtttagcgatggtcaacagcgatgattctctgaaatacagtaccgccaatatcccgactaccggctctatccgtcagtggatttacccaacctgcccgttctggtacgggtgggctgggaatgaggctgtgggaaccagcaacgatattcacgatatcactgccacaaatattggtcttactggtaacgagcaggtcagcaccattctgaccacgcagtttaaaatctacaacgtgacaatcagtggtatcagcagcgtcaactatatgactccaggccgtggctgggatgaagttaatgcaatcctgaaatcgtatgccgggtttggtgatgcttcccgctatcaggcaggtaatgtcagcaatatcagtattaataacatcattgagtgcgcatcaaaaaattacagtatcgatataacactggcagggaggaatatccgcgtcaatcgttatatgaaactggatacccgtgcgaaaacaaaaggtgcgttgaacatcagcagctcagcggccccgtacgtcacaacctctaatattgtggaataa

SEQ ID NO: 183846 - DNA, 393 bp, Klebsiella oxytoca
atgcaatcccggatgacaaaggacattgtcctgaacgcactgctgatggctgtatggcggcgtaatccccaaaaacaggtgctggttcactcggaccagggcagtcagtacacaagccatgagtggcagtcgttcctgaaagcacacggcctggaggggagcatgagccgtcgcggtaactgtcacgataatgcggttgcagaaagctttttccagttgctgaaacgcgaacggataaagaaaaagatctacggaacgcgggaagaagcccgcagcgatatttttgattacatcgaaatgttttataacagtaagcgtcggcatggttcgagcaatcagatgtcaccgacagaatatgaaaagcagtattatcaacggctcggaagtgtctag

SEQ ID NO: 183847 - DNA, 1116 bp, Klebsiella oxytoca
atggcattttatcaaagaggcaacatttggtacgttgactataaaaattacgaaggtaagagagtccgcaaatctatggggacaaccgataaaaaacttgcttcagagttgtatgacaaagttaagtacgaatcatggtgctcatcaaggcttggatacataccacgtgtaacttttgaaaaggcatgcatacgctggctgaaagagaaatcgggtaaaaaaacgttatgtgatgacaaaaaaagaattatgttctggcaggcattctttgggacaagataccttgatgaaataacagtggatatgatttaccaagctgttaactcaatgattaatcagaagtatgaacagaactggagagccaagtatctggcttgtaatgcctcagcactggccccatcaaagtatgttccaaaagccgtctcgatggcgacaaagaacactcaccttgcatttatgaaggctctacttcgcaaatcatggcttgaatggagatggctcgaaaaaatgccttacattcgtctttatcctgtcaagaatactcgcgtacgttggttgaaaccttacgaagccaaaaaacttataaatgcttgtagtgaaccattaaaatcagttgttgaatttgctcttgcaacagggcttagacgttcaaatatcattaatcttcagtggcagcaggttgacatttctcgtcgggtcgcatggattccatctgaagagtctaagtctggtcaagcaattggcgtggctttgaatcaaagtgcttgcgatatccttgaaaggcaggcgggaaaacattcccagtgggtgttcgttcacaccacggcaaaacatcgaccggatggaacgctgacgcccgcagttagaaaaatgcgggtggatgacaataacgcctggcgcgccgcgcttaaaaaagcgggcatcgaggatttccgttttcacgacctccggcacacttgggcaagctggcttgtgcaagctggcgttccactttctgccttgcaggaaatgggaggatgggaaagcattgagatggttaaaaagtacgctcatttgtctccaacgcatttgctgatctatgctcagaaactggatagtattttacgtgaaggttga

SEQ ID NO: 183848 - DNA, 294 bp, Klebsiella oxytoca
atgggcatatatctcatcgagatagaggtaccgactaagtcggttttacatacgggacagcccttcatgtactctagatatggctctaaaggtgatattttcccacctctagccaacaacaggataaccgttggttaccctgttctcctggaaggttccctcttacatccgggattttcccgcatgtacgggccaggcaaatttaatacggccgatcgtccctatagtatgcagcgccaaccacgacgcacgtttaccaatcagcgcaatccaaatccgtatcaaacagtataa

SEQ ID NO: 183849 - DNA, 963 bp, Klebsiella oxytoca
atggctgatccggttaaagttcataaagaatatgacgaacttatcgatctgttactttcgcgtggcatggatgtgccagaccgggatcatgcaataaagaaaatctctcaagtaggttactacagactctccggattttggtatccgtgccgaatccctcacataactcccgagaacatcaggacgcgtttagatcaagtacgcccaggtacgaactttcgggcagtatacgacctatacttattcgataaaaaaatgcgtttattgatgatgaatgccttggaacgaatagaggtttatgtccgttctgttattgcgcatgaaattggtaaaatttcacctctcgcatatcttgatgactctttaataaatcctaagcatctaagaggtcgtcctcgtgggcggtgtagcgcgagggaggagtggcttagcaagcacacaaatgaaatatccaaaagtcgagaggactttataaagtggcatgagggtaagtatgagggactcccattctgggttgttatcgaggtgtgggatttcggtctgatgtcgaagtattatgcgatgttaaaagacgggcatcgtaacgggattctatctaggctgggtattgctgcgggtaatggggctattttccagaactggctcagcgccatgaatgtaatgagaaatcgttgcgctcaccactcacgtatctggaacaaggttaatgagccgaagttgatgcccctgccaaatcatccatattttgaacgcctgaatatgaatgatgatgcctatgaaagaatgtacggcatgatagcagtgctatggtttttggtgaaaaagattggcccgggctcaaactggattaggcatgtcgctgaattagtagacaacaagccatatcttcccggttgtaacttaactgcgatgggacttcctgataacacaggatttccaagagctctattcggtatcgaatag

SEQ ID NO: 183850 - DNA, 186 bp, Klebsiella oxytoca
atgcctttgctaggccgtgagataacagagctaacaatacccaggctgaacggtgaagtacttgataaccatacccactacaccattcacaatgggccggcacagtcactacagaccaaagagcgccaccgccgcaggatggtagcactagcctaccagtggaagaaagcgaagtatgatagataa

SEQ ID NO: 183851 - DNA, 2712 bp, Klebsiella oxytoca
atgacaactgattttggcaaatacaccattgagattgaagccgatgcggccaaactgctggctggtcaggcgagcgcagatacagctttaaagcaaattgaaaactcagtcaaaaagacagctaactctgctgacaagctagataaaagcctggataacttgggcggagggttttcgcgccttgctgtggccgtgaaaggatacatatcaattcaggcgttgataaagctccagcagctttctgaggaattcacgctacttcaggcgcgagtaacgcgtttatcctctagttcagaggaaggggcgcggagctttcagcagcttgtgagtattgcttcgacaaccggggccagccttggggataccgtcaacctctggcagcaactcaccgccacactgaaaaccgtaggtgctactaacagcgatgttaaccggctcgtgatgacgctgcaaaagattggcactatcggtggctcatcggctcaggaaatggctaacgctctcaggcaatttatgcaatcggtagcgtcaggaagaattcaggcggaagagtttaactcggtactggaacaaatgcctgagttggctcgacagattgccgacggcatgggaattccgtttaacgagcttcgacaattgatgctggccggcaagttagatattggtgaagttcttgcggcaattgaaaagcgttctgacgagatcaaccagcagtttgagaagatgcctcgcaccgttacacaggctactaatgccctggttactcaatttggcgtagcagtgtcaaaaatagatgatgctattggggcttctcgctatttggcgaagttattggacggagccgcgctcagtatcagtgtcgcaaccggaagcgctccagatgctgtgatgctgactcaaaagcttgagcaaaatactgagcaactagctgtcgctgagtctgatttagctaaggcgagaaaggcgggcttgggctggggagtaaaacaaactgagcaaacggttaagaggcttaaggcggagcgtgccttgatcctaatggctcagcaggcaagtaaagactcacaaagtgtatacacgccgtctaaaggggaaaagccagcctatatcaccaatctcgaaaagaaaacggcagagaataacgcgaactccattatcaaatcaggtcaaacagtagttgataagctcacccagcagcgtgaacagctaagcaaagacaagtccaaagggctaattgatgataagaaatatgctgatgctgctgctgttctagataagcaaattgcggacgccagaaaaaaacaggataaaaccccgaagaatgcctttgctcgcggcgacgattcaatcgacaacctgcagcggcagattgccgttttgacaatgcgctatgacgagaacaccagagaggccgcacagtttaatgccgtggccgctctcggagctaaggctaccgatgcacagaaggaaagagtgcgtgagttggccgggcagttatttgacgctcagcagcgacagaaagaccttaatgatgcgatcagcaatgacccgctcaggaaggaaaataaagcctattctgacggcagagatcaacttaaacgccagctcgatggccagatgattgatcagaagacctataaccagcaatcggagttgatggaacagcagcatcaggtcaacctagccaaaattcgtgcgcagcaggtcgttacgccacagcaacaggcagccggcgaggtagatccagtacagcgcctcgctaaccagcatgctcaggaacttgcgcttattcagcagtttgaacagcaaaagacaatcactgaacaggaagctttagctctcaggaacgctgcaaacaatacctatgaaaaacagcgaattgaggctcaatgggagatattccgcaaccaaagcacaactaacgaacttatggcggcggcagttgatggttttgccagccaggccgccagttcgatgacgggattaatcaacggtacgcaaagcgccacagaggctttcaagaatctggggaacgccattcttaatagcgtcattcaggctctggttgaagttggtattcaatacctgaaaaatgctgcgatggcgatgatagccgataagatgacatctaactcatcgcaacaggccggtgcgcaaactgctgccgcgtgggctcctgccgcagccgcagcttctatcgccacattcggtggggctgccattgccggtattgccggcatggtagctgcgttcgccatcggtgccgctctggccggcaaacgaaaaaatggcgggacggtaggcgctggtggggcgtatcaggttggcgaagggaatatgcctgaactcctgcagaccaagaacgggttaattatgattcctggcgaccgtggccgggtgttcagcaataaggatgttaccggcagttctccgacgatccagaaggcgtctacaggtaaggaatatctacctgcttcatcggcatcatccagtcaatcgggagatagctctaaacggtcgatacaggtaaatatccagctgatagatcagacaaccggcagtcagcacaacatcacgggcactgaagctttccagcaaggtgacgtggtaacagttactggatttctcaatgacgtggataccggcggcccaatgtccacagcgatcgcagatgcgcacgggcttagacggcaggcaaggggcgccttttaa

SEQ ID NO: 183852 - DNA, 1140 bp, Klebsiella oxytoca
atgaaaaagacacttttagcatgcgttattgccactagcctcttggctgggtgtgggccaaaggatttaacccctgagcagaagcaggaagttgcaagtctccgtagcgaactagctaaggctgaacaagaaattgtcgaggctaaatcacagcaggggcagtatactggggggttaattagaaatcttataacagccaggcttgaagtcttagggactaataaagcccttttggagcagcgtattaacgcgattgagtcgggggctaagattgagatatctgttagcggtgttaaaccaaatcctgaagcagcggcggcattaaaaactgaaattgaaactcttgatacacagattgccgatgctaagaaagatgcaagtcagtacagtggtggtctgctacaggcactgaaactatctgctattgcgacgcaggagcaaacaagggcgatgcttcaacagagatacctttcggcaacgtatgggttagctgaagtgaaagtacctaatgagcaagcaaacgaagcaatcacagaaaaacaagcagacaaagcagaaccccattccaccagaacgccgttacttccaccaggtgaaggaccattcggtttagaggccggtttgtctaagaaaaatattgaagacatgattggtgaagagcttgagccaatggcgaataatgtcaatctttatacggctaactctttacccaaaatgaatgctggctttgatgcgtatgggctgttgatatctccaacagtagggctatgccaaataagagctcttgggaaagatattgatacagatagttatggctttactatcaagtcaagatttaaagagctcatggagtcactatcttctatctatggaaaggccaaggaaaatgatttccttctggccggttcaatatggaaagaccccagagactggatgatgggattgtataagcatgaaagatatttgtcagctgagtggaaaggaactgcagaggctccactaaaaagtaaattaacttccgtatcgatcgaagctagagcaaacagttctgataaaggatatatcttccttcagtataatttcaataactatgatgtttgtgaagctgaggttgaagcagcgaaaaaaagctctctttga

SEQ ID NO: 183853 - DNA, 1125 bp, Klebsiella oxytoca
atggcgcaggcgtttataaatacaaaaatgctgacatgggctagagaaagagccaatctttcaactagttatatagcattaaaaatgaaaaaagatcctgagctcatcgagagatgggagaatggaacacgccccatcacttttaacgaagcacaaaaatttgccgatttgactcacaccccttttggatgtctttatctggatgagccaaccgttgaaacactgccaataccagaccgtcggacggtaggcagcagagacattgatgtctctgctgagttaagggatacccttagcgatgtaatgattaaaattgactggtacaaggaatactctattgagagtgggctggatactgtcgaactagtaggaaagtacaataaaaacacagcatataccacgcttgttaacgaactgagacataagcttagggtcacgatcccacctcgttcaggaaaatgggaggactttttttcaactttaataaaagaagttgaaaggaatggcatcttagttatgaaaaatggtgttgtaaaaaacaacactcataggcctattagtgttgatgattttcgcgggttctgcatagcagataaacgagctccggtgatattcattaacaataatgatgcaaaatccgcccaactattcaccctaattcacgaattatctcatttgatgatcggtgaatctgctatcagtgatctggcatatcaagctaagtctagtgaagaagttctttgtaatgctgtagcagcagagtatttagttcctgagtctattttcaaagagcaatgggttcgtacagaagactgggaggagaacattcctcatttaataaatattttcaaagttagtcgctgggtagttgcaaggagagctttgtctcttggctatatcagagatgatgaatatttgtcttatgtaagaaggattaacgataagactcccggtggtgggggtagctatccgagaacacaaaaaggtagggtcagtgaaacattcgcaaaagctgttgtcacacaagctcttgaaggtaaattacttcttcgtgaagcccaaaggctaactggcatcagacccagtaaattaaatgaatttgcgcagaaggaactagggctttga

SEQ ID NO: 183854 - DNA, 510 bp, Klebsiella oxytoca
ttgacatacatcatcgactcaaacatatttatcgaagcgcagaacacttactactgctttgatatctgtcctggtttttgggatttcctttctgaacgatttcattccggtgaactcattagcatacgcaatgtatacgatgagattgctaataaagatgatgtcatattcgattggcttagagatcgcaagcattatttcgatagtgttgatgatgagaatacacagaaaaattttgctgccatagcaaactacgttcagaaagagtattcttcaagaaagcctaacaaccctaatattgcatcattcttaagcgtagcggatccttggctcattgcaaaagcaaaaactctttctgctacactcgttacccatgaagtgagagctgggaacgggagtttcaaaccgaaaatccccgatatatgtgataagtttggtgtagcaacaatcaggacaaacgagctactgagaaacctacaaatcaagtttattaaagagataaaaaaataa

SEQ ID NO: 183855 - DNA, 987 bp, Klebsiella oxytoca
atgcgactgactacagaacagaaggtggaaatcgctcgcctcaaacgtagtggtgtagggtatcgcaccatcgcgaataaaatgggacttaagcccagcactgtgagtagcttctgccagcgcagtggattgttcgctgataatccggctcacaaggttcttttcactatccctgaggcgcgcttttcgaacgtacctgcgttaacaaaggcactgccgccccaaaaggtcatcactggtcataagcagaccgatgcttatttgtgggtgctggaagtgattaagctgaatgagccagcacatctggatgctgcagaggtagcacttgagaagcttaccattagcccaaaagacgtagagaaacggtatcgtgactggatggtcgctaatggtgctgacatattgcaagccgctttcggtacctttttcatggatgatcctcagcactacctcaagcttgccagggagaatatcaggaaggccagcgaagttcgtgctgtgtttggtagttatgaagctgctatggaaccagtagaagcagagttactcatctcacgatctgcatttctggtagatgaggattttgggctgacgagggaagaagtcgccgatggaagtatttcaggtatcgagcgatatctggaactggatgatgctcggaaagatgcacatcatggtttcacggatgtactgccttcacctcacacactatccgatgttgtccgcgaatttgattactggacgtggctttattggatacgcgatgctgctgggcgagagttaggtcaccagtattctgaagggctgagtcaggaggtctatgatcgagaggactggcttgatacccaacttgctacgatcagtcctatccaccagcaggaggctattgatgtgctgaaatggctactcaaaagtgaccgacacgaagggcgagatgagatggatgctatactgatgaaccttattggtaaagactattaccaataa

SEQ ID NO: 183856 - DNA, 2115 bp, Klebsiella oxytoca
atgaaactggcacctaacctgaaacatttgccaaaagaaaaatttactgaagcagttatttttgctggaaccgatgcgtatgcacatgcaaaagggtgggaagagggcatgggtaaacaagtcgctgaggacagaacacctcccatttatcttggaccgaagcagctggcggaactggagaacctgcaaattattgataaagggcgtcgcagtgctcgtgtttatctggctggaagcattgagccaataatgattaatgccattggggaaaaacttgcacaggcaggtgtactggaagcgaaattatataagggaattcctgaccaaaaaccggaaaactggaggcaatatctggccaggctcagagaacagggcgagcacacaacgacatcaattctgaaagccaataaatctgcgaatagtgacaacctgaagccacatgttgaaagccgagctgacggtattttttgggttgaacccaaatcagacaaagataccggggaaataactacccgtgaaagctggctgtgttctgctctggaggtcataggcactggcatagatgacagtaaaacccggtatctgatcctgcgctggcgcccattcggttcgaagggggatactgtccaggcaataccatttgctgatattggtgaacgcgaaggctggcgaacgcttaaggctggtgggttgaacgtcacaaccaaaagtggtctacgtgcaacgttggccgactggctgcagagctgtgccaatggtgaggtatggcgcattgcgcatgctacgggctggcagtgtggcgcctacatcatgccggatggcgagatcattggtactccagatcaaccggtgctgtttaacggacgaagttctgccgcatccggttataccaccagcggtactgttgagagctggcgagagagcgttggacgtctggcctttggcaactactcgatgatgactggcgtggccgcagcgctgtcagctcctttgattggccttgccggcgctgatggttttggtatccatctctatgagcagtcgagcgccggtaagaccaccactgccaatgtggcatccagtctctacggcaatcctgatgtattgcgccttacctggtacggtaccgcgctggggctggcgaatgaagctgccgcacacaacgacgcgctgatgccgctagacgaaatcgggcagggcgctgatccggtggaggtctacaaatctgcctacgcgctatttaatggtacgggtaagctgcagggcgcgaaggagggggggaaccgtgatctgaagcgctggcgtactgtggccatcagtaccggtgagatggatctggaaaccttcattgcgagcgccggtcgcaaggctaaagcaggccagctggttcgcctgctgaatatcccgatgcgccgggctgttcgtttccatgagcatgccaacggcaaacaccatgccgatgccctcaaagatgcataccagcatcaccatggagtggctgggcgtgagtgggtgaaatggctggctgaccaccagcaagaggcggtgaacgccgtcagagcagcggaagagcgctggcgtagtctgatcccgtcggattacggggagcaggtccatcgtgttggcgcccggtttgccattctggaagccgcactattgttaggtaatgtgatcaccggctgggatgagcagacgtgtcgggatgctattcagtacagctataacgcctggctgcgtgaattcggtaccggcaacaaagagcatcagcaaattattgagcagacagaggcattcctgaacgcttacggcatgagccgctttgcaccgttcccgtatgacccgaccagtctccccatctccaacatggcgggataccggcagaagggcggtcatgagactgacccgatggtgttctacaccttcccggcagccttcgaaggggagatcgcccgcggctttaacactcgtcagtttgcggaggtattgaagaaagctggcatgctgacaccgccgacttcaggccgggggtttcagagaaagtcaccacgcattgatgggcgacagattcgggtttatgtcctgcagtatctgccggacgatggccagccagagtaa

SEQ ID NO: 183857 - DNA, 216 bp, Klebsiella oxytoca
atgagcgatatgcagcttattgatgcccaatgtcgtgttgaacaagcacaggcactgctctcaatatggttagagggcacgaaagcatctgaacgggatatgcagttaatttgtgctctgatctcgttactccaggatgtaccagaaacgattaaaacggcggatgaagaacttgctgattacgtcttgcgtgcacatcgggagaagcgtcaatga

SEQ ID NO: 183858 - DNA, 264 bp, Klebsiella oxytoca
atgaatataaacgctatataccgccatcctgctgaacttgaggccgaggcgatgctatcccgtgagcaaccgtatccggaagattttacgctggcagagcgtaccgcagaacgtatggcccgcgctcgcaatgggttggttcatgtaatgaccgatttatcaccatacctcgacgttgagcaagcagtcattgtgcattgctggctggataaagtcctggcgattgtcgatatggccagaattgatgcggaggtcagggtatga

SEQ ID NO: 183859 - DNA, 318 bp, Klebsiella oxytoca
atgagcctgtataacgatttagttcgccacgaattcggcaaaggcgccaccgttgatgagctggaaggcattcagaaccgcatggatgaggctgtgagtgatttgttgctcggcattagtgccattggaagcctgatgttctgggccacggataatgacaactataccgaggagaccgcaaagggagacatgcgcaaaataggcgcaatgctgggtacggttggtgaggtggtgctggcgctgaacgataccgtatcgaatgcgggtgtgtgtcgttctgactgcgtcaaagaatcaaaaatgagggcgggaaaatga

SEQ ID NO: 183860 - DNA, 732 bp, Klebsiella oxytoca
atgattttcaccgtccagggtaaaaatctctctttggctggcctgatgaatgcaaaagctaaagctttgctggtggtgtgtcaccgcgtgaacctgtcaaaacctgtcacattgcgggccactgatagtggcgtacaaaatgcctggcggagtttcgagacaattacgcgcgatggacatcacacctgcagtaatgtgttttcggagtccataaaaaaggacttgatgttctacatcatcccggtctatggttataacgcaccagcaaaatctggtgccgggattggcgtcctgggaaagtacaaggcgacacatgacgcgcctagcgtctttttttgtgtcctcacattcgctcacccttttttcagcgctgcggttataatccgtgccgcttgcagagttatggtgagttggatgggggcggagaaatccgcgccggttaccttgtacgccggttacgccaaccctgttcagctcaccaccagtgaaattggcgtttccggtggtgggattaatccccagtacaaggaggctgccattgtggctactacccctacccaaaatccgcagtttatctggattatcgccgctgttcgccgcgatataacgacaattaaagcccaaattcaccatatcaccgcaccgtctgaacgtgacgcccgccgttcactggctcgcgatcatgtctgctttttcgccggccgcatccgtctggaggtggctcatgcgtag

SEQ ID NO: 183861 - DNA, 432 bp, Klebsiella oxytoca
atgcaaaaagaaaaccgccctttacaggcggctaacatagatcatcgcggatctgatgttacgccaccagccaacaccgttcaagcctcaagacgcactccgaagaaacaccgtgctcgcacctacatgctgcgctgcgggaccggtgggtggacagagaatgatatcctgcgccattgccacctgtcgtctggccgtaattatgccagcgagttagagcgccgccttgatatcctccttgagcgcacggacgaaaagaatcccgacggtatcggctcacacctccggtaccgttttaccgggcgcggtgacgttctaaaagttattcaactggtaaacagcaatgctgccgctggtggttattacggcctttctgagcaggatatcaccgacattctgaatctctacccggacaacctcaccgccgcataa

SEQ ID NO: 183862 - DNA, 861 bp, Klebsiella oxytoca
atggctctgccggaaagaaaatattacaccttgcaaaaggctggaatcgaattggggtgtgaggtagatgatttaattcattatgctgcgatagggttacttcaactttgcgtgaagtttcctgaaaatggattttgctgttttatcttaaacgaagaaacaggtgaagaggaagaggtgtcttctcctggtttaaatattttaagtgaatatgattttgaatgtgaaagtaatgttgctactgcgttcgattatgttcaaggtgtttatttatcagactatataagagttgttgaatcttttaacaaaaaaacagataggaaggtggatcacaagcttgagggttttttagctttgaaacaaagggatatttatgaaaatgaaattgaattattgatttctgaagacgctgttataagtgtttttgagtttgaggttcctcgttccaaagtgtttgaaaaaactgaaggttatattttgatgggatttgaggttcgtgattatgaatcggttgatttaaaattgactgatctactcataactaaggatgaaattgaactccttaagtctggtggaaaaaaactagagacgaatacaggcattaatggggtttataattatgaggaaagcttcaatcaagaagaaataatcgagcataaggttaatgctaataaaataggcgattttattagtgtgttgatacgttctgtaccagagctaggagataaggttatgagaactagtgtccatgacaggcataaacgcattgttgattttttcgacaaaaaacatgcgaaaggtgaattcattgatgtcgcaccgccgtcttcggctactcttgaaaagtatttcaaaatttag

SEQ ID NO: 183863 - DNA, 1467 bp, Klebsiella oxytoca
atgaattcaaccgcaccgacaggcttgctgcagcaacctcgcccattcttcatgatcttctttgtggaactatgggagcgatttggctattacggcgttcaggggatcctggccgttttctttgttaaacagctcggtttttctcaggagcaggcgtttattacctttggcgcgtttgccgcgctggtatatggcctcatctccatcggcggctatgtcggcgatcacctgctgggtacgaaacgtacgctggttctgggcgcgattgtgcttgccgcaggctactttatgaccggcctgtcgctgctcaaacccaatctgattttcatcgcgctggggaccattgcggtgggtaacggcctgtttaaagctaacccggcgagcctgctgtccaaatgctatccgccaaaagatgcccgcctggatggcgccttcacgctgttttatatgtcgatcaatatcggttcgctgctgtcgctgtcgctggcgccggtgattgccgacaagttcggctatgcggtaacctacaacctgtgcggcgccggtctgatcgtcgccctgctggtttacttcgcctgtcggggtatggtgaaagatatcggctctgagccggaccacaaaccgctgagcctgcgcaatttactgtacgtgctggccggtacggtggtcatgatttttctctgcgcctggctaatgcataatgtcaaaatcgccaatctggtgctgattatcctctcagtggtggtgacgattttcttcttccgcgaggccttcaagctggataaaaccgggcgcaacaaaatgttcgtcgcctttatcctgatgctggaagcggtgctgttttatattctgtacgcgcagatgcccacctcgctcaacttctttgctatcaataacgttcaccatgaaatacttggtttcgcgattaacccggtgagctttcaggcgctaaacccgttctgggtggtggtggccagcccgatcctcgccgctatctacacgcgtttgggcaataagggcaaagacctgacaatgccgatgaagtttacccttggcatgttcctgtgcgcgctgggttttctgacggcagccgcggcgggaatgtggtttgccgacgcccaggggctgacctcgccgtggtttatcgtgctggtctatctgttccagagtctgggggaactgctgattagcgccctggggctggcgatggttgccgcgctggtgccgcagcatctgatgggctttattcttgggatgtggtttttaacccaggcggccgcgttcctgctgggcggctacgtggcgaccttcaccgccgtaccggataatattaccgacccgctacagacgctgccgatttataccgatgtcttcagcaaaattggcctggtgaccctgggcgtcacggtggtcatggcgatcatggtgccgtggctgaacaggatgattaatacaaaaagcgcgtaa

SEQ ID NO: 183864 - DNA, 477 bp, Klebsiella oxytoca
atgacgaataacaatgcggcgatgggctctactgaccattccctgtcgtcaactgcgtggaaggcggtaagcggtgttgatggttcactgttgacgccaaccggtacgggtacagccgggacagactcctgggtaccgactacgaccaattccgtgcgaatcgacacgtcggggacaggaaattacacactgatttacggtgagaatacgctgttcaccagtgcccgaaatcctggcgctacgccggtatcagaagctgcactaagggtgttgcgcaaactaatgttgttcccgctggcgggcctggtttccgatgattcgctgtcgtactcaaaaggaggcgaggtgatgacactgcgaggcggtgcatattcgaatggtaccggcggcggcgtcaatgcgctactcgctaaccgtgggcgcacctcagtaagcgccgctaactcaggtgtccgtccggtatattacaagccttga

SEQ ID NO: 183865 - DNA, 936 bp, Klebsiella oxytoca
gtgaaagttgtctttaatgttaatggtaaaaaagttccgctcaaatctctgcaatatataagtaaagcaaatcaacttgaagtaatgaggaattggttttttgaaaatttcgaagatcccgcaaactcttgcccgtatgaatcccgtgaaggcggatatgcttacatttatggtggcccatatgaagcaagtgaagagttacaagcgatgtttgaagggtacgtgaaatttgattatatccaagaattagttagtgatttacaagaacagtgctacgagtggtctggcaattcaaataatattaatgattggtacgacgaagacttgtacgatgctgttacatcttccgaacagcctttttctaagttcgttgaaagcattgatggaataaaatcgctggctaaaggtgattttaaagataagcaaaaagaacatctgcttagcatcttatatattaacgtcattacagccttggaaacgctttatgttgagttatttattaactctatagataaaaatgactcataccttacagatttcatagaaaaaggtaagacggaatttaaggtaaataaagaaattttggctttgccattcaaaggagaaactattgaaaacatgagggcggaattgattaaagcaatcaaagaatatttgattagtgcaagttggcatagtacaaacaaagttgtagggcgttataaagctacatttgacattaatgtacaaaaagagtggccaatagacgagatcgaaatagcaacacaaaagcgtaatcatttagttcatcgtggcgggaaagataaagaaggcaattcggtagtgattactgaacaagatttagatatgttgctggatcacgctcaatcgcttggagaaaaattatttgatagtcttggggtagcattacagaaaaaagatgagagcgaattttga

SEQ ID NO: 183866 - DNA, 1554 bp, Klebsiella oxytoca
atgaataatattagtgcagaagaaattttaaaccgtgtttggaactatgcccatgtattacgtgatgaaggcgttggctacggtgattatgttgagcagctaacctatctgatttttctgaaaatgtcatctgagcgcgctgaaagtggacagggcggagaaagtcttgcggcggatcgttgggccaagctgatagagttagatggttcagatttggaggtggaatatcgccatacattggagagtctgggtagccaaaaaggcactctgggtatgattttccgtaaggcgcagaacaaaattcaagatccagaaaagcttgagcgcctgatatccatgattaataaagaatcatggtcatcattgagtattgatgtcaaaggcgagatttacgaaggcctactccaaaaaggggctgaaagtgagaagaagggtgcgggccagtactttacgccaagaccaatcattgaggctattgtagatgtaatgcagcctcaaccaatgcagacaattgctgatcctgcttgcggtactggaggctttttgacggcagcgcacgactatgtgcttttcgacatagatcgagtgaccggaaaaagaatgcctaagtcgttgtcaaaaaaagaaaaccgtttcttaaaaaatgaagcaataagtgggaacgatatatcagactcagtcgcacgtctatgtgctatgaacctttaccttcatggtattggaactgaagagtgtccgatatctacatctgatgcgctcgcaaaagaggtcggtttaaacaaagtagatatggttctcgcgaatcccccttttggtaaaaaaagctcaatcactatcattaacgactctaccggaaaattagagaaagaaaagctgacctacacccgtgcggacttttgggcagaaacttcgaataaacagcttaacttcgttcagcatatcggtaacatgctgaaagttgatggtaggaactcaggcaaagctgcggttgttttacctgataacgtgttgtttgaggggggggccggtgaaacaattcgcaaagcactgctggctcgctttaaactgcacactatcttgcgcctaccgacgggcattttttacgcacaaggagttaaagcaaacgtgatattttttgatgcgaaacctgccgccataaaaccttggactgaaagcgtatgggtttatgactatcgaactaatgtacacaaaacgttaaggacgaataaacttgttcgtagtgactttgacgaatttgttgagctctataaacctggtaacctcaaagcgcgtgtcgcgacatgggctgaagtacaaaacgaagagactggagcgggaccaaatggtcgttggcgtgagtaccgctatgacgagatcatcgcaagagataagacaaatctcgatatcacctggttgaaagaccaatcattggaagatatagaaaatcttcagccaccagcagtcatcgcaagtgagattgttgaattgctcacagcagcactagaagagttcaaaagcgtagaagaagcacttgtagaagaagatgaagattaa

SEQ ID NO: 183867 - DNA, 810 bp, Klebsiella oxytoca
ttgagatacatagataaacgccagctgcgtagattggtcgatttaacagacattgatttggcaaaagcacaaattgctgcgttaccagcagatcaacgtagtgcttttattgatgccaacggtgatcgttggtcaaagttaaagccagctctgtggcagttgggcaacttaaaatgttggtattctgagtcggaactacaagttcaacaagggcacgttgaacacttcagaccaaagaagaagcctcacggtcttaatggagttgcacactctggttactggtggcgagcttttgattggactaatttccgactatcacaccctacatgtaacgttcgaattactgattatctgacaggtcaaattgttggaaaaggcgcgtattttcctcttaaagatggtgatgctagagctatcgacgaagcaggtgagcggaatgagaatcctgttcttctcgatccaacagtgattggtgattgtaaattaatttgtttcgatactaatgatggtaggccacttgctactttttctgtacagcaagatccgtggaagaacaaaagagctattcaatcaatagcgttttatcatctggatgaaggaacatggaattatcaacggaaagatttgatggatgaggttggtattctttgtgacaggttaattgaagccgaaagctcacccaatagagatcaagcacaatgtgatcagttagctgatgaattggttggttatattaatgggcatcaaccgttcacctcagcatgtactcaagtaattaaagaaaaagggttgcttgaggcagtaaattag

SEQ ID NO: 183868 - DNA, 1722 bp, Klebsiella oxytoca
gtgaaaattgattggttacgattagaaaacttcaaaaatctcacaagttttgaggtggatttttccttaaagtctgaacgccaagttattattggtcgcaatggtgtcggcaaatccaatatattggagtccatcgcatggattttcagagacttagatctttgtgaagaatctgactttgagtatgcgattaaatatcgatgccgtgatcactatgtaaaagtaatatctaaaggtaaatcgagtaaaaagcctaggcgcaaaggtactcggcgagaaaatattcagcgcttcaaacgctcatattgggtaattgaaaacgctgcagatattgaagataaaagtatcgaagaaattgaaaaattatttgtagagttaaaagagactgaatttaaccgccgcaaccaagctattaaaaacgaaagcgacgtttatcaatttagagatgaaagactgcttcctgattatgtttttggttactactcaggaatatcggcacgctttaatgaagcgttcgaaactcacgagcgcgattactattctgaccagaaggatggggaggaaatgtcgcttagaactatgtttttagctaagcctcaccatagtcagttttcattattatctttttttgctaagcaggatgaggctactgcaaagtttttgttggatgagttcgacatagaaagcttgtcttcagtcttgtttacacttcaagaaccctattggagtagttcgactaaaaagagcgaactagaaaagcagaacaaagataggcgtttttggggggctggcggaaatgttgagccattcttaaataaattatttagtcttgcctatgcaccaatggctgggaccgaaagaaaagaaatatcaataaatcgaacgactaacttagaaacaagatattgttttttaaactctcaggactctattaataaattagctgacgggttagagccaaaagaatttttcactcgtttagaaagttctattttcagtgatattttgagcctagacggcagcggattaaagatccgtgtgaggcttaaaggtgttaaggatgcgattactttcaaggaaatgagtgaaggtgagcaacagctgctcactattattgggcttatgcgtttcactcagcgagatgaaagtctctttttgttagatgagccggacacacaccttaatccagcgtggtgcttggatttgttaaaaaacctcagaacatatggtgtcgaccctaaaaacagccaaattttaattaccacacacagcccacttacttttgcaggtttagacaagcacgaagttgtgattgtggacaaaaactcggatggtcagatttatagctatcaccctaccaccgctccaaaagggatgggtttccaggctattctaaccagtgatttctttaagttacgctcgaccctggatagggatactctgaatttgcttgatgaaaaacgtgagctgggtttaaaagaagaaaaaaccgatgaagacagacagcgacttaatgagctcaacacaattcttggaaaattagatttttcacatgcagcacgtgatcctctatatctagaatatatccgcgcaattaccgaagcacaaaaagagtttccagaaattgcaaacgcaactcctgatcatgtttcttggcaggttaggaaacggatttctcttgatattgctaaacggttatcgagaaaaaaggaggacgtttga

SEQ ID NO: 183869 - DNA, 1731 bp, Klebsiella oxytoca
atgacaagtaaaaatggtaaacaagaaggctggattgaagttcttttggaagactgtgtcgcaattttggactccaagagaatacctgttaatgcaggagagagagctaaaagaattaaaggtaaaagtagaggcgagctctatccttattatggagcaactggagaagtagggcttattgatgacttcatttttgaaggtgaacaccttttaattggagaggatggagccccattttttgataaaactaaaaatgtggcatttgttgttaaagaaaaattttgggttaataatcatgcccatattttaaaggcatttgattctgttacatccaatagatatttaagtcattacttgaatcaatttgattataaagggtttgttggtggctctactcgcttgaagcttaatcaagcgagtatgaagaaaatccctgtatctttaccgtcgttaagcactcaacacgcaatagtcgataaaatagaagaactttattcccatattgatgctggtgttgaagggttaaagcaagcaaaggctaagcttcaacaatatcgtcagtcagtacttaaagatgccgtcactggtaggctaacagagcaatggcgtgagcaaaatgtagacaagttagagccagcgagttcgttgctaaatcgtgttctcgatgagcgccgagttaactgggaagctgagcagctaaagtcctttgaagagaaagggaatacgccgaagaacgataagtggaaggagaattataaagagccccctcaggctgatgtgtcttccttacctgaaatacccgatagttggacttgggctactataactcagcttggtgagttaaatagaggaaaatcaaagcatagaccacgtaatgacccgagtttatatggtggagattatccgtttgttcaaactggtgacgtacgagcagctgatggccttttaacaaattataagcagacatattcaaaaaaagggcttgctcaaagtcgtttatggccaaaaggtacattgtgtatcactattgccgcaaatatcgctgaaacagcaatacttggtattgatgcatgtttccctgacagtgtagtaggttttatccctcaaaatgaaaatatttcagttgaatatatagagttcttctttaggacagtcagagaagaccttgatcgctatgctccagccacagcccaaaaaaatatcaacttagcaatattagaaacagtttctgttccattgatgtcagttgaagaacaacgagagttagtgctacaagtgaccgaaaagttggcaagcgcaagtagagcagaaaccactatagatggaaagataaaacattcagtttccctaaagtcttcaatattagcgaaggcattttctggtgagttggtacaacataacagcaaagaaaataccaaagatcttctagatcaaattaagacagaaaaagaagctttagcagaaacaaagccaaaacgttcaatcaagaggggggaaaaagtgacttcagggcgtaaaccattactgacagtgttgaatgaacaaagcgaacctataaaacctgatgagcttatgcagttagctggtttttcatctaatgaagttgaagaattttatattgagctggccgaaatctcagagaaagtagcacagctctcacctgacgaaaaactgattaaaaactggccttatgaaaaagagtcagagattaaattgaagctaaaggattag

SEQ ID NO: 183870 - DNA, 519 bp, Klebsiella oxytoca
atggaagaaaacaaagatgagcccacagctatcgaactcatttacagaaaacagtatcatcaacgccatctaagttatgagcaaatcgaggaatttgctgaaagcatcaaagcgccgccgtataatcccgcccctatacaagtatggaaagcctatgagcagcttgaagccgcaaaggtaaaaagcgttcctcccgctgctttactgacaaatatcgttagtttggtgagctacgcaacagggataaaggatatacttgaccccttccctaaagtcgttgagctgcgtttcagtgcttggttagttcagcaacgacaagcgggtgttgagtttgatgaaagtcagcttgagcggctgaaaatgattaaaaagcaaattgctgaaaatgcagaaatgatgattgaagactttgaatatgcgccttttaatcaacaaggtggtgtttttagagccaagcaattatttggtgataggctagataatattgtaaatgaattgaatggctacctaatcgcatga

SEQ ID NO: 183871 - DNA, 303 bp, Klebsiella oxytoca
atgaataatcccagtcatagcgacatgatgcgcaagttaaaagagatcaaagggattaaggagctgctggagaaggccgtgctcttgtatgtcctgctcacggatggcgatctgccggtctggtgctatgcgctcatcatcggtgcgctggcttatctggtaagcccgttcgacgtggtacccgatcccattccatttgccggttatctggatgatttatcgatcatcacctcggcattagccgcactgccggttaagtcacaccaccgccaatccgcgaaagaccgaatgagatcactgtga

SEQ ID NO: 183872 - DNA, 576 bp, Klebsiella oxytoca
atgaaagagacaaagacgcgatatgacagtttgctggatagctatcaacgttggctaaacgggtttacaaaactggccatcataaatggcatgtgtcaccccaatatccaggccagccaccatctgatggtgggcagtctgtactttcccggcgcgggacagatgactgcagtagtaccacaatgcctttaccgactgatttacggaagtcagcatacagaaccagtgtcggtagtgactgatatgcaaatcagtcttgagacaaaccaaaaaactttactgcaccacccaatgctggaagggatattgctgagtgaatgtatccgcctgaaacaacgcccactggcaaataggctgattagcctgttacaacaattcagctcaccggagcatcgccacaaactggtctggctatgttggtacgatttgatgataggtgcaacgctggaagactggctggataacctgaaacgtaaggcacctgaagatctaggcttgtggctgattggacggcaggaggaaaacatatccctcatgcaaataatggatgaatatctgctatttaccggccactaa

SEQ ID NO: 183873 - DNA, 207 bp, Klebsiella oxytoca
atgagtattcaaatttcccttctcgaggaccagttcatcgatatggcattcattacacaactaacccagttgaccgataaatggttttacaaacttattaaagacggtaagttcccaaaaccaaccaaatttggtcgcagctcccgctggcggaaaagtgaagtggaagcctggctacaggcgagaatcgaagaatcacgcagctag

SEQ ID NO: 183874 - DNA, 582 bp, Klebsiella oxytoca
atgcaaaaacattacccacatctaaagaaaattaccccgaatgacttcctgctaaatatgattaaccaccatcttaatcagatcctagcatgtcactccaaaatactggcgtttcgaatggattttgattaccagcgaggcactaaaagatttattcgtaattcctcatttgagatacaggatgatctcagagacctcactcaggcgatgacgaaccttcctggtgtcactggtattttctgggtactggaatggacatcagaaggagtagttcatgcccatgcgattttctatcttaatgctcaagaacatcagaagtcattcccattcattttacaggcggaggaaatgtggctagagattacccatggtgaaggcaagtctcagcgatgcaagccaaatgaatatcatcgggacaacattaacaacgttgttgaatatcacaataatgaagccttaaacagcttaagacgtatagccagttatctgacaaaagaagaccagaaatatgattacccaatctggggatgtaatgaggttccacctcctgcacgacaggaagacccagaaaatatatactag

SEQ ID NO: 183875 - DNA, 285 bp, Klebsiella oxytoca
atgggcacaccacgttttacccctgaatttaaggaagaggctgtccgccagatcaccgagcggggctattccatcgctgaagtatctgaacggctcggcgtgtcggcgcacagcctttataaatggctccgggctgttaagcctgacaacagtggacaacaggcacaggatttacttgatgccagaacagaaattctcaggctgaaagcacagcttaaacgcactgaggaagaacgggatatcctgaaaaaggccgcgcggtactttgcaagggagcccgactga

SEQ ID NO: 183876 - DNA, 1515 bp, Klebsiella oxytoca
gtgactcggattcggacagcgattcggactccgacagtgattcggatagtgacagtgattcggattcagacagcgactccgactcggacagcgactccgattccgacagcgattccgactctgacagtgattcggattcggacagcgattcggactctgacagcgatgccgattccgacagtgattcggattctgacagcgactcggactccgacagcgattccgactctgacagcgattcggattccgacagcgattcggactccgacagtgattccgattccgacagcgattcggattctgacagtgattccgattcggacagcgactcggactctgacagcgactcggattcagatagcgattccgactccgactccgactcggacagcgactcggattccgacagcgactccgactctgacagcgactctgattccgacagcgactcggactccgacagcgattccgactccgacagtgactcagactctgacagcgattccgactctgacagcgactcggactcggatagtgactcggattcggacagcgattcggactccgacagtgactccgactcggacagcgatgctgactctgacagcgactccgattccgacagtgattcggactccgacagcgattccgactccgacagcgactcggattcagacagcgactcggattcagacagcgattcggactctgacagcgatgccgattccgacagcgattcggactccgatagtgactcggactccgacagtgactcggattctgacagcgactccgactctgacagcgattctgactctgacagcgattcggattctgacagtgactcggattctgacagtgactccgattcagacagcgattcggactctgacagcgactccgattccgacagcgatgccgattcagacagcgattcggactccgacagtgattccgactcggacagcgatgctgactctgacagcgactccgattccgacagcgactctgactctgacagcgattcggactccgactctgacagtgattcggattcggacagcgattcggactctgacagcgactcggactccgacagcgactcggactctgacagtgattctgactccgacagcgactcggattctgacagtgattcggattccgacagcgattctgactccgacagtgactcggattcagacagcgactccgattccgacagcgactcggattctgacagcgactcggattctgacagcgattctgattccgacagcgattccgattctgacagtgactcggactcagacagcgactcggattcggacagcgactcggactctgacagcgactcggattctgatagtgattccgacagcgactccgactctgacagcgactcggattctgatagtgattccgactccgacagcgactcggattccgacagcgatatcgaggccatccccgatagcaacagcccggacgttgtcgcgctggaaggtaacctga

SEQ ID NO: 183877 - DNA, 207 bp, Klebsiella oxytoca
atgagaaagccgtggaccttcctgacgcaaaaaaatgcgctatttatcacatttctgtcttttcatcatcgctgggtttatgggagaaaacaggcagcccacccgcgcaattatcgcttcaagcaacttaatgatcttaaagaaaataaaaagataattgttaaggcgatctcattttataaaagagatatgcatcacaaaaaatga

SEQ ID NO: 183878 - DNA, 990 bp, Klebsiella oxytoca
atggaaacccgaggcaaggtcctgatacttggcgcaaccggcggaatcggtggtgaaacggcgcgccggctcattcagaaaaaatgggacgttcgtgcactaaaacgaggacttcatggcagtgaacgacgtggtgacatccagtgggtagggggcgacgctctcgatccggagcaggtcgccgctgcggcagcagactgtagcgcgatcgttcacgccgtcaatccgcccggctacagaaactggaagcatctggtgctgcctatgctgcgcaacacgattggcgcagcagaacgaaccggcgccttgatcgtgcttcccggtaccgtttacaactatggtcctgacgcttttccgctattacgggaagacactcagcagacgccggtcaccaggaagggagcgatcagggtacaaatggagaaagaactggcggcctattcgcagcgtggcggacgggtattgatcgtccgcgcgggggatttttttggtccgcgcgccggtaataactggttttctcaaggtctgattaagcccggcaagctgcctggcgtcattgccaatccagcttcgtttgcaaccggtcaccagtgggcttacttacccgatgtcgcggaaacgatagctgcgctgctggcacgacgcgaggagcttgagccctttgcacgttttcatatgcaaggtcactgggatgccgacggcagcgaaatggtcagcgcgattcaacgcacagcggcacgctatggcggcatggccaaaatacaatcatttccgtggtggttgatgtacctggcagcacctttcaacgcaaccttacgcgaacttctggagatgcggtacctgtggcgccagccggttcgcctggacaatacgaaactggtgaattttttaggtgccgagcctcacacccctcttgatgaagctgtccatgcgacattacagggcctgggctgcatttatcgtaccgagatgcctcgtataacaatatag

SEQ ID NO: 183879 - DNA, 945 bp, Klebsiella oxytoca
atgtggctaataaataaagcttttcaaaaagagtttgaagacgctaacaaagtttttaagcataattaccccggcatagattatgttgatgagcacaataaaattgtgatgcaagtaacggcaaccgcaagtagcaaaaaattcggagatagcatagacaaaacacctgactggctcagaaaaagcggatataaagatttttactttttcatcaactccactaacaaacgaataaaatattctcatcaatactttaacgtgaaagtttttgatattaatgacttaacatcctctctatgtactttagaaacaggagaacggcataaagtcgttgcttatcttaaagagaatttttccaattggattcctttaaactcttcgggattattcataccacaagtgaccagtttcaaaagaaaccaatctctttttaataagttcattgaaataaataaattaggtctaaattggaacttaactgactcccataaagaatggttgcgtgagcagtgtgaaaatgatttgtatcatcttcaaaaaaaattatcagaactatcaatgttgcagcgtaattttatttgtatggtttatcagtatggttttgtaaatggcaggaatagggaggatgacgtttcgcaagaaattcgatttaaccttgcgcaatatgcaacgcattttactgaagaagaagccgagcgatttgatgatatatattatgggttaaataagtggggaatttgtgagatcatagaagttttcgatacagaacgctacgttcaagatagtgagatttttccgcattacaaagaattaatcctgaaatggtctaactgggatgtgaattataatttatttagagctattggtaatttttacatgtcgagatatgatgaaaaagaattgtaccgggcaattagaaataatgattttttcctgatttactaa

SEQ ID NO: 183880 - DNA, 933 bp, Klebsiella oxytoca
atggaatggagatttttaggttcaatatcagaggctaggaaatctggctgtagcggagtttatcttattgtccataaaggacttttcaatcgtgtggtttacgttggggtaagttgtaatgtaggtagaaggataaacgaacattacgacggttacctgagaggaaaccgaacaatttacgacgcgggtcacgatgacgacgtgtatcgcttcatgtcagcgtataaaattcataaccatacaaaatattatcaagccttagcgaaggattataagatatgggcatctacaacgttatattctgatttgccgaaaaacatgctagcaaaaagccaaagctttgatactgactggcagagtattgcattagaaaaatatattcctcaactggtagtatgggcccttccaatggcaagctactgttattcaaatgcaagcaggattgaaagtgtaatccaatcaaaactcattaaatcttttgatttgagaggtttttttaatttaaaacaactaagcatattgggtaagattgaatatccatatatggaaaagattaaggtttttattattgatacgcctgatttagacccggcatcccaacttatctttagcaatctgtataataaaaaagcagatgacaatttctgtaaagagttccgttcacagtttaaaagcgagatttttcagagggaaagtgaaactcagagaaaacgaactctcagggagcataaggtctctctttatgaaaattttggcaagccttggactttaaaggaaatggaaaaacttagagtcatgcttgtcgattttgatttgtccccgacagaaatatctgagtatctaggaagagagcctcgctctatctctaaaaaaataagcgaaaatgataaagttactaattataagtggagagagagcgttggctggttgtga

SEQ ID NO: 183881 - DNA, 3153 bp, Klebsiella oxytoca
atggacttttcccgttttttcatcgacaggccgatttttgccgccgttctgtcgattctgatttttatcaccggattaatcgccatcccgctgctgccggtgagcgaatatcctgacgtcgtaccgcccagcgtgcaggtgcgcgcggagtatccgggcgccaacccgaaagtgattgccgagaccgtggcgacgccgctggaagaggcgatcaacggcgttgaaaatatgatgtacatgaaatccgtcgccggttctgacggcgtactggtgaccactgtaaccttccgtccgggtaccgatcccgatcaggcgcaggttcaggtgcaaaaccgggtatcgcaggccgaagcgcgtctgccggaagatgtgcggcgtttggggatcaccacccagaagcagtcgccgacgctgacgctggtggtgcatctgttttcgccaaacggtaaatacgactccctgtacatgcgtaactacgccacgctgaaggtgaaggatgaactggcgcgcctgcccggcgtcggccaaattcagatcttcggctcgggcgaatacgcgatgcgcgtctggctcgatcccaacaaggtggcggcgcgcgggctgaccgcgtcggatgtggtcacggcgatgcaggagcagaacgtccaggtttccgccgggcagcttggcgccgagccgctgccgaaagagagcgacttcctgatctccattaacgcccaggggcgcctgcataccgaagaagagtttggcaatattgtcctgaaaacaacgcaggacggtacggtcgtccgcctgcgcgacgtggcgcgtatcgaaatgggctccggcagctatgcgctgcgttcccagctgaacaataaagacgcggtcggaattggtatcttccagtcgccgggggcgaacgccatcgatttgtctaatgcggtgcgcgccaaaatggacgagctgtcgaagcgtttcccgcaggatatgaaatgggcggcgccttacgacccgacggtatttgttcgcgattccattcgcgcggtagtgcaaacgctgctggaagcggtggtgctggttgtgctggtggtgatcctgttcctgcaaacctggcgcgcgtcgattattccgctgatcgcggtgccggtttcggttgtgggtaccttcagcattctctacctgctgggcttctcgctgaataccctgagcttgttcgggctggtgctggccatcggcatcgtggtggatgatgccatcgtggtggtggaaaacgtcgagcgaaatatcgaggaagggctggctccgctcgccgcggcgcatcaggcgatgcgtgaggtgtccggcccgattatcgccattgcgctggtgctgtgcgcggtgtttgtgccgatggcgtttctctcgggcgtaaccggccagttctacaagcagtttgcggtgacgatcgccatctccacggtgatctccgccatcaactcgctgacgctctctccggcgctggccgcgctgctgctaaaaccgcacggcgcgccgaaagacttcccgacccggcttatcgaccgtcttttcggctggattttccgtccgtttaaccgctttttccaccgcagctcgaacggctatcaggggctggtgggaaaaacgctcggacgacgcggggcggtgtttgtggtctatgtgctgctgctctgcgcggcgggcgtcatgtttaaagcggtacccggcggatttataccgacgcaggataaactgtatttaatcggcggcgtgaaaatgccggaaggttcttcgctggcgcgcaccgatgcggtgatccgcaaaatgagcgaaatcgggatgaataccgaaggcgtggattacgcggtcgcgtttccggggcttaacgcgctgcagttcaccaatacgccgaataccggaacggtcttctttggcctgaagccgttcgaccagcgtaaacattcggcggcggaaattaacgctgagatcaacgcgaaaatcgcgcaaatccagcagggctttggcttctctattttgcctccgccgattttagggctcggccagggttccggctattcgctctatattcaggaccgggcaggtcttggctatggtgcgctgcaaagcgcggtaaacgcgatgtccggtaccattatgcagacgccggggatgcacttcccgatctccacctaccaggcgaacgtgccgcagctggatgtccaggtcgatcgtgataaggcgaaagcgcagggcgtgtcgctcaccgatctgtttggtacgctgcaaacctatctgggatcgtcttacgtcaatgattttaaccagttcgggcggacctggcgcgtgatggcgcaggctgacggcccgttccgcgaaagcgtggaggatattgccaatttgcgcacgcggaataatcagggcgaaatggtgccaatcggcagtatggtgaatatcagcaccacctacgggccggacccggtgattcgctacaatggctatccggcggcggatttgattggcgatgccgatccgcgcgtactctcttcctcgcaggcgatgacgcagctggagaagatgtccggccagatattgccgaacgggatgaatatcgaatggacggatctgagcttccagcaggccacgcagggcaatacggcgctgatcgtcttcccggtggcggtgctgctggcgttcctggtgctggcggcgctgtatgaaagctggacgctgccgctggcggtgattcttatcgtgccgatgacgatgctctccgcgctgtttggcgtctggctgaccggcggcgataacaacgtgttcgtacaggtggggctggtggtgctgatggggctggcctgtaaaaacgcgattctgatcgtggaatttgcccgcgagctggaaatccaggggaaagggatcatggaagcggcgctggaggcgtgtcgcctgcgtttacgcccgattgtgatgacctctatcgcctttattgccgggaccatcccgctgatcctcggtcacggcgcgggcgcggaagtgcgcggcgttaccgggatcacggtgttctccgggatgctgggggtgacgctgtttggtctgttcctgaccccggtgttttacgtgacgctgcgtaaattcgtgacgcgcggtaaacctgctgaggacgtttcgccggcgtag

SEQ ID NO: 183882 - DNA, 1176 bp, Klebsiella oxytoca
atgagcctgcaaaaatactggggtaactttcatctgactgtgccgggcgtgatgctgctctcggtgctcctcgttggatgcgatgagggcgtcgcgcaaaacgccgcgccgcaggcgcccgccgtcagcgccgctgatgtggtcgtcaaatccattagtcagtgggacagctttaacggtcggattgaagcggtggaaagcgtccagctgcgaccccgcgtctccggctacattgacaaagtgaattacaccgacggccaggaggtgaaaaagggggaggtgctgttcactatcgatgacagaacctatcgcgccgcgctggaacaggcgcaggcgacgctggcgcgagccaaaacgcaggccagcctggcgcgaagcgaggctaaccgtaccgataaattagtcaataccaacctggtctcccgcgaagagtgggagcagcgccgcgccgcggccactcaagcgcaggccgacattcgcgccgcccaggcggcagtcgacgccgcgcagcttaacctggacttcaccaaagtgaccgcgcctatcgacggccgcgccagccgggcgttgatcaccagcggtaacctcgtcaccgccggcgacagcgccagcgtgctcaccacgctggtgtcgcagaagacggtttacgtctactttgacgtggacgagtcgacctacctccattatcaaaatctcgcccgcagcgggcagggcgcgtccagcaatcacctggctctgccggttgagattggcctggttggcgaagagggctacccccatcagggcaaagtggattttctggataatcagttaacgccgagcaccggcaccatccggatgcgcgcgctgctggataacgcgcagcgtcagttcacgccgggtctctttgcccgcgtccgcctgccgggcagcgcggaattcaacgccacgcttatcgatgataaagcggtgttgaccgatcaggatcgcaaatatgtttatgtcgttgataaagagggtaaagcgcagcgccgtgatattacgccgggccgtctggccgacggtttgcgcatcgtgcagcaggggctgaagccgggcgacagagtcatcgtcgatggtctacagaaagtgtttatgccgggcatgccggttaacgcgaaaaccgtggccatgaccgccagcaccgccctcaactga

SEQ ID NO: 183883 - DNA, 912 bp, Klebsiella oxytoca
atgaattatgatgagatattgacgtttctggcgatccttgatggaggaagtatagcaaaagctgcacaaactcttttcattagccagggcacggcgagtacgcgtattcaacaattagagcgacaactaggatttgagttgttttatcgtcaaaagggcgttcggcatattgttttaagcccacaaggaagagagttcctgccgctggcgcgccaactgtataaattaaatcaagatgctatgcagttgaaaagaaatagtgaaattactgagcttaatatcaccgcattggatttaatcaatagtctggttttctctggcgtttataaagagtttataaaaacacatcccgatattcttttgaccattggtacccagcattcaagcaagacttatccgttaattgaacagagagtatcagatattggttttgtctctgggaaatataatttcccaagtgtgcatattacgcctttatactcggaaaaaatggtatttctctaccatcagcagcatccctttgctgtttcgcagaacgcccaagatctggatgttgaaaacgaaatatatcttgattggtccagggaatttcgattgtggcataatcaatatttcgatttcactcgccataaaaaagtgacgctgggtactgttgtcatgttgccaaattttatcggcgaaccagagttatggtctatcgttacagaaggggtagcaaaatatattatagacaaatttcccgaactggctttttcccatatatctgcacctccgccagagcatgttatttatgtcatcaaacatcgtttccttgatgggaaagcgctacgggcataccatgttttcattgctcgtgtagtagagtttatctccagtacaccttaccggacgcttttgtaccggcaggcgtaa

SEQ ID NO: 183884 - DNA, 1395 bp, Klebsiella oxytoca
atggattacagaaaaatagctgatgaaataattaaaaacatcggcggcatagaaaatgttaaaacacttactcactgtatgacacgcttgcgttttgttctaaaaaatgaagaaaaagttaatgaaaaagagctacgtaacatatccggtgtgttaggtatagcccgcggtatggggcagcagcaggtcgtcatgggaaaaaacctggcaccaacatttaaagccataactgataactatcctcttaatgacaatccgggaggagttcatgctgaggcggcgaccaaatcaaaaaaaccgactgccatgactttcaaaaaaatagttatggaagtagtaaatttcctcggtgcttcagtcagcccaatgattgtagggctagtagccggggggatgcttaaaatagtgctacttctgacctctctggttattcctgacattaaagacacacaaacctatactttaattggatatatctctgatgtgccgttctattttatgcctgtgctattggcctacggcgcatcacgaaaattaggttgcaatacgatctatgcagtgcttgttgcctgtgtactactctctcctggttttactggcctggtgacagtcggggctgaaacaaatttattcggaattcctgtaccactgattaattacgcaggttcatttatcccagttattctatcgacaattactgtgtattaccttgaacgattcctaaatagtattatgcccgggattttaagatcgttcatggtcggaatgctgactgtcggaataacatcatttattacactagttgcatggggaccattaggtacttgggcgggatttcattttgtaagttttctggtgataattcaaaatactattggccctattgctctgggtgtgttggccgcagttctgccttttatagtcatggccgggatgcacagcctttttgctccttttatggtacaaagtctggcgattgctcattttgatggcttttttcgtcctgctcttatcctacataacgtatcggaaggtggcgcatgcctggctatcgcactgcgtactcgtaattccagtctgcggggtgaagctctgagccttggatttggctgtattgttgctggcgtatcagagcccgctatttatggactcatgctgaaactaaaacgtcccttatatggtgtgatggcagggggcgccgctggtggcgtagttgcgggattaatgggtgctaaagcatttgttatgggacgctcaacaattcttgctctacctattttccaggacactattgtggcgatgattgcaggtttaggagtcgcatttattgtttcattcattgtggcgtttatcgttggttttgaggatattaccaacaccgagaatattacctaa

SEQ ID NO: 183885 - DNA, 1416 bp, Klebsiella oxytoca
atgattggtaaatatcttaatagtttcccggaagatttcatgtgggggggagcgattgcagcaaatcaggccgaaggagcctggcgtaaagatggaaaaggtgtcgatctggcaatgtgtttccagaaaggccttacagtaggctatattggcgcgcctgaagatggcaagttctatccgggcgaggtatcgatagatttttatcatcgctataaagaagatatagcactgtttgccgaaatgggttttaaagtttttcgtacatctatcaattggacacgtattttccctgacggagataatatagagcctaatgaaaaaggattggctttttatgatggattgttcgatgaactactcaaatatggtattgaaccgctcatcactatttctcattacgagacacctaatgagttggttaaaaaatatggtagctggcgtagtcgtaagttaattgatttctacacccgttattgcgaggtgattttccagcgttataaacacaaggtaaaatactggctaacctttaatgaaataaacaacatgagacgaaatcctggatacgtgggcgggattgtcttttctgaaggtgaaaatcatatgcaggctatctatcaggccagccatcatatgtttgttgctaatgcaaaagcgatacagctggcgcgaaaaattatgccccaggcaaaaattggctgcatgtgctcgctgagtaactgttacccaaataactgcgaccccgttgcggtttttgaaacccaggatttgcgccgacgctctcttttcttcgcagacgtcatgctacggggtcgatatcctaattacattcttcgattatggaaagagaacaattgcgacataaaaatgacggaggaagatttacaccttatagcgcaatataccaatgattttcttgcttttagctactacaggacaaccactcatgaagcgggtcaaccctatttcggcgataccgggggagatgtcggaacagaaaacccgtacatacccaccagtgaattcggatggcaaatcgatcctttaggattcagatatactcttaatgaactctgggatcgttacggagttcctctcttcccagtggaaaatggtttgggtgcctacgaccaaattgtcaatggcgaaatcaatgacaattatcgcattgaatatttaagaaagcatttgctcgctatgctcgaagcagtccgcgatggtgtgaatattatggggtatacctactggggaccaatagatatcgtctcggctggccataatgatattgaaaagcgatatgggttcattcatgtcgatatggatcgacagggaaatggaacattaaatcgcacgagaaagaaatcattctggtggtatcaatccgttattaagagcaacggaacatgtcttattaagtag

SEQ ID NO: 183886 - DNA, 1080 bp, Klebsiella oxytoca
atgaaaaaaattaatacttctgttaccatactcgcctttatatgtggaacagctaatgccgcaataatttatgataaagatggaagtaagatagatttaaatggtcgtgtgaaagctgagtactacttctcaaatgacaatagtaaaaatggtgatcagaccaatagccgactgggctttaaagttgactccagaattgatgaaaaccttgcaggatttggcgtctggcaatatcaatttggagccaaccggcccgaatcagacagcagcgggaatagaaaccgtctggcttatgccgggctacgcgacaaccgtttcggatcattcagttacgggcgttcatatgggattatgtataatatttcaaactttaccgatcgccttcccgaactcggttgtgaaacagtaaagtatactgacgtctatatgacaggccgctcgacaggtcaggcgatctggtcaacagcggatttgtttggattcgttgatggttttaacctagcagttgaatatcaaggaaaaaatgaatcatcaagaggcataaataagcaaaatggcgatggagtgggtatatctgcattgtatagtctggaaaatttcaccctcggcacagcctacagcaactcagatcgtacagatgcccagatagctcaaggcaaaacccagccggggctatacgcaagtggcagtaaagccgaaatgtggattacaggtataaaatatgattcagatagtctttatatggcggctatttatggtgaatctcgaaatatgacaccatttggcagcggttatatagcagataaaacacaaaactttgaagccgtcacccaatacattttcaacaatggattaaagccctcactcgcgtatcttcaatctaccgccaactcacagaattcaggtaaaaatgtagacattgtaaaatatatcgatatcggcgccacatgggatctcagtaaaaacatagccgttttggttgaatataaaataaatttaattaattcatcagactataccaagtcggtaaaaataagcacagatgatatcatcgtcaccggtataaattatactttctga

SEQ ID NO: 183887 - DNA, 255 bp, Klebsiella oxytoca
atggtccaccgccaccaccgagcagatgtaatgacgcgactcaaagatctcgagttcgcccaccatgtcgcctttacggtagcgggcctgacggtagcggcgcccgtcttcagcctcatagaaaacgtccacctcaccggcgataatcagcgaaaaacgctggcacacttccccctgtcggcagataaaatcaccgcgcggaatgtcttcgaagcgccagcgccgcatgatctccagaggacaatatttcagtaa

SEQ ID NO: 183888 - DNA, 729 bp, Klebsiella oxytoca
atggacttttttagcattaacaatgtgatggtcaacattcctctcggcgaaggcggctatgcgctatcgtggattgaggctatcggtaccgtattcggcctgctgtgcatctggtgcgccagccgggaaaaaatcatcaactatctgtttggcctgattaacgtcacgctgtttgcggcgatctttttccagatccagctctatgccagcctgctgctgcaggtctttttcttcgctgccaatatttacggctggtacgcgtggagccggcaaaacgaggcgcaggaggccgcgctcaaggtacgctggctttcccgtcagcaaacgctggcgctgggcggcgtctgcgcggtggcgattgtgctgatgacgctgtttatcgatccggtgttcgcgacgctcactcgtatcatgattgctctgctgcaaacgttcggtatgcaggtcgcgatgcccgacctccagccagacgccttcccgttctgggattccaccatgctggtgttgtcgattgccgccatggtgctgatgacgcgtaaattcgtcgaaaactggctgctgtgggtggttatcgacgtgattagcgtggttatctacgcggtacagggcgtttacgccatgtcgcttgagtatgtcctgctgacggcgatcgcggtaatgggttcatacagctggatcaagagcgcacagcgtaacggctatacgccgcttgccgcggccgcatcctga

SEQ ID NO: 183889 - DNA, 963 bp, Klebsiella oxytoca
gtgacaatcagcgctgacctgctatcgcctcagcggccgatcgtggttatcggcgccgcttttggcgacattattctccatctcgatgcgctgccgcaaagcggtagcgatgtctccgcccgcgacggcggacggcagattggcggctgtgcgttcaacgtcgcccgcgcgctctcgcgcctcgaactgtttcctattaacgccataccggtaggcaatggcgattgggggcaggccgttgcgcaaaaaatggcgctggaaaacttgcccgtcctcttgcgccatcccacccacgataacggctggtgtctggctcttgtcgaagccagcaaagagcggacgtttatcaccattgagggctgcgaacagcactggactgatgaactattagcgcaaataccgctgccgaaggaggcgattatttacgtctcgggatacgaactggccagcgaagcgctgcgccagtggatccttgcccagacggaagataaaacgctgttcgtcgattttggcccgcgtctgtgcgacctggatattcactttatccaggcgctgctgcgcaaacgccccctgctcaccctgaatcgcgatgaactcagcgtgctgtgcgcgcgtttatacgatttggatagcgcgacccttgatgccgcctcacggctcgccagcgactggcatattcgggcgatctgtcggtttgataaggatggcgcatgggtggttgaacctgacgcagcaccgcagcatattccggcctgccgcgtgaaggtccacgacacgattgccgcaggagacagccactgtgccggtacgatcgccgggctggcctgcgggatggatttgcagcaggcaacgcggctgggcaatgaagtggcggccattgtcgtcagtcaacccggttcagacggcgcgcccggtcgcaaagcgctacgtcagttccagattcaacagcaaaacagccgctag

SEQ ID NO: 183890 - DNA, 741 bp, Klebsiella oxytoca
atgccgcaatcgctgcttgagtatataaaagggcgtctgaatgcagaggctcccgcgccgctttatattcaacttaaacaagctattgaagcggcaatgaccgagcggttgctgacgcacggcagcatcctgccttccgaacgcaaaatgtcgcagacgcttgagctatcgcgcgtgacggtcgtgaaggcgcttgatgcgctgctggaggccgggctggttattaaacgccacggaaaagggaccgaggtgaatctgccggtaagctataaccttgccagcggcggattttctgcccagctacaaaattcaggcacggtgtccaaccgatggatggtgagggaaaagctggcggcggatgattttctggcccgtgagctggagatcgcggtcggcgatcgggtggcgaaaatcaaacgcgtccgtctggtcgatgccctcccggtgtctctcgaaaccatgtttatccccgagcgtttcttaccccgcccggatctacttgaaggttcgctgtacgcgcactgggcggaaaatgatatttatcccgatcttcaggattactcactgacggtgcatattccttcggcggaagagctgaatttgctcgacctgccgcaaggcgtgccattgatgaaaattacgctgaaaagccgcaatgctcagggagaggtgcttgagtacggaaccgcattctgcctgagcaattactttaattttgatttcagagtgaagctgcaataa

SEQ ID NO: 183891 - DNA, 342 bp, Klebsiella oxytoca
gtgtggacgattaaaacaacggatacgtttgcctcgctcgatgataccgatcgagccagcgtgcttgcagcgctgttggtcccgcaggaaaaggggccgggtttgtccagaccgtatgccgatacgcttagaggctcccgctacggcagcatgaaagagctgcgtattcaaagccggggcgatccgattcgggcgtttttcgcttttgacccggtccggacaggtattgtgctttgtgccggaaataaggtcggtagtgaaaagcgtttttacgatgagatgctcccgattgccgatcgggagttcacgagctggttgaacacacttaaagagaaggcgtaa

SEQ ID NO: 183892 - DNA, 915 bp, Klebsiella oxytoca
atgaaaaatattcccgaattgcaacatgtagaaatgcttgttcttattgtgaagcatggaagttttcgtcaggcagcaaaagagttgaatatttctccaccaacgttaactattgccataaataatctggaagagaaactgggcgcgaggcttttaaatcgttctacgcgcagtctttccctgaccgctatcggccaggaatttctgaatgacgttactcctgtgctcaatgactacaggcgggtgattgataaccttaatgagcacagagcaaagccggaaggggtggtgagactcaatttgccacgcattgtgctggatctcttctttcaacgttacttcgcaccgttcaaaaatgagtatccggatattaaacttgagttattcaccacggacagaaaagtcaatattatagattcaggatttgatgcgggtatacgctatacgcaagatgtgcctaaagatatgattgccataccctttggagaaccgctatctcttattccagtggcgagtgcggattttataaaaaaatgcggcgcaccctcttcaccaaaggatctcgttaatttcagatgcattaatcgttgctttccagatggggatctgtaccgctgggagtttattagcgctacgggcgttataacggaagtggctgtgaagggcgatctggtgatggattccgatgcggcgatgatacaggctgcggaatccggattaggtattgcctttgtatatgagaatctggttcaggataaaattaaagaaggcgggcttgtccgcttactgtctgattatcgttatcctgccgatcattttaatatttactatccgagccgcaaacatatcccggtccccctgagaacatttataacatgggtgatgtcgatgaataaaaatatcctgcagcaatag

SEQ ID NO: 183893 - DNA, 207 bp, Klebsiella oxytoca
atgcctctgaacgacactaaaatccgcagcttaaaatcatccgctaaacctttcaaagtttccgactctcgtggcctgtaccttttagtcaatccaggcggttcaataattacgttgaatttattgagcggtgctgagtttcgcgcaagccgatgcaatacgccgcccggcttcagctactgtagcgttatcggtggcaatcgataa

SEQ ID NO: 183894 - DNA, 1668 bp, Klebsiella oxytoca
atggataagctgatgtgggtgaaaaaattgcgccagattttaagccccggatatgtggttaacctctgtctttttatcgtcttctgcttttccacgttgttgatatggcgtgagatcaaggtccttgaagaagcctacgtcgcaaaccagcgcaataatcttgaaaacgtttcccatgagttcgacagcctgctgcagtttaacatcgacagaatgattttttttcgtaacgggatgcaatcggcgctgggaacgccgctggattttgtcgtattgcgcaaggcggaagaggattatttaaaaaagcggcatgatcccctctggtccgttgagattcataaccggcggacgctgccggtctatggcgttgccgatgcatttgtcgacggcgacgcgcttctctctcgcgataattccttttccggcaatgagctcatggccactcttgagctgggctatatgctgcgtctggctaataacaaccgtggttttgcgaaacgtatgctgtacgtgtcgcgcaatggcttttttaccaccaccgagccgctgaagaatgcgacacaggcgctggcgctgtattcgcgggcgacaagcgccccctggtttacccggcaaacgcagaggaataatcctgctcgcggcatcgtgtggcaaacctttcccgatgaggcatcgcagcgcgaaatgcaggtggtgacggcatctattccgcttgatttccagcgctattggctcggcgtgctggcgatggatttctcggtacaagagatgaaaacgtttctggtcaatgcgattaaaacgggcgaagagggcgagtaccagctttacgataatcggctcaatttgattgcctcctccgcgccgggcaacgtactgacgctgctgtcgccgcgggaacaggagatgctgagccgcgcgtcttctcatgagaatcagggagggattcgcctggtcacgcgttatatcagctgggaaaacttacgcaattttgatggggtactgatccgtatccatacgatccgggaaggcgtccgcggtgactttggcagcatcaccattgctttaatgctgatgtggctcatgttcacgctgatgttgatgatctcctggctggtgatccgccgaatggtgcgcaatatgagcgtgctgcagacctccctggagtggcaggcctggcacgatgcgttaacccgcctattaaaccgcggcgcgctgtttgaacgcgccactgcagaaactcgcctgagcgagcgtttaaagcggcccgttgcggtgattcagctcgatctggattatttcaaaagcgttaacgacctgtacggccatcacgcgggcgatcgcgtgctgtcgctggtggcgagtactatcgccagccatattcggcaaggcgatcttgcggggagagttggcggggaggagttttgtattgtgctgccgaataccgcgttaaaagaagcgaaggcgattgctgaacggatccgtatccggatcaatagccgcgaaattttgctgggtaacagcacgtctttgcgtattaccgcttcgtttggggtgagctgtagcgaggattcgggtgagtataactttgaaaatttgcagtctgttgccgatcatcgcctgtatctggccaagcaaaacggacgcgatcgggtctgcgccgaagggtaa

SEQ ID NO: 183895 - DNA, 312 bp, Klebsiella oxytoca
atgtcaacgattatcatggatttgtgcagcttcacccggctgggattaaccgggtacctgacgggcagaggggtaaggaagcgcgatatcactgaagtacacagtgcgccgagcctgaaggctctctgcgagaccagccgcccgacggtggtatttatcaacgaagactgctttattcatcatgaagagagcaaccagcttatccggcaaatcattagccagtatcctgcgacgctatttgttatctttatgtcgctggcgaatatacatttcgatcactacctgctggtgcgcaaaaacttacttatctga

SEQ ID NO: 183896 - DNA, 1416 bp, Klebsiella oxytoca
atgttacttcctgtgataatggctggtggtaccggcagtcgtctctggccgatgtctcgcgagctttacccgaaacagttcctccggctgtacgggcagaactccatgctgcaggaaaccatcacccgcctttcgggccttgaaatccatgaaccgatggtcatctgtaacgaagagcatcgcttcctggtggccgaacagctgcgccaactcaataagctatcgaacaacattattctcgagccggtcgggcgcaataccgccccggccatcgccctggcggccctccaggccacccgccacgatgacgacccgctgatgctggtgctcgctgccgaccacatcatcaataatcagcaggtcttccacgacgccatccgcgttgcggagcagtatgcgcaggctgaacatctggtcaccttcggtatcgttccgaacaccccggaaaccggctacggctatatccagcgcggcgatgcgctgggggaaggggagcatacgccatatcaggttgcccgctttgtcgagaagccggacctggagcgtgcgcaggcctatctggcctccggggaatattactggaacagcggtatgtttatgttccgggcgaaaaagtatctctccgagctggcaaaattccgcccggatattctcgaagtctgcacggctgcggtcaatgcggccgatagcggcagcgactttatcagcatcccgcatgaggtgttcagcacctgtcccgacgaatccgttgactatgcggtaatggaaaagacctccgatgcggtggtggtggggctggacgcggactggagcgacgtcggctcatggtcagccctgtgggatgttagccccaaagatgagcttggcaacgtgctgaacggcgatgcctgggtgcacaacagtcagaactgctacatcaacagcgacgaaaagttggtagcggctattggcgttgaggacttggtgatcgttagtaccaaggatgcggtgctggtgatgaataaaaaccgcgcccaggatgtgaaaaaggtcgtggagtacctgaaggccaaccagcgcagcgaatataaacgacaccgcgaaatctaccgtccgtggggccgcagcgacgtggtggttcagactccgcgctttaacgttaaccgtatcaccgtcaagccgggaggagcattctccatgcagatgcaccatcaccgcgccgagcactgggtgatcctcgctgggacggggcagataacggtcaacggcaagcagttcctgctgactgaaaatcagtcgacctttattcccatcggcgccgaacactgcctcgagaatccggggcgtatcccgctggaagtgctggagatccagtccggctcctatctgggcgaagacgacattatccgtattaaagaccagtatggtcgttgctaa

SEQ ID NO: 183897 - DNA, 819 bp, Klebsiella oxytoca
atgaataagttgacatccatatatcttgatctaattcgctttacggcagccttagtagtcgtattatcacatgctgccgggtttacctcactaaaaattcccataatctcagggctaggcactgaagctgtagtggttttttttgtattatccggttatgtaatagcatatgtctctaataataaggaaaataattacgcggctttttttaaagctcgagctatacgtatatattccgtgcttgttcctgctattttaattacattttttcttgaccatattggtcttaaatataacccatcttataatttctcacatcccaacttttactctgattattctttttttacatttatcaaattagtttttttcttgggtgaaggatttaatcaacatttggtttttggttcaaatgagcctatttggtcaattggctttgaatgtatttattacattttgtttggtgctttgcttttttgcaggaaaaaaccaatcttatttttaatattttttatttttatttttatctctttgccgaaagtgattatttattttccattgtggttgatgggagtgtttgtatataaaatatctaatataaattttaagtattcccactttttatttattttgacattaccgcttttctatttaaccatcaaattaccattggctcatatcccaatgtataaaccatttgtttggagtttgcatcagttttcttctattatttatttttatttgttttctctcgtggtttcgattaacattcttaccgctaaggctttttttgagtatactggtttaaaaaaatattaa

SEQ ID NO: 183898 - DNA, 1440 bp, Klebsiella oxytoca
atgagcttatttaataacgccagatgggtagctatctctcaggtagtcaaaatctttgttcagttaattaatattgtttacttagctaggttaatacccccaagtgaatatggtataatggctatggctttagtcattatcaattttggaatgttaattcgagatcttggtaccgctgctgcaataattcagagaaaagatattgatagtaaaattataaactctattttttggctcaatttgtatatggggcttggaattgcaatatgtatcgtgttgtcatctcctttgatatcatattttttccgtgaaccaaaactagtcatggttttgctatgtatttctattatatttccattgtcgagtagttcttcagctcatttggctttgttggaaagagactctaaatttaaaaaaatagcctcaatagaaatcacttcatcagttatcggtgtctttgttgcattatttttggcatataaaaattttggtgtttacagtttggtttggcagacaattatcttcaatgctttgtctacaattcagttttggaaagcctcaaaatggcgtccgacatttagcaaattgtttgatttttcaggcctaaaagaaatatttggttttagtgcacatttatctatatttaatttaataaattatttttctcgaaatgcagatagttttataattggcaggtacatggcatcctcagtgctcggcgcgtatagtcttgcatatagaataatgttatttcctatagcgagtttgacttttgttgccactagagctctgtttcctatcctgagtaaaaaccaggatgatcatgatactcttaaaaagacctatttagactgtgtttttgctattttgttcatcgttgtccctctgatgagtggtttggcatttcttagcaaaccgttcgttattctagtttttggtaaagagtggatactgacatcaagtatactgttatggttggcccctactgctataattcagtctgtattaagtacaagtggcactgtgtttatggcaaagggtcgtacagatattttaatgaaacttggtatattgggcatgttaatttatatgtctgcatttattctcggagtacaatataatatcattacttttgctaagttctattttttggctaacattattaacttctttccagcgatgtacttacttatgcgaattataaatggaaaccttttagagctttttaaaaaggcattgccaatatttttcatgggcctgattatgataattgtcatgttcattgttagaaaaccgatcaatttattatttgatgaattttctttctcatatttacttacaatgacatttattggtgcgattacttatcttatcctggcaattgttttattaaaatctgttagggtctttataattaataaagtatcatttatacgataa

SEQ ID NO: 183899 - DNA, 1929 bp, Klebsiella oxytoca
atgaataaaatccctgaagataatttttcatatgtaaagatgagttctgaatacgccgataacattgaagcattacgtgatataatacctaataatggaacacaagttcaagttaaaggagcattatccgttggcgacggagggggaggcttatggatatttaacgccaataatttatcatatgaggtttcaaaataccctcatcttttcatagccccaaatgatgataaaactggcaaatcaggtgcgtggcggctagctactacagatcgcataaatgccatccaatatggtgtaggcttaaagcccctagatacttcagtggacatctctgacattatcaagccaaaggcaccagaagatccagctgatgtaaatgaaattaatgcatataacttgtcattaggtagatataattctgccattttcacacgacaagcaacagaagcagctgcttttaacaaatccgtattagacgaactagtatattttgcgaacagtaaatattacattcacctccccccaaagcctatatacatttcacatttaaaatatgagggagtggtacctaagttcaaaggaacttttgcgacaaacagacaacaaggcactatgtttgttactactgatgcgctaagcaccgaacctgttatcaaagtaacttccaaaatggatctttctgtaaacagagttacaggtttgtttatggaggatatatccactgtttctatggacttcttttcagttcccaactacaacactttcacagataatcgatcaaaacgaacatgttatgatttcaatttcgccggagcacaaatacatttaaacagactttacgcaggtgggtttaaacaaggatttatcgctaatgaactctgggatggatacattggagaaatacgtattctttattgctccgacccaataggttctgtaccagctgttttctttggttcaaaaaacaatgacaacactaataaccttcaaattgatcacttacatgttgaattctccccttggtcgcttgagttaggtttttgcgaacacgttacatttaatgtagtgaaatgtgagagctatcgtattcttgatgcaactaattacattgtaaaaataaatgcagaagcaaccaagttaaaaataaattcacttcatgtcaccacgcaaaatgcaactaaaacacatgcaatatatgatgctggacagtttactgaaattaatacattgtggtgttctggtggacaaagtttagaattcccatactcaggcattcattggtattatggtgtatctttaactaattcaaaaaaagttataaggaacgctcatatgaatcaaatgtatgcggctgatggcactgatccgtctgattaccccatcattttagcaaattatcaacgtttcgatggaactctgcgtgtatctgatacgtatagttcatcaaagggtacatttgttaacataaacacaggactaatagcagtgggtacacagtgtgaaatatcagacatacatttaatagtaggctccggagtcaaatatgctggacctatattattttttaagggggatggttctaatgtagcacggataacacagactgcaggcaataaaatatttaggcttgccggcggaagtagctttaataatcacattggtatctttggttcacaatttcaaaattctggcaatgaaatcatatatacttatggtaagcgtattgtttttattacctcaccaaccatggtgtcccaactttttggtatggttggagacttagtgactatcatttctaaagtcgaaggaagctttctagcatatagttcagataaaatcatcactaccaatggttccaccttagcaatgataaaaggagtgccttatacatttattatgattgcaaatggaacggcagcacaaaaatga

SEQ ID NO: 183900 - DNA, 1752 bp, Klebsiella oxytoca
atgagggttttatctacagatgacaatttacgtgaggatttaagttccagcgaagaaggtaagggatcttcgttggtagcccatcgtattcgaacaatccgagagcgattttacgatgaggtaagtgtgctggacttcgggacggccgataaatatggtacagccatgatggctgccatcgattttgtgatggaacaaggaggtgggactattttcgttcctggtcgttcttacatacttgatacaactatagaaaaaacactcactgcagatatccatatcagaatgtcgaatggtgcgaatgtaaatatcaaaaaagctatggacgtgtattcaattacaagtggtaataatcaattcataatagaaaatggaaaaacaacagtcgctatacttgaaacggactatactcatgctgtagtgagaatgtcaggtaagactctgcagcaaaatattaaggtagtgggtcatactttccgtcgtttaaataatttcaatcttggtttttttgtttacggcgaaggattaaatgctgcagaattccttcaaaaccatatcagtgctgcagttgtaccctaccatcttgaatcctcgtcggaaaatagtaactcaaggcttattgcaaatgcaatggaagctgaaataacaggcaacaaaatatataatgccgctaatgcaattgaagttataaataaaggttactatggttgtgaaggagtgagaattaaaaataacataatggtctgttctaaaaatgctattacagtcatagccgattcatctcttagagctgcatacatgcccccgttattccaaattacgggcaaccatattaatgcatatagagcgttatatgcagaaaaaatatcacgactttttttcacccaaaatgacatacaagctaaattcaaggaaaatgacgaaatccttggtgttattgaaatctattcaactcaaggatggactataactaacaatatattctctgctgtttcacaggatacatctgccaagtctaacattaaccctccaatatatttaggcaagcttgatcctgcgctccctaatgcttatggaacgatcgatacgaacacattttggcttgacggcatggtcgaaaaagcgatcagttttgagtcattagatgcatatacaggtcagagcataaaatacggcataaatattatccaatcattgagtgctataatttcaagagcatacagaagtaaaattattatagcagagatgaatagtcttactgcgtatgatgccgcagaaggtctggcgtattcctcatctgactcaaattatacctacgatgttaaccaaggaattctttacattaaaggaagatcgcctgcgcgaaacgttcatattattagtaaaaacgtgttgcctgatggttctattattaatcagattgtagctgaaaatacctatggcaaacaactgataattaggctgaccgcctctgagattaccatagttcatggagcaaacttaattgcaccagatcagaaaactactaaactttggttgccgacatatattattgtggagtttttaaacaaccaacaatgccaaatagttgctactagtggtatttcctcacgaccagtcgtatcttctaatcctacaactggtgccagaggttcaacaggagatgaatattatgactcacagtcggggttatggaaaaaatatttcccaggggttggctggcgtgtaatttccactatggaaaacaaataa

SEQ ID NO: 183901 - DNA, 834 bp, Klebsiella oxytoca
atgagttgggacgccgacctttccaaacttatgagtttatgttttcttttaatagaatcccaaaatggtgagcaactgcttcctggatgcgaatggaaaaatgatgctcaagttttgagcgtgaaaatttttaggcatatcgcaacagctcaacagattagtgcgggaattggctttgaatttggcgtggggcaggtcttttcccatatcgatcactcctcagtggcagtcgtcgtaagagctgccatcgaatcatacttggcctttaactatatatttgtgaatcaagacgaaagcttgtctatttatcgatataagctttggcgccgagccgggcttatagatagaagcaagttattagcaaatacttcagagagcaaaaatgttctctcacgggaatccgagtctataaaagaactttataatgatatagctcgcgacccgcactatcaaaaaagcaaccgcgaagaaaaaaaggaaattgaaaaaggaaattggaagccaaagggaggctggcacgccatcactaacaagactgacattcaccaacgttacttcagtgatatttacaatcacttaagcggtcattctcatgcaagctttataagcgccctacaaattagagatgcaaggagtattgagcaacaagccatgctggcgggagctacgcgtcaaatactgtgcatggtgatttcgcactttatattttcctacgtaaagttgtttcccgctgcaaaaacagtaatggcttcaaatcctgaactaactgaaattgcagatagatggcacatacataaagaggaagtggctgcgatctatggtcctgttcagtga

SEQ ID NO: 183902 - DNA, 345 bp, Klebsiella oxytoca
atgagcaagtcattaaacgcgcgttgcatacgtcgctgggaagttgaatttaaaggccgctgcgattcgaaatatagcccgtactggcgtaaacgcgacctgcgtgggtatatccgggaggccgcgcttactactgctgactgcatggttgagcgcttagctgaagataaggccagggtggcttttcacggatattcatatggatggtcccctgaattctcagcctggtacgccgaccgccgcgaggcgtatctgaccgcagcacgccgcgacctcaataagagcgctaccaatgacgaaatcgacgacgaaatacagaacgagttggaggcctggaatgactga

SEQ ID NO: 183903 - DNA, 543 bp, Klebsiella oxytoca
atgaaaaataaagatgaagagctgaaagttgtcgcagtggtacagataaacagcggagaagcattagttttaaacagaccgctcaattttatctatgaagagattggaagagatttaattggcagtgacgggccatttaaacgagccctcttttattcgccagcaagtgcggcattcaaggcgtttgcagggagtgagatgacgctaaacatgcgggatggaagccaacggaaagttaaagatcactggtggtcaggttgcctgccagagcaccaaagcgtaacagcatgcgacctgcaatctctcaagaagtgttatgtatttttcggtggcatggctatagcgcctgaagattatcagaccttacgtgattcctacactggctgcgtttacccgtattgggattatgaaaagctgatcaaatacgacgatatgcgcaaagacctttaccgaagactttttcacgaacaaaagcgagttaaatcactgataactgaagttaagaaaaaacaggcgattttagatggtgggcttaaagaatga

SEQ ID NO: 183904 - DNA, 927 bp, Klebsiella oxytoca
atggctactcaactcatcgaacaggtatttagcctggtaaatccactaaaggctgaatttgagcaggtttgctctgaaccttctatcaatttcaggcgtgaatctgagttcgcaatgcagattttcgccaataacgactacctggctaaagtcgccatcggcaatccggttagcaccagaagtgcagtaatgaatgttgccgggatcggcgtgtcccttaatccggctcagaagctggcttatctggtgccgcgcaaaggggctatctgtctcgacatcagctacatgggcctgatgcacattgcgcagcaatccggggctatcaagtggtgccagtcggcaattgtccgtaagaacgatcagtttcaccgcgaaggactggataagccaccagttcatatttacaacgatttcgataccgcagaacagcgcggcgacattgtaggcgcctacgtcgttatcaaaagtgatgacggcgactacctgactcacacgatgcgcattgctgatatctacgcaattcgagaccgctcagaagcatggaaagcctacaagaacaaaggcacatcatgcccatgggtcacagatgaagaacagatgatcctcaagacggttgttaaacaggctgcgaaatattggccacgccgtgaacgcctcgatgccgccatcgaccacgttaacactgagggagaagaaggtatcaactttgccgcccatcgccagcctgaacgcgacataaccccagcagaagcaggaaccatcaaagaaattaacgatgtccttatcgcaatgaataagacgtgggatgacgacctgcttcctctgtgctcaagaatttttcgcagagatattcgtgagtcttcagacctgactcaagctgaggctgttaaggctctcggcttcctgaagcaaaaggcggcagcatga

SEQ ID NO: 183905 - DNA, 660 bp, Klebsiella oxytoca
atgagcatgaaatggtatgacctagcaaagtccctcatgaaaacgaagggcataaaccaggaagagctggcagaacatctcgggatcaccaaaggtgccgttagtcattggctaaacgcaaggagagagcccagcctggaggacatagctaaaatccttcgcttcctcggcaagaataatttttctgtgggtgctggcggcatgataatcgatgaaaacatcaagggtgatgttgagtacgttgggccatataagcgcggcaacgagtatccagtgcttagtagtgttcaggctggatcgtggcgagaagctatagaaccttattccatcaaagatgttgatttgtggcttgagtccaatgcacatatccaaggggaagcgttctggctgcttgttgaaggcgattccatgacttcaccagtcgggcttagcattcccgagggtacctacgttttgtttgataccggccgtgagccagtaaatggcagccttgtgatcgctaagctatcagaatcaaacgaagcgacattcaaaaagctgattattgacgggggccagaaatacctgaagggcctcaatccccaatggccactagtcccagttaatggaaactgccgcattatcggtgtagccgtagaaaccaagcttcgccttatctaa

SEQ ID NO: 183906 - DNA, 219 bp, Klebsiella oxytoca; identical to SEQ ID NO: 103440

SEQ ID NO: 183907 - DNA, 285 bp, Klebsiella oxytoca; identical to SEQ ID NO: 103441

SEQ ID NO: 183908 - DNA, 303 bp, Klebsiella oxytoca
atgaaaaagaactctggcaaacaagccgttattaacttcatcggccagcatcctggctgcagttttcaggatatccgccgcggtaccgaccttgactcttcagtagtcaattcctctctgtggcagatgcaccgtgacggccaggtacagcgtgaaggtgagtgcaggagctaccgctacaccctgattgacactacagccgtaaccgacagcgatccgtctgttcagtatcgccagcgtcctggcggcgtaaacccaatgaccaatctttttaaccagtgcctggcgggagtaagaaaatga

SEQ ID NO: 183909 - DNA, 435 bp, Klebsiella oxytoca
atgaacatcgaaacagtaaacgaactcattcagtcgctggagagcgcaggcgagctgtcgatcagagagcagaagttcctgaagctggcgaaagcttaccagcagctggcggcggagaatgtggcgctgaagtcaaaaggcaaggaattgctcggcgaagcatgcgccgtgtactcgaggctcaataaactgatcgacccatcaatcggtgattttgttgacggtcagacgttacatgaatttcagtttgttctcgacgtggaaacccccgccaccgatcgcatcgtagccgggattaaggctgatggggtggaggcgtttgcggcaaaacttcgaattcctggtgatgaccagttttttgacgctttagcaaaaggggttgcacttgctgctgacgacttcgccaagcagctgcgcgagggggccgaaaaatga

SEQ ID NO: 183910 - DNA, 252 bp, Klebsiella oxytoca
atgagcatcgaccactttgatattgaagaattactgagcgccatgtacggcgtcaccgacgagcagcggaatgatggttttgattttgatgagcttctctacgagaaattcgatatcggatttgaagaattctcaaaagttatttcggtactgctgccgctgacgcctgtggttgagtccgcgctcaccggtaagaaataccacgcatttatcaaggatgggctggcgctcgtcaagcaggaggccaaatga

SEQ ID NO: 183911 - DNA, 435 bp, Klebsiella oxytoca
atgactgatatcaccgaactggcgcagagcctgaaacgtcgagctgcttcagcaaatgagtttggcgaaggcctgttcttcataaaagccgatgacgttctggcactggtagaggcgctggagaaggcgcagcagcggattgatgaactggagaacgatgaagttcgtcaacggctggctaacgctgagcaccaactctacatggctgaactggctaagcataacctcaaagcaagccgcaatgcccagttccgcaagcgcaaggcggctgagcaacgaatcgccgagctggagtcccgcaccgtcaccgtgaagttgccagacttcaggcatgagcacttcaatagcgattggggtgagcacgatgcagaggcttatcaggttgctctccgggaagcgatgaccacatctggcatcaaggttgaggctgagtag

SEQ ID NO: 183912 - DNA, 294 bp, Klebsiella oxytoca
atggatactaaagaattgttggaacacattgacgccggtgactattacgaagccagttgcctgctggatgaaaagtgcccaaccgctgggcgcagatttaaacgcctaacaaaaggcctggcggagctactaaaggacgtgcagaaagagttccctgacgcgaattattacaccgcttccggtggttttaatttgttgctgggtagcacaactgactgcggtagcaccgagggcaatcagcttattgccgtttctgccagtgaatatctgagcgtgggcgacggagatttttaa

SEQ ID NO: 183913 - DNA, 450 bp, Klebsiella oxytoca
gtgaaacagcaattccacctcgtcaacgacgctatcaaacagaacgccatcaatttcattcgagaattgccagtggatgccaagcgcccgctgatcctcgatatcaaggagatgacgcgcactctcgaacaaaacaagaaaatgtggccgcttctgaaagacctgtcagatcaggttgtctggttcggtaacaaatacgactccgacgactggaaagacctcattactgctcttgtggccaagtcaaaaaaacaagagcagcgcatggcccccgggctggatggcggcgttgtgatgttcggtcagcgtaccagcaaaatgacagtgcgccagatggttgaagtcatcgaggcgatctactggttcggcactcaacagggcgtcaagttcagtgaaaagtcccgcattgaaatcgaatgggccaagcgctggggagaatcccatgcatag

SEQ ID NO: 183914 - DNA, 171 bp, Klebsiella oxytoca
atgcatagccccctcgctaaagtaatggagcgctcaatcttccgcatgccggcacgtcgcaagcgtaaggtcgaagttaagccttccgacatcccaacactgaaaggctatacggcccgtctggtcgacaagaagtggctctgcctgagagcaaggaggccgcatgcgtaa

SEQ ID NO: 183915 - DNA, 639 bp, Klebsiella oxytoca
atgcgtaagccagcacgccgtaaatgcgctcactgccgcgaatggttccatcccacccgggaagggcaggtggtatgcagttttgaatgcgccagcgcgatcgccaaaaagcagacagctaaagcccgtgaatcggcgaagtccatggcggtgaggctccagcgccaatccgagaaagaggggcgccagcgtcgccgggccaaacgcgagtcattcaagacaaaggcccaatgggataaagaggctcagtcaacctttaaccggtacattcgcattcgtgatgaagataagccgtgcgtcagctgtggcaatccactcatcggcaagagcaactacctgaccggcagcgccattgatgccagccattatcgttcccgcggcgcggcgtcgcacctgaagttcaacgtattcaatgtccactccgcctgtacccgatgcaaccggcagttgagcggcaacgctgttgaataccgcattcacctgattgaacgtattggcctggatcgcgtagagcgccttgaggctgataacgagccgcgccggttcgatattccctacctgcagcgcatcaaatccatattcacccgcagagctcgcgcgctggagaagcgccgcgcccgccatcaggaggccgcatga

SEQ ID NO: 183916 - DNA, 225 bp, Klebsiella oxytoca
atgagcaaaatccaatacccaatgtccactgccgctgtttttgatgacgtggtttatcccatccgcctgaacggatcgcatcagatagagagcgaggttatgggcgcgatcagatggttctgccggtggaacaacgaggaaatagccgtcgttaaggcgcatgtgctgtttagctgctggggtctttacctgacgtatgaccagcttatggaggaggccgcatga

SEQ ID NO: 183917 - DNA, 231 bp, Klebsiella oxytoca
atgaagatcacctatagcgacgaaggggcttattcccgcatttggctgaccggtccattttggcaactggctatggccagacgcatagcggacgcaggactgtacgcttccccggtcaatacatgggagtctcgcggcattacattccagatcaccctgtacggaaagagcgcgtatgtgctcagggcgtataaggcgatgattaagtccattttgagggtatcaaaatga

SEQ ID NO: 183918 - DNA, 312 bp, Klebsiella oxytoca
atggctaaacgtatgcaagacaaagagagcattgccgggatgtcctggctggttctgctgatcattgcttgctggggtggacttgtccgctacctgatagatgtgaagcagagcaaggcaacatggagcttgatcaatgctcttgcccaaatggtggtttcagggtttaccggcgttattgctggcctggtgagcattgaaagcggactgagcatttacatgatactggccacttccggaattagtggggcaatgggttctgttgctttgacctatttctgggagcgcattaccggagtcaaggcgccatga

SEQ ID NO: 183919 - DNA, 150 bp, Klebsiella oxytoca
atgagcactactggaatactgaccgcaaaggtcacgctacggccatatatgaagccgctactcatattgtcggcattgctgcgctggaactggctcaccgacaaatgctttaagattgaggtcgtgagcggtaacgaggcagaattataa

SEQ ID NO: 183920 - DNA, 489 bp, Klebsiella oxytoca
atggctgcactaaaaccagaagtgagagcctttatcattcaagaacttgcatgctttgatacgccatcccaaatcgtcgagtccgtacaaaaagaatttaaggttcaggtgacgcgccagcaggtagcgtcgcatgacccaacaaaggccgcaggtaaagggctcgctaagaagtgggtagaccttttcaatgctacccgcgagcgattccagaatgagatttcagatattccgatcgccaataaggcgtaccgtttgcgcgttctcaaccgcatggccgtaaatgccgaaagcatgaagaactacggtatgaccgcacaactgcttgaacaggccgccaaggatgttggcgacgtctacacgaacaagcaaaaagtagagcaaagcgtggttgcgactcataacgttatgccggtcccgtcctgcgacaacgttgacgactgggaaaaggcagcacaaaaacagcagggcgaggtattgggtggatga

SEQ ID NO: 183921 - DNA, 183 bp, Klebsiella oxytoca
atgagtagtattcatttcgaatcaaagcgaatcggcgatatttcatgcacgcacgttaagataggcggcgtcgaagcgatgatgaagcaggtaggtgatcgcaaagtcatcaagtcacaaggtcgcggcaacgtgcgtcaagtaaaagctatcgccagagcgctacacaaaaccattaagtga

SEQ ID NO: 183922 - DNA, 171 bp, Klebsiella oxytoca
atgtgggagcttaagtacgatggacccggctggatttattcgaagccgggatcgacgatagagctacggtatgagagtggacaggtgctgaatcttgacgcgtcgtggtggttccctgttaagccaaccaagaaacaactccggcaggctcgcaaaaacaaacttcattaa

SEQ ID NO: 183923 - DNA, 1401 bp, Klebsiella oxytoca
atgaaacgcaaccgcgttaacgtgctgaccgtcgtcaactccgcttcaaacatcaccactgaaaccatcgacggcaagccacatatcgtggttcgcggcatcacgcctgtcgtggacgatatcgtgatgaaccggaagttgtacccggcagcagaaatcgaaaaggcctacaacacgcttgagcgcaacccgatgccgctgggccatccgaaagtggacggcaagcacgtttccgcgcgtgatgtacgggcggtgaataactaccacgtcggcgcatggctccagaacgtcagccacaaagacggaaaagtcagcggtgatatgtacgttaaccgccagtacgccgaatcaagcgagaagggcaagcgcctgattaaccgccttgatgagatgatcgccggtaccaactcagaacccatccacatctccacaggactcctgtattccggcattgccgctaatggcgagtcgaagggcaagaagtacaacgagatcgccaccaacatgatgtttgaccatgtggcggtgctgctggacgagccgggggcagggactcctgatgaaggcgtaggcatcttcgttaactctgatggtgatgagcagcagattgaagtagtcaggctctcggaaggcatcgactgcacccgcgaagggctgctgaataaaacccgattcttcttcaccaatgcctcgaatttctcttttgacgatatccagcgcgccatcagcgacaagcttcacgaaggccgtgctgatgataagtggctctggcccgaatcggtatggccggacaacttcatctaccgcgatgaagccaagtatttcaaacagaagtacctcatcgatgacgacggcaaagccgtgttcgtcggcgaaccactcgaagtcgtgcgcaaacccattgagtacgagattaaaaccaacggagagaacgatccgatgaaagaactgattatcaatgcgctgcaagccgcgggtaagccgactgaaggcaagtccgatgccgaactgatggacgcttacaaccagttagcggcagagaaggcggcagccaaaaacgaaacgccggaagaaaaggccgctcgtgaaaagaaagaggctgacgataagaaagccaaagagcaagccagcaacagcgaagagatgccagcttgggcgaaggtccttactgagcaggtcaccgcacttaacagccagatcaacgccaactctgacaaagagaagggcgaaaagcgcgcggctgtgaagcttgcgatgaacatgagcgatgaagaagtcgcggatctggacggtaaggcgctcgacgccatgtacgcgaagtgccagacatctttcggcctgaacggtgcattccgcaaccaggcaactaacacccaatcagtcagcgaaatgccggagtaa

SEQ ID NO: 183924 - DNA, 435 bp, Klebsiella oxytoca
atggctaaagacggaaagcatatcatccacgccggtggcgtattccctaacccgctgctcaatcgtgaaggcggcgcagctgcatctactcttccgggcaccgttggcttcttcagcaccacggataaattcacggcttctgtggcaggtgcagaagcagcgatcaagtacgtggcaaacaaagattaccttcgctgcctgagcgttgatgatgccattccaaccaatgagttggtcgtcggcattcatccgctgccaggcatgttcctgaacgttcgtgctgctgccggcacctacacgaaaggccagcctgtcgccgtcgcaaatggtcgcatcaccgccgttgtcgctgatgccgttgtattcgcctacatcgaagaagataaagctgtcactgcggtggcgggcgatctgattcgcgttgtgttcaagtaa

SEQ ID NO: 183925 - DNA, 1098 bp, Klebsiella oxytoca
atgtttgtattctccaagtctatcggtaaacagaccggtaacctcgcagtaaaccaggcgcaatggcgcgccctcgaagtggagcgaaacgctagtgctcaggcagccgctgattttcttgctcgcactaaattccgtggtgatgcagaagatgctccttatctggacgcggtgaacgcagttgacgatattcgccgcctgtatcgcgctttcgacaccacggtgcttcagcagtttgagccgaataccgagttcaccctgctgaacgacctgatgcctctgtcgcgctcagttcgcatcgaacaatcccgttacgattacgcgcgtaccggcggccgcggctgggcacatacttccatgtcagggcaggtcggtgcggcgctggatgctcgcagctataccttcgatggcaccatggtacctatccacgattcgggctttaagttcgaatggcgtgatccaatcttcaacagcccacaggcattgcagtcgcagtcggatgcgcagcgtggttccgttgaagacgttcagcgtcgttacgttgactacattttcaacggcttccgtgacaaagctggcaacttcgcagtgttcgatggacttacctggaaaggtctgcgtgacgatgagcgtgtagcgcagatcgaccttggcgcctctggacttaacatcgacttcacctctggtaccgcaacgtctcaggctatccgcgccggggcaatcgcgctgcgtgatcagatgcgtcgcgtaaataaccagtatgcacagcagacctggtacgtatccggtgaaatcatctccaacctggagcgctatttctccgacaacttccagtccggcacgatcatggatgaaatcctgaaactgaccggtgttgcggcgattaaagaagacagccaactatcaggtaacgagatcgtaatcgctccgctctctgctggcgttattgctccaatcgtcggccaggctataggtaccgttgcatctccgcgtccggagtacaacagcgactacatctggcgtacatggggtgcaatggggttgatggttaagcaggacatcaacaataaatactccgtaattcacgcatcaagctaa

SEQ ID NO: 183926 - DNA, 366 bp, Klebsiella oxytoca
atggcactggtagaaatcgtggcaagcaacctgcacgccggtgccagcctccgcaaactggaggttggttcggtggtggatgtagacgacgcaacggcggagcgctggatcagcactggcaaagctaaggagaccgacaagaagaaaggcgagaagctttccttcgaagtggctactccgtccgcgcctgtagcagaactgactgccctgcaaaagcaactcgccgatgcactagagcagaaccaacagctattcgccgatggtgaagcgaaagacaaggctcatgccgatacgttggcagcagaaacaaaacgcgctgacgaagctgaagcggcactggcagaagcaaccaagaaggcgaaataa

SEQ ID NO: 183927 - DNA, 273 bp, Klebsiella oxytoca
atgcttgaagccaaacaaatagctgagttattgaatcagctgttcactactgacccggtcgctgccgctaagttggttaatcatcgcgttgagtgtagcgacgcgttcctcgagagcgatattccgtttgtctgctcacgtaatagcgaaggcgtcatcactatgggtgttgttggtttcgtcaacgcgctggcaaagcctggtactggttacgccgctgccgtttatgaaggcaatcagctaactggcttcaccgtcgtgggtgctgattaa

SEQ ID NO: 183928 - DNA, 369 bp, Klebsiella oxytoca
atgggcgctaaagttcgcggtatccgccaggctaaggccaatctcgaccgcattattaaggacgtccaggggcgtaaagtagtgcgcgcgttgcagtcggcgatgctcatcggtagcgcgcaggccgcgctttacaccccaatcgacacgtcgacgctcatcaacagccaagccagggaaatcactgttaacggaacgctcgtcaccggtcgtgtaatctattcggcgtcttatgctacctacgtacatgacccaaacattcctcaaaactttaggcgagcaacggcccgtaaggagttcttaacgaaaggcttcgaggatacccgcagccagattgatgcggctgttaaaaaggaactagccctatga

SEQ ID NO: 183929 - DNA, 222 bp, Klebsiella oxytoca
atgatttatccattcgatgcatcctatgctcaggaagtgctgagaaaacattatcagtatgcggacatcctcgttaatccccgcgaaagtcttgctgcaaagacggctgggctcattgctcacgacggacacctctcgaaatgggatggcgataaaagcacgtctgaaatacgcagggagttgtcgagaaacaccgaagatattgaaacaagggcggcataa

SEQ ID NO: 183930 - DNA, 405 bp, Klebsiella oxytoca
atgatgctaccgtgtttctataaaaatttatggcgtatgaaaatgactgaaaaagataatccgaactttgttgagcgattcaccgtcaggatgccggatggaatgcgcgacgctatggccgagcgcgctaagcggaacggcaggtcgatgaactcagaaattgtccagatccttcaggatgcgctggagacagaaaagctgatagctgaaagtgacgtagttgattttgattcaactcaggcggccctggcttccaaatcaacgcctgaagagaaagcagcatttcttgccgatcttgagaaaagagatccattcaccgcagcgattcttcgcgagggagaggaacataacagaagacttgcagcaattcttttaaagcgctttggtcacttagatatgcattag

SEQ ID NO: 183931 - DNA, 174 bp, Klebsiella oxytoca
atgagtgatgttctttataccggacgtaaaaatgacagcttccagctacggctaccagagcgcatgaaggaagatatcaggagactggctgagatggacggaatttcgattaattctgcaattgtgcagcgtttggcaaaaagcctgcgtgaggaacgcgtgaatggtcagtaa

SEQ ID NO: 183932 - DNA, 708 bp, Klebsiella oxytoca
atggtcagtaaaaacagcgaagcccagaagtgcgctaacaccctgggcctcttatcgaacagatcccggaaaggaaatatcgacatgaacattgtagcaagatcagacctcaacttccaaggtaaagcgattgttccagttaccggcatgactggtatctggctgacctctgcagaaatcgccagtgcgcttcagtacaaaagcgcgaagtcagtaacaaacctgtttaaccagaactccgacgaatttaccagcggaatgactcaggtcatcgaatcagtgacctcaggaaactaccgcaaaaaggtacgcgttttctcacttcgcggcgctcaccttatcgcaatgttcgcccgcaccccggtagccaaagagttccgccgctgggtgctggatattctggatcgggaagtggcgcactcgccgattgcgaagcagttcagtgatgatgagctttgttctctggcatggctctggcgagccagcgacatcatgctcaaggcctgcgatagcgtcactccgttgttgaaagtggcggaacatcgccaggctggtcattttcattcaatcgggcaggagttgccacgatcgattaacaaggcaagagcagtaattaagcgcgaaacagcgcatatcgaatttcacccatggaaggatgataactggagcagggtattaccacacctgcgtcaggagatgttgcagtga

SEQ ID NO: 183933 - DNA, 516 bp, Klebsiella oxytoca
atgaagaagcttattgttttcggtttgttagttgtaatggggggcattgttgccggaatcgcattggtaccgactcaggatgctcaaaacgcagcaatgacagaagcatgtagctcaataatcgaatcgagaatgaaatcaccgtcctcctactcgatggaaaaggccattatcagctctgagcagttgtcaggagaagaacttaacaaaaagattgaaagccttcaggttgagtctttgcgcgagggggtgagaaatgggctttttacgcttaaaaatgccgatatatttgtagatttccaagcaagcaatgcttttggggtgcaactaaaaggtttgggtaaatgtgaatacaatattttcagtgatgattgggcatctcttgagtctgtgataattgatggtaatgcattgccttccgttgacgttactatcgaatcagtaggtaataaaattaactctggattctcctcaaagttaaaatatttacaatacaaacttcaaggcaagatataa

SEQ ID NO: 183934 - DNA, 2712 bp, Klebsiella oxytoca
atggctagcgctgaacaggttggcaatatcgtttacgaagtcgagatgaatgtcgccagacttatcgaagcccagcagcaggttaataagcgccttgatcagatggactctaagtttgagcaatcatcacgatctgccgggcggttcgaaggtgctttaaataaagttggcgttgccattgcagcggctttcaccattgatgcagcgaagaagcttatcgctatcggcgacgagatggttacgctacaggcgaggatagccaggttaagccccagtattgatgcagctaaagatactttagcctctttatctgctattgcatcacaaacaggaagcgggctttatgagacggaaaaattatgggaatctttaacaacctctctcaaggaaacaggggcaaccaatgctcaagttctatctttgacagccactcttcaaaagattgggacgataggagggtcatctgctgaagagatgagtaacgctttgcgccagtttggccaatcgatggcgaaaggcgttatacaagcggaagaattcaactcagtaattgagcagatgccagaactggcaaggcaaatagcagctggcttagggatatcaatcggcgatcttcgcaagagaatgctggaaggtaaactgacggctcaggatgctctgaacgccattcaacgtcagtcgcagtcggtcaatgaagagttcgataaaatgccggtcagcattgatcgcgcaaagaacagcctcgatgtggccttcaaaaatgccattaacgacctgaaccaggcaataggcctgactacgacccttgcaggattgatgcagagcgtcgcggataacctcaattactacaacaacaatgtcggcgattcttcaagaatgccgaagctgatcaagctccagcaggatctgaacaatgagctgaaagacggccagagatggtatgaaactgactcagtttttcaggccagaagggcgcaggcagcagtgcagctgaagcagatcgagggggaaatagcccacattcgagcaaaggctcagaaggacgccggaagcaaccagtttaatgcgccgccgaccaaaggcgatgacgccgcaaccaagaagctggttcaaaactctgaacgccggcttgcgttggccaaacttgaaggcgaggcgcgagccaggcttcaggcccaatatgatgctgctgatgccggtgtgaccgatcctaagcgaataaaagcgctgcaggacgaatacgccgaaacctaccgggttacggaggccaggaaggaaagcgacaaagccgggaagcagtcggcgtctaccgcagattctatcgcccaaaaactcgaaagtcttcgccaagaatcagagcttgcagcagactcaactgagggtttaacgcgagagcaacaactactcagggctgagcaatcccttggtgcgcatgcaactgatgagcaaaagaaaaaagctcgggattataaagcggcagctttagatgccgctgctgcggctaagggggtgtctgaagcgctcagggctatgcctgagcaggcggagaataaatcctacgctgaatccatgcagaacctgaaagcggcgctgaacgccggaaagattgatctgcaggaatacaacgcagccactgagcagatggagcagcagcatcaggccaaccttgccaaaatacgctcacagcaggtggttaaccccacccagcaggcaattgctgaagttgatccggtgcagcagttggccaaccagcacgcgcaggagctggcgctgattcagcagttcgagcagcgaggggttctcgctcatgagaatgcattggcgctgaaaaatgccgctgaccggcaatatgagcagcagcggatcgcagctcaatgggaaatcctcagccagcaaagcctcggctataacatgctgacgagtgcggtggatgcgtttagcgggaatgcctccaatgcaatcaccggcctgctaaccggcacaatgtcagcacaggaggcgatgcagtcactcggcaataccatcctgaacagcgtgatcaacagcattgttcaggtgggtgtggagatgctgaagaacttcatcttatctcagacgctgggggctgctgctcaggctgcaaatgctgcgtctgctactgcagggggggctgcggccctcgcagcttggacgccggcagcaattgccgcctcaattgctactgggggaacagcttcagcaacaggcttaaccgcgtatcagggggcgcaagccgccggattggcaacaagtgtgctcggtggccgcaaaaatgggggccctgtaacagccggcggagtgtaccctgtaggcgaagggaacctcccggagttcatgcagaccagcaaaggtctattcatgatccctggtgatgatggtcgagttttcagtaacaaggatgtgacaagcgggtcaccgcgtatcaagaaagcctcgacgggtagtgaataccaaagccagagcagccgcgacagtggttcaacaggatcgcagtcgtcgaaatctatatcggtaaacgttcagttctatgatcagacttccggcggacagcattcattccaggcgcaggccagccaggaaggtagcgtcgtgacagtagagggttttcttaccgatgttgaacgcaatggaccaatgtcctctgcaattcaaagcgcttttggtctcggaagaaaagcgcaaggtgcttactga

SEQ ID NO: 183935 - DNA, 468 bp, Klebsiella oxytoca
atgaaagtagcaatcgaagttaatggtgaggttatctggtaccgcgacagcgataaacaggagggggtggcgtcgttgggctacttgaaggacggcacacagcagaaaatcattgccgcccttgaagaggcattattccaggcgaaagggcagttacaaatatctgatagccatgacgcgccgcgggcaaagacgataagcgcgtcgatatctatcgataccagcgaagcccaatcgcagcttgatgatttaatctccttacttgagcttaaatttggttcccttcagtctgtcccgaagcgtatcaaccaggaactctctgccatggcgaacgacatcgtctttgctgatagctcgaccacaggaggcgcaggactcgacattatctatggtgtgcggttcggtgctaaatatgaattgctcactgccgcaatcagggcaggagagtttgattctgaatttctctga

SEQ ID NO: 183936 - DNA, 660 bp, Klebsiella oxytoca
atgaaaaagttatatgtattatgcgcaggtttattactggccctgctgctgagcggctgcgcgccgaaaaaatcctacgactacacggcattcaggcagagtaaaccgaagagtattctggttctgctgccgaaaaacgaatcaccggacgttaaagcgggctatggggtactttcgcaggtcacgctgccgcttgccgaggcgggatattatgttttccctgttgccgtcgttgagaacacctttaaacaaaatggcgtcgtgaatggtgaagaaatgcacggtgtcagccatcaaaagctaagagaaatttttggcgccgatgctgtgctctatcttaaggtcacggaatatgggacatcgtatcaggttatcaacagcgatacgcgagtcgcggtttccggtgaactggtggatattcgtaacggaaaactattatggaaaggcagcgcggtggcttccagcagcgaaggtgacagcagcggcggttcgcttttaggcatgcttatccaggcggccgttgatcagatagtcaataccatgaccgacaaaagctataaggtcgcgggcattgccgatgcgcgcctgttaacgcctgccgcacccgcgggcatgctttacggccctcgctctccgaaatacggtaaagatttgcaatag

SEQ ID NO: 183937 - DNA, 357 bp, Klebsiella oxytoca
atgaatattattcgttctgttttcattctgctcgccgcggcggtgataagcggttgtgcgacaagtcccaaacccctctatagctggaatgaatatcagcctgtggtttatgagtattacgcgctggatatggggccacaagagcaaatcgaagcattaaaaaaagatattgaaaaagcgcgggcgcaggcacttcctgttccgccgggactgcatgcgcatctggggatgttatatatcgataccggtcacccggagctggcaaaaacagaatttgaacaggagaaacggctgtttcctgaatccagccagtttatggattttctgttgaagaaaatgcagggaggcaaagcatga

SEQ ID NO: 183938 - DNA, 672 bp, Klebsiella oxytoca
atgttaaagaaaatgattgccgcgataggcttcggaagcctcgttttattaagcggctgcgcaaaagaatcctcccgctctcttgaagtcgctaaggtgacaacctggaatacgccctaccacggcgctcgcagcccaatttcagtgggtaagttcgataaccgctccagctatatgaacggcgtattctctgatggcgtcgatcgtttgggtaatcaatcaaaaacaattctcataacacatttgcaacaaaccgggcgattcaatgttctcgatcggagtaatatggccgagttgcagaatgaagccagtattaaagggaccagccagacgctgaagggcgctgattacgtggtgacgggcgacgtgaccgaatttgggcgcaaggaagtcggggaccatcagttatttggcatcctgggaagagggaagagccaaattgcctatgccaaagtgaatctgaatatcgtaaatgtccagacatccgaagtcgttttttcatcgcagggtgccggggagtttgagctttctaaccgcgaagtgatcggattcggcggtaccgccagctatgactccacgctaaacggaaaagtgttggatctcgctatccgcgaagccgtaaataatctggttgcaggtatcgaaagcggtgcgtggacaccggctaaataa

SEQ ID NO: 183939 - DNA, 684 bp, Klebsiella oxytoca
atgcggttaaatgatagtgtgatcggcggactacgcgcaaaagattcagcttactacgttttccgggacgacggtacaaggggaaccggacggttaggtatcaaaattttcccttcaggacgtaaatctttcgtctatcgttttcaggctggcggcaaacgtaagtttaaaaccctgggagactggcctcatttcacgctcgaacaggcgacacaacgttatgctgaactggcaggtatggcgcaccaggcgcgttctgacgcgatgggtaaaaaaatgcgcaccggaacactgcgcgagctattcggggctttcatagcgtataaatctcgctcaggccatcgcagtccgattggtcaatacggcgcactccttgagcaattaattaaactaaaacattttacaggtgatgaatcagctaacgagattacatcagtacagattacccactgcatacagcactggacaaaacagggttttatgtcaagggcgaaagaagtaaggaaaaagcttcatgctctgtacgaatatggagtcgtagctgataacgatcccatgagcgatacagtttgtaatggtgtgcagtttcaaattactcataatcctgtccggaatgttcagaatattgacgccggaacaccaggtgagcgttatctcgatttaaagaattgcgttatttgttaa

SEQ ID NO: 183940 - DNA, 633 bp, Klebsiella oxytoca
ttgccaccagatgttcatagtttgattgagctgggtttctatacatgtggacaacgtccttttgagttatgtcacttacaaaaaagcagatatcttccggaacaaaataaaatcactcttgctaaagagttctcgaaaacaggaattgaaacagtaatctatatcagtaataaagccagagaaatcctggacgaacaggcagcgcgatatcctgaaagcgatttctactttcctaatgttaactatgaggaacaattaaagatatacaaaaagaaaattaaagaaagtcccgttatcagtgttgaaaaaccaacaattggccttaacagtgacgcatggaagaagcatatgaatgattttaccaagaaacattttgataagtcattcacgatgcgggatatacgccgtacatttaaaactctggctgggatgctgcattttactgaaaacgaacgagacattgtaaatcagcatgtaaacaaaacaatcagtaaaaagcactatgataaatatgattatttcattgagaaacgtgaaacaactgaaaaatgggtaaaagctttaaatttattattatcaattgagggacttaaagaaattgaaatgatagttgagaaccaaaattctctttga

SEQ ID NO: 183941 - DNA, 693 bp, Klebsiella oxytoca
atgtatttttttcagaaagataaaaccatccatcagtatatatgccaacataaactatgggttctagggcgtgttgttgatttatataacagcaatgcaaataaagaagaaaaaatgttagagccactctggaggagataccatgaaggtttagaggggatcatggtgtttttttcacgaatagaagcggcaatatacagcattcatctggagaaaaaattcgaggaaaaatgggtagtttattctttgaatgagctaaatattaaagaaatgatgatacataatcagattgttaaaaacactgacgattataatgtattgcttagtgcaggtttttgggcaaataaagataaccaactattgtattcaggttatcatttggtacaggttacgattccagttacctttaattctaatgctgtagcaaatgaacaaggtcatgcaatattgcgaataacttcaagcgtcattgaacaatttcaaaaacactggaaaggaagatattcaaatttcaaagattatactgaatttcttgcaggctcgaataaaaaagtcattcaagaacaagccttaaccgcatacaacaatttaaacttatctgaatgtaatggcataaacgactgtcaatatattaccacctggcaaaataattggatttttaataatccagaaattttaaatttgattaaatga

SEQ ID NO: 183942 - DNA, 1467 bp, Klebsiella oxytoca
atgggtactggattttttttagttcgtggtgataaaacaacttgtggtggtagcattatagagggatgtgataatcattctatacatggtcaggctacagcacggatgggtgataagtatatttgtggtaaagataaaaaagtttatcatatcgcaggaggcattcccaattattttattcatggcgttcaggcagccgggactgcacatagcaggggaacgtgttcctgcaaatgctattttataaattcttttactgattgcatttacggatttgaatctgaagctatcaaaagcactgtgaaaactaccctgtccacttcaccgttgcactcgcggcctttaccagaatcatcaccagcaccaaagcctgtagcaccagctgtagaacctgctgaagcgcctgaagagccacagaaagaacgggaacctgtagatgcaggattctgtgtcctgccttatggcgcgactcccgcatcatatgaaccgtatcttttcactacgccgccagcgggaacaaaagaactctattatcaactgaatccagaaatgaagaaaaagcctggctcaatattaatcgtggtcgatcctgaaaagcaggaaccagaacaggttgagacgttacagcgagcaagagacagaattgatgctgcattagaacctttgacaattcaggaagcaaagttattgcatgataacagaggatccgtggatgctttttcctaccagctatttggagataacttaagtatagctggtgatggattaggctatatcagtgaaattggaaaaagttattatgaagaaattaatagaattctaaaagaaattgagggtttatataaaaatacttacacccgcaataacggtgttatttcaggtcaagagttttttggtcaacgagcaagattattcaaacaactagatctggttttaactagattttctaaagctcaacttaatttaggtgaatatcagagcattaaaagagtattaggcctatcaactagctctataatgcatcgttgggatagaacaggtgttgataatatagaaggatatgctacatatattgaaaaatccgccaagcttatgaagatcatgaaaaatgtgggttatgtaggtattggtttagattttgcaagttacacttctaatgtctatgatgcatgttcgaagggtcgtgaaagtgaatgccgtaaggccggtatcacagaatatagtaaatttggggttaaacaaggcgcaagttacttcgcgggtactgctggcggatgggctgcacgtagtgcctgtatgtggatattagggttagcaactacggaagtgggtgcaatcggcgcgggtttatgtcttgtgacaggtgtcggggcgggaatgggtgcagccaaaatggtagagggaaaagcagaagacgttggtgaatggttcggagagaatatcttgtatgaaaagctttttaaataa

SEQ ID NO: 183943 - DNA, 285 bp, Klebsiella oxytoca
atgggcacaccacgatttacacctgaatttaaggaagaagccgtccgacagataacggaacgcggttattccgttgccgaagtatctgaccgtctgggcgtttctgcccacagcctctacaagtggctacgggctatcaaaccggataacagcgagcagcatgcccgggatttactggaagccaaaagcgagatcctgaaactacgggcgcagctaaaacgtaccgaagaagaacgggatatcctgaaaaaggccgcgcggtactttgcaagggagcccgactga

SEQ ID NO: 183944 - DNA, 237 bp, Klebsiella oxytoca
gtgattaaaaaaatatgcgaagtgattgatggagagtatgtctgtgacattgatatcagtgtggaagaatggaaaactttattaacaaatgataaagtttttgacacaaaaagtattgcagcgttaaaaaaatggtttattgagccaaatcattcctgcacatgcttcgatattggtaagaagtacgacctgcacagcatgagtgctaaggaaggtgcgaacaagttcctgatatga

SEQ ID NO: 183945 - DNA, 1032 bp, Klebsiella oxytoca; identical to SEQ ID NO: 156441

SEQ ID NO: 183946 - DNA, 582 bp, Klebsiella oxytoca; identical to SEQ ID NO: 156440

SEQ ID NO: 183947 - DNA, 351 bp, Klebsiella oxytoca
atgaataaaccagcagatctgaaaccccgcaacttatcggctgctgtcagattgcgcctaaatgaaatcgagaactggctggacagagggctaacgcggcatgaaattgctgaaatcctcgacagcgaatacagcttttcggtaacagccaaagggcttgagatggcactgtatagaacgcggcaaaaccgaaaaaatgtattgcacaatacgcatgataagagtagcgcgaagggtgcagcggaaagtgtattgcacaatacacaaccgtctgagcctgaagtgcaggaaagtaaaaaagcagagagtcccggcattattgataaagaattcttcaagaaaatcgggtaa

SEQ ID NO: 183948 - DNA, 969 bp, Klebsiella oxytoca
ttgaaggatcagatcacgcatcttcccgacaacgcagaccgttccgtggcaaagcaaaagttcaaaataaccaactggcccacctacaataaagccctcatcaaccgtggctccataactttctggctggatgatgaagctattcaggcctggtatgagtcagcaacaccttcttcacgaggcagacctcagcgctattctgaccttgccatcacgactgtgctggtcattaaacgcgtattcaggctgaccctgcgcgctgcgcagggctttattgattccattttttctctgatgaacgttccgctacgctgcccggattacagctgtgtcagcaggcgggcaaagtcggttaatatcagtttcaaaacgcccacccggggtgaaatcgcacacctggtaattgattccaccgggctgaaggtcttcggtgaaggcgagtggaaagtcaaaaagcatggtcaggaacgccgccgtatctggcgtaagctgcatctggcagttgacagcaacacacatgaaatcatctgtgcagacctgtcgctgaacaatgtgacggactcagaagccttcccgggtcttatccggcagactcacagaaaaatcagggcagcatcggcagacggcgcttacgacacccggctctgtcacgatgaactgcggcgtaagaaaatcagcgcgcttatcccaccccgaaaaggcgcgggttactggcccggtgaatatgcagaccgtaaccgtgcagtggctaatcagcgaatgaccgggagtaatgcgcggtggaaatggacaacagattacaaccgtcgctcgatagcggaaacggcgatgtaccgggtaaaacagctgttcgggggttcactgacgctgcgtgactacgatggtcaggttgcggaggctatggccctggtacgagcgctgaacaaaatgacgaaagcaggtatgcctgaaagcgtgcgtattgcctga

SEQ ID NO: 183949 - DNA, 123 bp, Klebsiella oxytoca
atgaaaaagcgtttttccgacgaacagatcatcaatatctccgcgaagccgaagctggggtacccgcccgtgaactatgccgcaagcatgccatttccgatgccacgtttacacctggcgtaa

SEQ ID NO: 183950 - DNA, 126 bp, Klebsiella oxytoca
atggaggtgcctgaagttaagcgtctgaagtcgcttgaggaagagaacgccagactcaagaagctgcttgccgaagccatgctggataaagaggcgcttcaggtggctcttgggcgaaagtactga

SEQ ID NO: 183951 - DNA, 384 bp, Klebsiella oxytoca
atgagaaatgcactggtcgcccggatggatggatgcctggaatggccaccgaatacgtactcccaccatcagtatgtggaggacgtgggctcgccagaaaaggttcaaacggttatgctcccacaacattcagccagtcccagggagttgagaatgattaaacgtctgttgcttatttgtgcacccgtagctttatttttactggtcagtacagcagttctttctctttcatttatagatatcaaatacacgtatgaacctgtgttaactggaacacgcctggattatctggttgacgaaacctattccatggcttggttattcttttgtacgtcgaatattgcatttttttgttatttatatcgtattttttttggtttttaa

SEQ ID NO: 183952 - DNA, 423 bp, Klebsiella oxytoca
atgtttgaagaaaaaattcgtccttttcttgctatagtaataatccttggcttgtgtgtgctgagtatttatcttgggaatagtatatttcagtcatacttctctttcgaagatagcattgtgttctcatggttaagcattgcattaattgccttgcctgttgtgatgattttcccacttgcttattttattatgatgattgttaaggggaggaattttgctttcaaaaaaatggataattatgtttcttatttgaagtggagttgcattgctatcttaatattaggggtgttattttcctgtttgtaccccaaaaaattgctcagcaagggatatgttcgttgtaatggtgttccatcaggctggatggcaggaaccgcaacccgctacgttaaagatccgtctatctgcgtcataaattga

SEQ ID NO: 183953 - DNA, 1266 bp, Klebsiella oxytoca
atgccagcaaaaggcttttatctggtgcagggcgacaaaaccacctgcggcgggagaataaccaccggggcagaggatcacacgctgtttggtaaaccggttgcccgggaacaggacagcgtaacctgtggaaaacatgccgggctttacaggatagccggtggcatcgacaatgataccatacacggcaggcgaatggccggaacactcgacagctacagtacctgtccgtgtaaggcaaagttcattccatcgatgatggatgatacatacgagaagagtagcggagcatctacagcagaatcagcagcaggttttgtggcaccagggcaaacttccccggaattgccctcctatctcactggtgagcaaaaggcaacgggatttgtatctgattaccctgtgttaaaaaacacacatgatttacctgatgaaaagttaagaatgatgtttaagcaaaataaccaagacatcatgttattaactttacccgaagtgtttgaaatattgtcatcctggggggcgtggaaatacggctggattgcgataactgaaagcacaccaggtcaaataattgttaactatggtacaaatataaaggatgtcgtcacaacatccatgttggtggggcagttaggtagttttgggataaaggccacggtatatgtgaatcataaaggcacagaattgattaaaatcagtggctacccaggggttaggaaaatattaaatgcgccagttttttctgcaaagaaccctaaggttgtagatataggcataggcaagtatggtctgaagaaatcgatcatagaaggtgcaagattaaccttttctgtggctgcagcatatcgcactatcgattacatcatgaatgatgaaacctccttcgctgaatttattggtagtctggcaacagatgcagttaaaattggtatagcatctgctgtcgtttggggggggggattggttctggtaactccatggatcgttgcaaacttagcaatagttgttgtcgttggcggtgttgctgccattaccttaaatgttcttgatgaaaaatttggtgcgactgacaaggttgtagcctatatagagtcagcacaacaagaatttgcaaacaaagccagagaggctgaacagggattactggatcttggggcaatgtttgctgaacaaatgctaattagaggaaagtatgtgattgttgaagaggttcgcaattatattcgggatactctaacgagtattcaacggagattgtactga

SEQ ID NO: 183954 - DNA, 324 bp, Klebsiella oxytoca
atggccgcctggaacgtcccactcgaagaaaatatcttgaaaaatctatggcttgccgggatgaccagtgagcagcgcgcagaagtgatcgcgtgccagaattcacatcctgcccagtctattgagaacgaatccgtcatttcactcgatatgtctatggggcatgccggagcggcagcgccctggctggccatcgccgccgccactgaaatcgcccgacaaacacagtcaccacagatgattatctgtggtgacacgacgcagaatgtgctgtggagcacgttcattaccccgattgcttcccgacaggagatggatccgtga

SEQ ID NO: 183955 - DNA, 2289 bp, Klebsiella oxytoca
atgattatcagtcctccgtttttgagagacagagatgctactcagtctgacgcagagtgggttgaggtgatgatgcctgtcaattcccgccggggatatcctctcaatgcatcagagtcatggcatgggggcattcatatatcgcatacggactccggttcgacggtggagaaagttcgggcaatcgctgacgggacggtggtatcgttccgcaaaccctccccgccagagaaaagagaccagttcccgttgaagtatgcccctgtcaggggaacggatgatggctatgttttacttaaacatgagacagaaattggttccggggatgacggtaaggtcgttttttactctttgtatatgcatctgaagtttctggaagcagagataaaagctgatgccaaaatttaccggaaagacccgataggctcttgcggaatgactgacgggcagaatgaatttcatttccagattttctgcgatgacgacaacatcagcaagctgacgggcaggaaatcaggagaactggatatttcgaagaatggccgcactgatgcggtttacggtgatattcacttttatctgcctccgcagacaaagttttatgacaaggcccctgcagataacagcacgtctatcaccggactttcagagctctataccagcaatgcgcctctgtatgtcagcatgaccctggcgcaaggcaactgcacgatggtgacccgacagaagaacacacagactgacgggaagtatgatctgctgggcgagccgctggttaatgctgacggggaagactacgaatataatctctataaaaccgcgatgcggaattataaggaaagccccagtgccgggttcgagttgctgcgttttgggcgggttatcaatacggaccatgaaacgctggtgccggcagatgcgccattatggatgacggtcaattacccgggaggaaaaggggtggtcaatcttgctgattccagcattaaaaagtttagtgacgctgatttccctcactggacgggatggttgctggttgatgatgacattgatacccacagccaatgtaattcggcgctcatcagaaagttgcaggaagaaggcagttacgaaactcaaagcaacaggcttatctgctgtttaccattcgagtgggaaataaaaacaattgatgccaggtataaatggttgatgaccggtctgccctgggagcagtgcacgccggaaaaaacggccatatggcagattcccgggacgcaggagtcaaatgaacgaacgctgattagtgaggaagactatggcaaatttaagcaacacgcagaagcgctgtgttttgattcaggatctcttggtagcggaaaattgtggcatatagaacctagagtatttatttctcactttcgtacgtgtaattggctcagtcgagaagaatttaaacaagttgtaccacgtaatataataaggccttcgggttctcgctatagttgggaaccagtcacgtttcatgaaagtgatacatctgtcttctcaagacattatccaatgctgaataagatgtttaggaagtattgcattaacacaccttccagattggtgagttttttagggaattcggtacaggaaactaaatggctgaatgtaactagagaagattatcgatattccgctacagacgagcatgggcatagataccattataacatttggtatttcccgtggtacggcaggggattcctgcagttaactaatcctgataatttctataaatattttacatatcggggcaggtcatttaataatgatgttcgagacgaattggtcagtgactacagaagggtccaaggtgaccgtgctctcagggaacgggaaaaaagattagataacaggatcctatatgacggacaacatcctggacttgagcaagaagtggtgtcttggcgtgaaaatgtcgatgttggactattcgacccgtccgatagcgcagggttttattggtcattaaccggcatggcaaaatatgccgatgaagttcatgaactacagagacaggcagtgactgcagggcatggtattaaaatctattatcgtagcccagcattctggagggcgtgtgcaactgtgaatttgccaggagctatcagtagacgaaattatcaagggataaatggatttatagaacgttgctgcgcatatacctgtgccttggctgtgctgactgaaattaaatttccagatgaaaacaatgcgtttactttagataagcctgaaggcattgtgttaaggagataa

SEQ ID NO: 183956 - DNA, 693 bp, Klebsiella oxytoca
atgaaaacaaaatatttttctttgttcatattttcaatttgtaagttcacctttgcagatatcaaccctgaaataaatatgcccgctgattttaatggtgataattttatagcaagagaaattaatgataattcgtctgtttcttacaatgctgcagagtctagtggttgcagcattataaaatttaaagagtatagagtatcacctaaaaataaagtaagcgccgaagaaaataacctcactaacacattccctgtcaatatttgggtctgtttatcgtccgatacagtgtacagtaacgggtatgacagaagtatgaatgaaaaaattgtttattcgagaagcaaatctttatgggttaaagcaaacaataaaaaatctgaaattattccttcagatcaagatggaccctacaagtcgctgaagttatacaatatcaaagcaaaaaatgctgagggatatgttgtatttgatgagaatattacaaaggatgataaagaaacctataagaatgcaaaagagcttgttagtttttgcttagttcaagattctacttatagtgcactttgcggttcaggtagccttgcctcagatagtagacaaattccttacgtattaaagagttttgaaagtatggaaataggtttgaataataaagtaaatgaaaaaatgttgaatgatagtaacaaatga

SEQ ID NO: 183957 - DNA, 198 bp, Klebsiella oxytoca
atgcaagatatgaatatgccgaattgcttaataaagtcttctaatagagtcggttatgatattttttggaaatattttctgcatcttcagagtaaagaaagagtccttagctctaagaatatcgcacaggaagttgtgataaagaaagaaaaaccttcggagtctggtgatgcaggcactaatatggactatatatga

SEQ ID NO: 183958 - DNA, 747 bp, Klebsiella oxytoca
atgaattttaaaaatttaggtttgcttttatttttagttatttcactgccaacttatgcagcaagcaatctgcaaagatcatgtggggtgctgatcaactctggaggtgatacatttttattttataataagaatggtgttaaagaatttgaaacaaaaaagaaaggcaagcggttaatgtcaaagaaatactcatgtgcatgtatgtcttataaatctgagagtgaagaatacattcgtgggataacaaaaattgaatttgtaaaagaaaaaaattgctcagggcagaaagaaataggcaagatttatgtttcagaagttgacagtactggacaaggcatgcccccagcaaatatagatggcgataaaagcaataaattatatttgggctacaattatgcaccccgcttagaaaataaatttttcttctataaaggagatgtaaccactatttatacttttgaaaagtatggggtttcatttgcgaaatttggagtgtgctcgcttgatggtaaggctatgaaatgccgaagatattatgaatcaggcattgaaaaaggacgtcttagtgaagagataaactatgtttatgtaaaagggaattatatcgaggatggcgttcatgtgatttatgatcaaaatggtgatgttgcatttattgaaattaagaatagagattataaaaaagataaggtgctctttgatagataccccgagagaaccaaacgatctttctattttagttaa

SEQ ID NO: 183959 - DNA, 663 bp, Klebsiella oxytoca
atgtcgtattcccttaagcatctccccgaacgttacgcgcggccagttccaccaaaagcatctcgctggattgctgtcctggtgacgatgttgatcatcagtgtgatctttatgcgtatattcggacgctatgttgatagcaaatacttttggttgtttgttattggcacgcctgctgctctgtggatcgttagctttggctttcgtatgttggtctggtcgttacaggacagcaaggcgaatggttttgacaggcaacgggaacaatggatcttacgtgagacccgcagggctcgtcgtgcccttcagatactaaatacgacatttatcactgcgcatcagaatgacgatcaggaactcgtcgctgttgagatgctaaacaatctgagcataatcacttcccagattgactggaagggcaatgaaagccaaagggtgagccgttttgcagtagatccggaagagactacaaattttctcattgcccggttgttttcagaactccttgctgacctgcccattggacagtttcccgaaaaagcctctctggttgtcatccttgatatttcctcatcgttgccatttgttgctgttcgcgaaatttgggaccaggtctggcaagagagtggcataagttgtgccgttgagtatgtcgccagctga

SEQ ID NO: 183960 - DNA, 393 bp, Klebsiella oxytoca; identical to SEQ ID NO: 183846

SEQ ID NO: 183961 - DNA, 198 bp, Klebsiella oxytoca
atgtacgaagtatttcttttaactcaaaccaaaatgttttacgataaaaataatgccttaatcgcattgaaaaccaagctatacagcatagcgctaaaagccagtgtaatactatccattgacctaatgccgggtctagtaaatcatattgttgtgggccaacaaatatcgataaaatacctaaagctaaataaatag

SEQ ID NO: 183962 - DNA, 2163 bp, Klebsiella oxytoca
atgtcagtaaataataaaaccacagttacagagtctgatgatatcgatcttggaaaactggtcggggaattaattgatcatagaaaattaattatttctataaccgccttgtttacactcattgcaattatttatgctctattcgctacgccagtatatcaagctgatgcaatggtacaagtcgaagaaaaacaagcgaatgcaatattaggtaatttaagtcaaatgctacctgatagccaaccgcagtctgcacctgaaattgcattgctgcagtctcgaatgattttaggtaaaacggttgatgatcttaatctccaaacgcttgtttctgagaaatattttcctttgtttggggaaggctgggcaaaattaacaggccagaagccccactctatatctgtctcaagattttatgtaggagagatagataataacgacgaaactgatgctatagtgacggtcttagattcaaaaaattataccattactggtgaaaactttgagttgaaaggcaccgttggtgaacttgtagagggaaatggcgtatcagtcaaaatagccgagatagatgcaccaaaaggtacagaatttaaaatttcctcaataactaagttaaaagccattagtgatcttcaaaaaatattttctgtcgcggatcaaggaaaagatacaggaatattaagtctcactatcactggtgaggatcctattcttattaagaaaattttaaatagtataagcgaaaattatttagcacaaaatatagctcgtcaggctgcacaggaccaaaaaagtttagagtttttgaaccaacaacttcccaaggttagaagtgacttggataatgcagaagatcggttaaatgcatatagacggcagaacgattcagttgatttatccttagaagcgaaatcagttcttgatcaaattgtcaatgttgataaccaattaaatgagctaacattccgagagtcagaaatatcacagctttatactaaagaacatccaacttataaagcattgctagagaaaagaaaaactctgcaggatgagaaaggaaaactaaataaacgtgtttctagcatgccagaaacacaacaagagattctacgcctaagcagggatgtcgaatccggtagagctgtatatatgcagcttctaaaccgtcagcaagaattaaatatagcaaagtctagtgcgataggaaacgtcagaattattgatagcgcagtgacgcaaccaacaccagtcaaacccaaaaaaatcttgatcataattgtgggacttgttttgggaggctttatatcaattggttttgtattatttagagtcttcttgagaagaggaattgaaagtcctgaacaacttgaagagttaggtattaacgtttacgcaagtattccagtagcagaagcctttgctgaaaaagctcttcagaaatcaagttggaaacggaaatctgtagaagagtatgctagttttcttgcaattgataacccggctgacttagcaattgaggccataagagggttaagaaccagcttacattttgcaatgatggaagctagaaacaatgttctaatgatatcgggcgccagcccaaatgctggcaagacatttgtaagtacaaacttggctgctgtaatagcgcaaactggtaagaaagtattactcgttgatacagatatgcggaaaggttatacgcatcggttatttaatgtttctaacgataatggcttatcagatgttctgtcaggcaaaataaaagttgaaaatgctgtaaaacaagttaaggatataggattagattttatttcaagaggcatggttccacctaatccagctgaacttttaatgcacagacgatttggggaacttatcgaatgggcaagtaaaaattatgatattattgtcttagatacaccacccatattagctgtaacagatgctgctgtaattggcaactatgcaggcactacccttttggttgcgcgtttcgagcagaatacagttaaagaaattgaagtcagtttcaaaagatttgatcaaagtggcgtggcagtaaaaggttgtattctaaatggtgttgtcaaaaaagctagtagttattatggatatggttataaccactatggatattcatataacaatgataagtaa

SEQ ID NO: 183963 - DNA, 438 bp, Klebsiella oxytoca
atgtttgaatctatactggtcgtgtgtacaggaaacatatgtcgctcacctattggagaacggttcttattaaagatgctacctaataaaaatatcgcgtcggcaggaacaggtgcattggaaggccatgatgctgatgaacacgcaataaaagttgcatcaatgaataatatctctttaaacggtcacaagggaaagcagtttacacaagatttagcacgccaatatgatttgattttagtcatggaaaaaaaacatattgagcaaattggtaaaattgcgcccgaagcaagaggcaaaactatgctattcggtcactggatcggtaaaaaagatattccggatccttatcgcaaaagtgacgaggcatttttgtctgtctatgccttaattgaacaggctgggatcctctgggcggaaaaacttggggccaaataa

SEQ ID NO: 183964 - DNA, 192 bp, Klebsiella oxytoca
atgacgaaactacaaaaaacagcgctgaacatggctaaattcatccagaatcagtccctgctcttgttggagaggcttaacgagcttgatctcgatgctgaggccgacctttgtgagaaactacatgatgatgccgagcatcttttccgtacactgtcctcgagactggatgcattacaggatggtaactga

SEQ ID NO: 183965 - DNA, 870 bp, Klebsiella oxytoca
atgaaaagcattagaaatcagaattttatagacgataggctatggtatatagaatggcttttgatgatgcgaggatggttatcccgcatagacttaatggataaatttgggattaagggagctgcggccagtcgtgacattaaaagatataaagaacagagtgatgagaatttatatttagatcatagggttaagagatatgttgctgatcttgataaatttaagccagtttacgaaacctccgaggagctcatcttttcaaagcttacggatctagatgagtcgaagtctttaggtgcggggtccccactgattgaaactatccctcgcttggctgaaataaacccgaaggatataacagggattactcgggcgattctaaatatgaatgttcttaaaatagcttattgctcaatgacttcaggagcatcagagaagaaaatcgttccccattcaatgtttcataatgatcttaaaacatacgttcgttgctatgatctcgggcgaaatcggtttttagatctcgttgttgggcgaattcttgagattctgggtgaggatgggtctgctcctgcggaatgcttgagagagtttgacgatgattggaacacatatatttctttggagttggtcgttcatcccaggattcagcataagaaagctattgagagtgacatgcaaatgactgacggtgtgaaagtgattgaagtcagaaagtcactggctcagtactggctacgtcgatggtgtgtagattgttctgcgacggcaaagatgaccgataaagcttttcagcttcacctgagaaattccagtgttattaatggagtaaatggtgctttccctggggtaaacaaccatatcgattga

SEQ ID NO: 183966 - DNA, 297 bp, Klebsiella oxytoca
gtgattgggttagcctgtaccaccagaactaaccctaacaaaccatacgcaaaagcggcgcttgagtaccacctcaagtgcttttataagccagccactagatttgttgagtgctacagtacaattctgagcgcaaaaatcaacattcaagtggcgaaatttgggaaatgcgacatgcagacagacgagtctcaagcatacatttttcgcccttacataacggtaaagggtaaacggatcacccgtcctaacgggggaatgttcaagatcccgattaatcgggaaaagaaaaaataa

SEQ ID NO: 183967 - DNA, 231 bp, Klebsiella oxytoca
atggcgctctataaaaacggcaatgctttacaacacagcaatcatcaggcttttgatgctgaattagggcctggtacccaagcccctaatcctggaatctaccggtgcgttaactgtggagatgaaatcgggattgctaaagggcataccttacctccacaaaaccatcaccaacattcaaacgggcttccaatcaaatggaaattgctcgtctgtgctatccagaagtga

SEQ ID NO: 183968 - DNA, 141 bp, Klebsiella oxytoca
atggtaaatggaagcttgttagctttttatcgcttttgttgctgccactcctccggcagaaacacttccaacgactactcctcctcccgcagctactacacaggttccgccagccataccggctcctccagctgcgattga

SEQ ID NO: 183969 - DNA, 501 bp, Klebsiella oxytoca; identical to SEQ ID NO: 101070

SEQ ID NO: 183970 - DNA, 1326 bp, Klebsiella oxytoca; identical to SEQ ID NO: 156460

SEQ ID NO: 183971 - DNA, 1188 bp, Klebsiella oxytoca
atgaaaaaatcattcatgcttattgctgcctgcgctgcgtggtactctgcaaccccgtatgcggcgatacaggaaggtaaactgatcatttggggaggtagtcttggtaatggacgacaggctcttgagactgtcggaaaacgttttgaagccgataccggtattcctgtcacggtggaacaaccgaaaaatatagaggaaagattccccttggtggcaagcagtggtggtggtccggatattgttatatacgcgcatgaccgttttggcgggtatgcaaagtcaggtttattatacgaggttaatccttccccggcattcaaagagaaaatagtcccctttgcatgggacgccgtgaagtataacgggaagctgattggttatcctatgagtatagaagcgctgactctgatctggaataaaaagctgattaaatccccaccttccacgtgggaagaaatcccggcaatggatgatgaactaagaaaaaagggtaaaaaagcaattacatggaatatttctgagccctattttacatggccattaattgcctctgcgggggggtacgtatttaaaaagaccgataacggttacgatacaagtcatgtgggtattgataatgaaggcgcagttaaagggctggaatttattgtgaatatggtcaaaagcggacgtattagcccagatacggattatccgctagctgaagccagctttaataaaggtgaaacagcgatgattatcaatggcccgtggtcatgggaaaatattggtaccagcggtattgactacggtgttacggtactgcccacattccagggacaaaaggctagaccatttgtgggggtcgtcagcatcggcattaatgcagccagccctaataaagaactggctgtggaatttatagaaaactatctgatgacagatgaaggacttaccacgctgaatgatgccgttccattaggtgcagttacactgaagagctaccagaaaaaactggaaaaagatccgcgtatccaggcaaccatgcagagcgcagaaaatggcgagatcatgccaaacattcctgagctgagttcattctggtatgcggagaaaaccgctataatcaacgcaattaatcagaagcaatctccagaaagcgctcttaatacagcaaaagaaagggtcctaactactcagccataa

SEQ ID NO: 183972 - DNA, 507 bp, Klebsiella oxytoca
gtgtaccgtctttaccaccttaacgggctgggtgtaaaacgcagacgacgtcgtaaaggtctggcaacagaacgtctgccgctgctccgcccggaggcgcccaacctgacctggccgatggattttgtcatggacgcgctggccaccggtcgcaggatcaagtgcctgacctgcgtggacgacttcacgaaggagtgtctgacaattaccgccgtcttcgggatttcaggcgttcaggtcacgcgaattctggacagcattgcactgtttcgcggctatccggcgacgataagaactgaccaggggccggagtttacctgcagagcactcgaccagtgggcttatgagcatggggtggagctacggcttatccagccgggcaggccaacacagaacggatttattgaaagttttaacggacgattcagggatgagtgcctcaatgagcactggttcagcgatatcgttcacgccaggaaaacgattaatgactggcggcaggattag

SEQ ID NO: 183973 - DNA, 264 bp, Klebsiella oxytoca
atgaagaagcgtttttccgacgaacagatcatcagtattctccgcgaggccgaagccggggtttctgcccgtgagctctgccgtaagcacgccatttccgacgccatcttttacacctggcgtaagaagtatggcggtatggaggtgcccgaggttaagcgccttaagtcgcttgaggaagagaacgccagactcaagaaactgcttgccgaagccatgctggataagcaggcgcttcaggtggctctggggcgaaagtactga

SEQ ID NO: 183974 - DNA, 228 bp, Klebsiella oxytoca
atgctttatctcactacactaagtaacgacagtatcatgctaaaaaaagatgatattatctttatgaaatcatgtggtaatgcaaaaacaataatatttttacgtggcgtggatgagaagctcatgattaacgcgagctttgaagagataaagtttgctatcaataataatcttcaggagcttccgggggtacaagcagtagccgcgacactgaaaatagcaacctga

SEQ ID NO: 183975 - DNA, 423 bp, Klebsiella oxytoca
atggccagagtgtctattagtgaagcggcacggcttgttaaggttagccgtcccacaatttacaagatgattaacagtgggaagttaagttacacctctgttgtaaagcacgggaaggctattaaagttattgatacttcagagcttattagagtgtttggttctcttgatggtgtcatcgatactgtaaaatatgatgtaaaaagtgacgcagaatctacaagtattaacagcgttggtttacatgatttacaacatagaatcgctctacttgaagctgaaaacgatggtcttaaaggggctgttaaggctcgagatgagcatattgattcccttcgtcaggctatgcagcttctggagcacaagcgcgagccttcttcaccaccccattccccgtggtggaaattctggaaaaaatcctga

SEQ ID NO: 183976 - DNA, 180 bp, Klebsiella oxytoca
atgcttccctggccgatgctggcggagtttgtgcgcaaggacagcgggcgcattgagcgcttcctgacgacggagctcagcggtgtgctgcacaaagagggcctccagtgggtaccggataaggtcaacaaccaggagctgagctttaacccggcctttctgcggggggggggtaactaa

SEQ ID NO: 183977 - DNA, 249 bp, Klebsiella oxytoca
atggacgacttaaccctgcgttactacgacgctgaaatgcgctacctgctggaagccggcgaagagtttgcccgcgctcaccccgagcaggcggcaatgctcaatctcgataaagcgggtgtgcgcgacccgtacgtggagcgcctgttcgagggctttgccttcctgatggggcgtttttgcgagaagctcgatgcttccctggccgatgctggcggagtttgtgcgcaaggacagcgggcgcattga

SEQ ID NO: 183978 - DNA, 1329 bp, Klebsiella oxytoca
atgcacattggacaggctctagatctggtatcccgttacgattctctgcgtaaccctctgacttctctgggcgattatcttgacccggaactgatttcacgctgccttgaagagtccggcactgtcacgttacgcaaacggcgccttcctctggaaatgatggtctggtgcattgtcggtatggcccttgagcgcaaggagccgcttcatcagatcgttaaccggctggatatcatgttacctggcaatcgtccgttcgttgcgcccagcgccgtgatccaggcccgccagcggctgggaagcgaggccgtacgccgcgtgttcacgcaaacagcgcagctctggcataacgccacgccgcatccgcactggtgcggtctgaccctgctggccattgatggtgttttctggcgaacaccggacacgccagaaaatgataaagctttcccccgccagacgcatggcggaaacccggcgctttatcctcaggtaaaaatggtctgtcagatggagctgaccagccatctgctgacggcagcggccttcggcacgatgaaaaacagcgaaaatgagctcgcggagcaactgatagagcagaccggcgataacaccctgacgttaatggataaaggttattactccctggggctgctgaatgcatggagccaggcgggagagcaccgtcactggatgatcccgctcagaaagggtgcgcagtacgaagaggtcagaaagctgggtaagggtgaccatctggtgaagctgaaaaccagtccacaggcacgaaaaaaatggccgggtctgggagatgagatgacagcccggctgttgagtgtgacgcgcaaaggtaaagtctgccatctgctgacgtcaatgacggatgccatgcgttaccccggaggggaaatggcagacctgtacagccatcgctgggaaattgaactgggataccgggagataaaacagacgatgcaactgagcaggctgacgctaagaagtaaaaagccggaacttgtggagcaggaactgtggggtgtcttactggcttataatctggtgagatatcagatgattaaaatggccgggcatctgaaaggatactggccgaatcagctgagcttctcagaatcatgtggcatggtcatgagaatgttgatgactcttcagggcgcttcaccagggcgtatcccggagctgatgcgcgatcttgaaagcatggggcaactggtaaaattaccgacaagaagggaaagggccttcccgagagtggtaaaggaaaggccctggagataccccacagccccgaaaaaaagccagtcagttgcttaa

SEQ ID NO: 183979 - DNA, 987 bp, Klebsiella oxytoca
atggaaaacgaaattcactttattggcattgatgttgccaaagctaaactcgatgtcgatatgttgcggcctgatggccgtcaccgcagcaagaaatttgccaacacccccggaggtcatgacgagctcgtcagctggttgcagggacatcaggtcatccatgcccatatctgcatggaagcgaccgggacgtatatggaagatgtcgccgctcatctctctgacgcagggtatcaggtctctgttatcaatccgatgctcagcaaagcgttcgtccagagtcagggaatacgcagcaaaactgatacggtggatgcccgccagctggcgtatttttgccgggagaaacgcccggcgatatgggaagcgccacatccggttgagcgtgccctgcgggcgctggttctgcggcatcaggcgctgacagagatgcatgttcaggagcagaaccggcgtgaaagcgcgcgtgatgttcagttgccgagcatagacatgcatctgctgtggctggatacggaactgaaacgccttgaaaagcagataaaagacctgacggatgatgacccggatatgaaacaccggcgcaaactgctggacagtatcccgggcattggcccgaaaacttcagcggtgctgctggcttatgtggggctgaaagagaggttcagggaggcgaggcagttcgcggcgtatgcgggtctgacgccccggcaacatgaatcaggcagcagtatcaggcgggtaagcaggatgagtaaaatgggccatgtatcgctgcgtcgggcgttgtatatgccggcgatggtgacgctgtataaaacagaatggggcagggagttcagggaacgactggagaagaacggaaaaaatgcaaagctgataatcggggcgatgatgaggaagctggcgcaggtcgcatacggcgtcctgaaatcaggacgcccgttcgatgccacactgcatacgaaaaatgcttgcatggcataa

SEQ ID NO: 183980 - DNA, 651 bp, Klebsiella oxytoca
atggagccgttctatttcgaaggcatcaacgtcgacccggcggatgaaccggctgaaccggaggaagaggaggaggataccgtccagcctgaaccgtcggtaaaccatgcgccgaaagccgctatcgaactgatggtggtaggcggctcccgcgtgcgcctttccggcgaaaaatcttctgatgaagataacgacgagttgacctttagctggggcgtgcccgcggcgatcaacgtcgccgataaaaccgcggcggtcattgagttcgatgtgccgaaagtggctgcggataccgagtataccttcaccctgttcgtgcgcgatacctggggtgaaccgtcaacgcagcagcgctttgtgctctccgtcgtcgccgcgactcagactgatgataccgaggacgagccggctgacgaccaggatcgcaccgatgatacgcctcaaccggcagatgatgatgctgttccttctgacgaaaccacgccttacccgctgtggaatgccagcaccgtctatggcagcaactggggcagctttgaaatcgtgagctggaaaggccataactaccaggtgaaatggtggtctcagggcaaccagccggatctgaactgcggtcagttccaggtctggagcgatctcggcgcgtactaa

SEQ ID NO: 183981 - DNA, 705 bp, Klebsiella oxytoca
atgaacccattcaaaggccggcattttcagcgtgacatcattctgtgggccgtacgctggtactgcaaatacggcatcagttaccgtgagctgcaggagatgctggctgaacgcggagtgaatgtcgatcactccacgatttaccgctgggttcagcgttatgcgcctgaaatggaaaaacggctgcgctggtactggcgtaacccttccgatctttgcccgtggcacatggatgaaacctacgtgaaggtcaatggccgctgggcgtatctgtaccgggccgtcgacagccggggccgcactgtcgatttttatctctcctcccgtcgtaacagcaaagctgcataccggtttctgggtaaaatcctcaacaacgtgaagaagtggcagatcccgcgattcatcaacacggataaagcgcccgcctatggtcgcgcgcttgctctgctcaaacgcgaaggccggtgcctgtctgacgttgaacaccgacagattaagtaccggaacaacgtgattgaatgcgatcatggcaaactgaaacggataatcggcgccacgctgggatttaaatccatgaagacggcttacgccaccatcaaaggtattgaggtgatgtgtgcactacgcaaaggccaggcctcagcattttattatggtgatcccctgggcgaaatgcgcctggtaagcagagtttttgaaatgtaa

SEQ ID NO: 183982 - DNA, 357 bp, Klebsiella oxytoca
atgcgggtacaggagctaaacggcggcgacgttctggcaatgcgagccgggccagcctcgctccccactggtattgggaaaacgacaaacactatcccggaatataaaacgtcaacggcacgccatcctggcgtgcgggttgttcaggaatcatataacatccttgttatcaatttgttatgggcgatacaccttcacgttctggaagccctgctcgcgcagatacagcgcctgcaggcggctcatcacgccgcgttcacaccacagcagccaggttttattctggtcgagatcgccaaatttggtgctgagcttatagaacggcagagagaccacatccacgccttccacctttaa

SEQ ID NO: 183983 - DNA, 231 bp, Klebsiella oxytoca
atgcaccataaacaggcagcttctgctttgcggtttccggtggtgcaaaaacgtcacagtacgcgcactgaaatggtgcaatttaaggctaaagcggcgttttgccgcttcgtttccgccagattcttctttttcctcctcaaaaagggccgcctggcggccctttttcatttctggcatagcccttgctttattagattcgtgttagctgcggccattaccgaattctga

SEQ ID NO: 183984 - DNA, 3147 bp, Klebsiella oxytoca
atgcctaatttctttatcgatcgccccatatttgcctgggtgatcgccatcatcattatgctggctggggggctctcgatcctcaagttgccaatagcgcaatatccgacgattgcgccgccggcaatttccatcacggccatgtaccccggtgccgacgcagaaaccgtgcagaacaccgtgactcaggttatcgaacagaacatgaacggtatcgatcacctgatgtacatgtcttcaaatggcgactccaccggtacagcaaccatcactctgacctttgaatccggtaccgatccggatattgctcaggtacaggttcaaaacaaactggcgctggcgacaccgctgctgccgcaggaagtacagcagcagggtattagcgttgaaaaggcatccagcagcttcctgatggttgtcggcgttattaatactaacggcaccatgaatcaggatgacatttctgactatgttgccgccaacatgaaagatgcgattagccgtaccagcggcgttggtgacgtgcagttgtttggttcccagtacgctatgcgtatctggatggacccaaacaaacttaataacttccagttgacgccagttgacgttatcagcgccctgaaagcgcagaacgcccaggttgcagcaggacagttaggcggtacgcccccggtgaaaggccagcagctgaacgcctccatcgtggcgcagactcgtctgaccaatactgaagagtttggcaacattctgctgaaggttaaccaggatggctcccaggttcgtctgcgcgatgtcgcgcgcattgagctgggtggtgaaaactatgacgttatcgcgaagtttaacggtcagccagcttctggtctgggtattaaactggcgaccggcgcgaacgcgctggataccgcaaacgccattcgcgccgaactgaagaaaatggagcctttcttcccttctggcctgaagattgtttatccgtatgacaccactccattcgtgcagatctccattcacgaagtggtaaaaacgctggttgaagccatcatcctggtgttcctggtaatgtatctgttcctgcagaacttccgcgccaccttgattccgacgattgccgtgccggtcgtactgctggggacgttcgccatccttgcgctgttcggtttctcgataaacacgctcaccatgtttggtatggtgctcgccataggcttgcttgtggatgacgccatcgtggtggtggaaaacgtcgaacgtgtaatggcagaggaagggctaccgccgaaggaagccacgcgtaaatcgatgggccagattcagggcgcgctggtaggtatcgcgatggtgctttctgcggtgtttatcccgatggccttctttggtggttccaccggtgcgatttaccgccagttctcgatcaccatcgtctccgcgatggcgctgtcggtgctggtcgctctgattctcaccccggcgctttgcgccacgatgctgaagccaattcaaaaaggcagccatggcgcaaccactggcttcttcggttggtttaaccgcatgtttgataagagcacgcatcactataccgacagcgtaggcaacatcctgcgtagtaccggtcgctatctggtgctgtacctgatcatcgttgtgggaatggcctggctgttcgttcgtctgccaagttcgttcctgccagacgaagaccagggcgtattcctgagcatggcgcagctgcctgcaggcgcaactcaggagcgtacccagaaagtactggatgagatgaccaattactatctcaccaaagagaaagataacgttgaatcggtattcgccgtaaacggttttggtttcgcgggtcgtggacaaaacaccggtatcgcgttcgtctctctgaaggactggagccagcgtccaggcgaagagaacaaagttgaggcgattaccggccgcgcgatgggctatttctcgcagatcaaagatgcaatggtcttcgcctttaacctgccggcaattgttgaactcggtaccgcaacgggctttgacttccagctgatcgaccaggctggcctgggccatgaaaaactgacccaggcacgtaaccagctttttggaatggttgcgcagcaccctgacgtattgagcggcgttcgtccaaacggcctggaagatactccgcagttcaaagtggatatcgatcaggaaaaagcgcaggcgcttggcgtgtctatcagcgacatcaacacgacgcttggcgcggcatggggcggtagctacgtcaacgacttcattgaccgtggccgcgtgaagaaagtgtatatcatgtccgaagcgaaataccgcatgctgccggaagacattggcaactggtacgtacgcggtagcgatggacagatggtaccgttctccgccttctcaacctcgcgctgggaatacggctcgccgcgtctggagcgctacaacggtctgccatcgatggaaatcctcggccaggcgacaccgggtaagagtaccggtgaagcgatgaacctgatggaagagctggcgggtaaactgcctgccggtatcggctatgactggacgggtatgtcatatcaggaacgtttgtcaggtaaccaggcgccagcgctgtacgctatctcgctgatcgtcgtcttcctgtgtctggcggcgctgtacgagagctggtcaattccattctcggtcatgctggtcgttccgctcggtgttgtgggggcgctgctggctgccaccttccgaggattgactaacgacgtttacttccaggttggtctgttgaccactatcggcctgtcggcgaagaacgcgatactgatcgttgaattcgccaaagacctgatggataaagaaggcaaaggcctgattgaggcaacgcttgaagccgttcgtatgcgtctgcgtccgattctgatgacctccctggcgtttatcctcggcgtaatgccgctggttatcagctccggcgcaggctccggcgcgcagaatgccgtaggtactggcgtaatgggcgggatgattaccgcgacggttctggcgattttcttcgtgccggtattcttcgtggtcgtgcgtcgccgcttcagtaggaaaaatgaggatattgagcacagccatccggttgagcatcattaa

SEQ ID NO: 183985 - DNA, 309 bp, Klebsiella oxytoca
atgccagataatcaattcatcctccaccagcgtatggcgatgctggaactgttgcaaaagcatatccgccagcgcgatctggccgaattgcaaccgatactggttgcgctgctggcgattgccgaatggctggaagagaaaggtcgtaaaaaagggagaagagaaggcagactggagagtcgacagaaaggccgtaaagaaatctcgcacagcattgcgctgaaaatgctcgccagcgggcaggatcctaagatggtgatggagcttacgggtctgagccaggaagaactctcctcgctcagccattaa

SEQ ID NO: 183986 - DNA, 777 bp, Klebsiella oxytoca
atgttgcgcttttcagccaacctttcgatgttatttctggaatatgattttctggatcgttttgagaaagcggcggcctgcggttttcgcgccgttgagtttatgttcccgtatgattatgcgcccgaggtattaaagcaaaagctgagcgacaaccggctggagcatactttacataacttacccgccggcgactgggcggcgggagagcgcggcatagcctgtattcccggtcgcgaagcggagttccgcgaaggcgtggatgccgcaatccgctatgccaaagcgctgggcaatcgcaaaatcaactgtctggtgggtaaaaccccgcctggctaccgcgaggatcatattcgttccacgctggtggcgaatttacgttttgctgctgccgcgctggcgcaggaaggtattctgctgctgatcgaaccgattaattacttcgatatgccgggattttatctgaataccactcatcaggcgctggcgcttattgatgaggtcggcagcgataatctgaaaattcagtacgatatttatcatatgcagcggatggagggggagttaacccatacgatgcaaacttatgctaaccgtattggtcatttacagattgctgataatccgaatcgcggtgagccggggaccggtgaaattaattacgattatctttttaaatttattgatagatcaagctatgacggctgggtgggctgcgaatataaaccgctgaccaccaccgaagcgggtttgacatggtttaatcactaccgctaa

SEQ ID NO: 183987 - DNA, 1287 bp, Klebsiella oxytoca
atgaatatgcccgctggcgtagaactacatggaaagggaataagaattagctttctatatcgcggcattcgctgccgcgaagttttgcggggttggactatctcgaatagtaatatacgaaaagctggtaatcttcgtgctttaattgtaagtgagattcagcaaggtaaatttgactatgcagagcactttcctgaatcaaaggcgctcaaaaagttcacaacaactcaaataatccgcacgtatgcggagttgtgcgatgtttacctaacatcaaaaattcacgaagtttctgcagcgtcctatcgtggcatagtttcaagactggaaacattaagatcagttattgggggcaacacttacattgctgatattcaacacagcgatctgttgaactatcgaaaccaattgttgaccggggaatctgtctcgccccattccccctggcttaacaaaactggtcgtgctgtatcgactgtcaatggattgatgaatacccttacagcgatgctgaaactagcccagcgaagtaacttcattagccatgccccgcacgatggaatcaaaatgctaaagaggtctcgtaaagacccagatccgttgctacatgatgagtacaatgcttttataaaagttttggcacctaaagccgcgttgctatggacaatagcggtacataccggccttcgtcatggcgagttggctgcgctcgcgtgggaggatatcgacttagaacacggagagatccatgtttgcagaaacaaaaccaatgaagggttatttgtaccacctaaaacagacgcaggtaagcgaacggttacccttttaaagcccgcgttggacgctttgcgccttcagtttcagaaaacaggtgctctcaggaaaatggaagttacatttcatcatcgggaatatggcttaactgagcagcagcatttgcggtttgtatttatcccggattctcgttcccggacaaaaggaacaagttacagtaaatcctctttaggctatagctgggacgcaggattaaaaaaggcaggaattcgctcgcgccgtccttatcagtccaggcacacttttgcctgttggcttttaactgcaggggctaatccgtcattcatcgccagccaactcggacatgaaaatgcaaagatggtttacgagatttactcgaagtggatcggaggaatgaaccgaaatcaggtagaaatgcttaacagcactttacctacagcagtgtcccaagggtgccccaaagacaaagtgaagaaagttaatttcaagtag

SEQ ID NO: 183988 - DNA, 285 bp, Klebsiella oxytoca
atgatgctcaatcaccagttattagcagcacagaacaaattggtaattgctcaggctattggcgacaacatcatgtgggaacaggctatgcatacgatgagagggattttcatagccgctaagaatacagaagatcgtatgcttgagggttatgctaacccgctttcgaatcttcttattgaagatgttgtttgtaattatgaaatttacggtgatttaataattgctgatggcgatttgcttttaggtcacgcaaaaataaacacagaaataattaatcactaa

SEQ ID NO: 183989 - DNA, 486 bp, Klebsiella oxytoca
atgactaaaaaccgtctctgtcttaatcttctacctatggtagaaaaaacgaataaacaccaagacttcgcagaccggcttaaccgtgagatgagtaaaaaaaacttatctgttaaacagttgagtattgcgggacaagtcacctatgaaatggctcggcgttatacgctgggcacggctaagccacgcgatgagaaactgataagaatcgcagaatggcttaatgtgccgcccgcctggctggattatggggctgtagatagcggagttgaaacaggtggtaatgctgaaactgttacatctgctcctatagagctatccgatgaaacagagttctcaaatttgagcgatgatgaaaaacgattgctcagggtttttcgtaagttccctgataccgaagccaacaacatgcttcttgcctttgaggttcgctataaaaaacttctagaattttatagcgaatacgccgatccagataaaaaatag

SEQ ID NO: 183990 - DNA, 270 bp, Klebsiella oxytoca
atgcttacaccatataaaaacatcacggaaaaggcagttagagccataggaaatgtttcctatgttgctcgtatgttcaactttaaatcgagtcaatcagtagcaaattggattacccggaatagtgttccaagcgatcgcgtaattcctctttgccgtatggggggttgggttgttactccgcatgagctccgtcctgatcttcacccaacacctatcagcggactcaccgaagaaattatcactaagcgtcaaaaggagactgattga

SEQ ID NO: 183991 - DNA, 414 bp, Klebsiella oxytoca
atggaaatcaaacacgagcatatcgaaattgttttgcttgcatgggctgctgaagttggccaggcatacgcagcaaatgccattgcggaagagtacgcgcgttctggtggtaatcagctgcggctggagccgggtaaaacgtgggcgaaccagcaaaatatatttcatcgttggctcaaaggggaaaccgaactgcagcgcgaaaaaatccgtttgttgcttccagcaatcctgcgtgttctcccgcgtgaaatacgtcaccgcctgagcatctacgacactatcgagcgccgggcattactcgcggctcagcacgctattggaacggctattgatgcgcatgatgacgcgatcgaggccgtatacagcaaagcgtatcagcccggctgcactgacttacctaagtttcactga

SEQ ID NO: 183992 - DNA, 255 bp, Klebsiella oxytoca
atgtgtaaccagtctgctgctgaattgattgctcgtctgaaaagggcttacccggcgtatgtaccgtctgaagttagcagggcatcgaatggtattccgaaagcgggagctcgttttcagcacaggcacaaaggccacatggttacggtaattatcgctacagagaaagatgtttcttaccgcaaatcctgtggtgctgttggttgggtgggattgcgtgaatttttacggctacacgatgaggtattggtatga

SEQ ID NO: 183993 - DNA, 990 bp, Klebsiella oxytoca
atgagcaatcaggtctttgaaattgttcaggccatgtcagggcagggaaactgcataacgattcctggaccatatttagattttttcgcgggagatcgtcagcaacatctgctggccgctattttgaatcagcttgtattttggtctggtaaatccacgctcgaaaatggctggttttacaaagaacacgcagcccttgctaaagaggttcgagtagttgagggcgatgttgtccgaagggcaatttacaagattactgagcaatatttacccggtgttattcaggaagaagtgcgccaagttaatggcactcctaagaagcattatcgcatcgttcaggaagcgctaatgctcaaaatcttcccgtcaatactggaaacggcacaaacgccgaatggaaacggcacaaacgccgaatggaaacggcataaacgccgaatccaagaaacggcacaaacgccgaatggaaacggcgcaaacgccgaatcctatctctatacagatcttaaaaaaacagatcttataacagatcttaaaaaccgtgttggagaggttttccctgtggataacttttctgaaaaacacccggaagcggtgatttttgatgctgaaaaaagcttgtggggaagcgctgaggatttagagttttcacaatggttttatgctcgcgttgttgagttgcatgaacgagctgctgaatttgacggaatgatttcaagaccacctgagccgaattggacagtttgggctaacgaaattcgtttgctgcgtaatggtcagggctgcactcacgaaaatatgcgcaccttgattgagcgggtacaaagcgacagtttctggtgcgataaaattaaaaccgctatgacgctgcgcgaaaaatggcatgaactagcggtgaaactctgccctgtaaatctaacgacagggggcgatgcattcagaatcagcaaaaaattggataacaaaattccgaagggctttcggggttaa

SEQ ID NO: 183994 - DNA, 669 bp, Klebsiella oxytoca
atgaataacgtacttaacgtagttagggctatggaaaaatctacgtgtcgtgagattgctgctcgaatgaaaaaagatattcgggatatgttcaaaattctggacgacatgaaagataaagggctggttaaatttgttaatggttactggtcagctacagatatacagccatcatacgaaacacataaatccacaccgttagcccccgtaaacaccgttgtgaaagttaaagctaaaaagcaaagcggcctacgtgagaaagttatagcgctgctgaaggattcaggttgcgcgcttgatacgagcgaaataaccgaaaagcttgaactaaaaacgaatgctcttaacggtacgctgggtaaactggccgctgaaggtcttatcgtcaaatgtgctgtggggaaattagtaacctggacacttccgaatgaggcagacaaaaaggaatcccccgccacaaatacgttaccggcaaaaaccacaagtgaaattgtcgctgatataccagcttttacccgcagagattcagatttaattgttccgacagctgcaggtataactaatgaaattcgtcgcacaaaagcgaaattggccagtttgaaacgattaagggttattacacgcgctctccggcgtcagtcgaaactactgcaggagttagcgcaatga

SEQ ID NO: 183995 - DNA, 216 bp, Klebsiella oxytoca
atgagagatttaccaaaatgcccgttttgcggaatgagtcctgaatttcactggaaagattatacgtttggtagttgctctggcgcgctgaaatgccctaacgatcattatcgcgtccagcatggttattgggctggtggaaaggcaaaagccaaacagatgcttaaaagaaaatgggctgagacggttaataaaaacgaggttaaaaatggctaa

SEQ ID NO: 183996 - DNA, 153 bp, Klebsiella oxytoca
atgagcaagtcattaaacgcgcgctgtatccggcgctggaaagttgagtttaaaggccgctgtgattcgaaatatagcccttactggcgcaagcgtgatctgcgtgggtatatccgcgaagcggcagattcgtctagctggattccgatgtga

SEQ ID NO: 183997 - DNA, 264 bp, Klebsiella oxytoca
atggcgaaattaaccaaaaaagaatcggcatggttcgatgaagttaacgcggctctggcgcgctgcccgtcgccgggaaaattcggtttctacacaattggtgatcctaacgtgatggtctacgacaagcgcaaagaaaaagagattgagcgcaagctcgacgagcggtcgtcttccgattggtgtgtagctgtacgagatgcggacgctgaaattgacgccaacatttactttccttcagcggtgctaagcactgcgggataa

SEQ ID NO: 183998 - DNA, 270 bp, Klebsiella oxytoca
atgcaaatgataacaagaaaaaagccagcctttaccgagctgtatcaaaccggagttatgacccgtgttgttgcagttagaaacgcagatagcggaggctggcgactgtttggcttctggagagataagcaaataggcgtatacgtagaagccgctcgcggaggtgtccgggaatggtcagggctggattacctggcaaacttctgtagtagttgtggaattagcctatgggagattcataacaaagttgatccaaagcctttggagtga

SEQ ID NO: 183999 - DNA, 330 bp, Klebsiella oxytoca
atgggttttccatctccagcaacagactacattgagcagaggctcagcgttaccagcctttgcatgtttgatgccaattgccgcgcgctcgaaactagcgcgggctatgccatcatcaacgtatccagaaggccaaagcagggagatcacgtgctcgcgtctttctgcggtagcactcagtttgctgttatacgagggcgagcgcttatcacttctgacggtgaagcaattgagggagaagccctaaacgatgttgagattcgaggagtagtaacttttctcattaatcgagctaattcgtttgaggatgatcctattccagttatttaa

SEQ ID NO: 184000 - DNA, 168 bp, Klebsiella oxytoca
atggatgaaaaacagctaatcgaagcgcttcgcattgttggtagttatgtgattgatagtttacccggtggaacgtacgtactaacacctattgagccgggcgaaatcaaaaataccgaatcttctcacgaagaatgtaaaagcttcttccggcaggatcaaagctga

SEQ ID NO: 184001 - DNA, 345 bp, Klebsiella oxytoca
atgagcaagcccaaacaaaaacctacaactaaagctgagaagctccatttgagccgtgtagcggcgcttagctgtattgtttgccggaatcaggaatatggtgaatcaccggcagaaattcatcattgtagctctggcactggtttagcagttcgcgctgatcattttcaggtgattcctctgtgccatgctcatcatcgcactggcggctatggcgtagcgattcatgctggccgcaagtcttgggaaaaaaaatacggtactgaatctgaattactcacccaggttcgcagggagttaggcatcatttccgacaacatcagcgaaaatgagggggaagaatga

SEQ ID NO: 184002 - DNA, 606 bp, Klebsiella oxytoca
atgacccctcgtcagcgtcggcagcatcagaaggctgtagaacaagcagcattggcacctaataagcgctggttaggccgttcagttcttttaacctcagttcaatcagcatggataaaatctcttttaaccgtatggggtgagtgtatgggcggtaaaacccgcgcagaatatcgcctccaaaaccgtgatcagttctggggaaaactcagagaggaggggtggtgcgatggtcagttatcgcgaattactgaagctctaaagcaagccagaaatgaaggctttcgcggtatgcaagcgatgcagcgtgcgcgttctatcctctggcccgtaaagctgagcgatatgataaaagaggctgagaacaaagatgatgctgagtttattgagctggctttacttaaaaccttcaatacggatgatccggtttacgtgataggaatgaattactataccacccgtaagaagattgctgagcttgcgagagagctacaacatgttgctccgtggcttacacctgaaatggcaagggaaagggtgaaatggtgtttgcagatattccaggcaaaggcttttcttgtggtcagggaaagcctccgaggatag

SEQ ID NO: 184003 - DNA, 405 bp, Klebsiella oxytoca
atgatttatccgctctttatctttaaaaacgcagacgggtttgacggttatttcccagatatagaaggttgtttctttgctggggataccctcgaatctgccgttcgcaatgctgagatggctttcggccaacacatggacgtactaacggaacaaggcgggcatgtacccgcaccaaacgatccggccgtctatctcggtgatttgcgattggctcaagatgggggttttctagcgatggtggatatagatccgtcaaagtacgaaacgaaagccgtaaaatttaacctcaccatgcccggcaatctgataactgctatggatcgctacatcgagcagaggggtttaaaaaaccgctctgctttcctcgcagatttggcgagaaaagagattgccagaggttaa

SEQ ID NO: 184004 - DNA, 189 bp, Klebsiella oxytoca
atgagcagtgcagagttaatcaagaagctgttagccgatggatggattaaacagcgacaagacggaagtcacgtaacgctgagcaagccggggatagcaaagataatcacggtaccccacccaaggaaagacgcatcaaaagggattctaaggcaagcgcagcagatatcaggactgaagttaatttaa

SEQ ID NO: 184005 - DNA, 249 bp, Klebsiella oxytoca
atgaacaaaatcatgcctgacaaaattgcatcctctttggggtattgcacttctggcggtcttatctgctggggcagtattgcccgttggatacacgagctggattggaatctcattgcggtaatcggtggattcatcattggtctgttgacctttttagttaatttctacttcaagagacgtcaaacgaaagcctatgaaaaggcgttagcgcggggttacgtaactccaccaccgcaggatcattaa

SEQ ID NO: 184006 - DNA, 537 bp, Klebsiella oxytoca
atggccaaccttaaatcaaaactcagcgcggcaatgctggttctaattgctgctggtgcgagtgcgccggtgatgcttgatcagttcttagatgagaaagaggggaacacattaaccgccgtggttgatccgggtggtgtttggtctttatgccgtggggtaacccgcatcgatggccgggcagtcaaaaagggtgaccgggtatcagcggagaagtgtaaagagttaaacgctatagagcgcaatcgcgctttacgttgggtagagcaaaacatacatgtcccgctaactgaggttcagaaagtgggtattgcgtctttttgcccttacaacattggtcccggaaagtgttttccgtcaactttttacgctcgccttaatgctggtgatacagctggcgcgtgtgaggctttgcgctggtggatacgggatggcgggaaagattgccgggtacgctcaaataactgttacgggcaggtaatacgccgtgatcaggagagcgcgctagtgtgctgggggcttgatgatggacgttaa

SEQ ID NO: 184007 - DNA, 498 bp, Klebsiella oxytoca
atgatggacgttaagaaaggcgttgttatcgggctaatcatcaccggcgcttttaccgctggcgctctctggaaggaatcagagtgggaggcaaaatggtttaaacgtgatgccgcagacgctaccgcgctggccattgctgagcacggtaaccggctgattgagcagggccgactgattgcacgtgatgaggctgtaagtgatgcaagagataaagaaagggccgcgcgccttaatgctgatttgctttctggcaatgtgcagcagctgcagcaacaagccaaaaagctcgctacccgtctggacgctgcaagagaaaccgcaaatcttgccgctaccgcaggaagcaaagcagaaaccacccccgccggaatgctcgcctacgtgctcggagagattgcaggagaagctgaaaaacttgctggaatcgctgacgaacgctaccgggccgggctgacgtgtgagcggatttattcatcgttagaagctgaaaaatag

SEQ ID NO: 184008 - DNA, 210 bp, Klebsiella oxytoca
atgaccacaatcacaattgcttacggcgtatctaacgataaagttgaaactatcaaggcactggtagaaagccagcagattcataacgtcgactttaacggagaagagttttccatagagcgcggcgactttacctcaattgataaagatgaagctgagcacgttaaacttctcaacaaaattcaggacatcattcacgggtacaactaa

SEQ ID NO: 184009 - DNA, 315 bp, Klebsiella oxytoca
gtgaaaattgcaattgtggtatcccctccgcgttataagcgtgagcgcttagatggtaactggccagagccgcttcatgctgtaactgaggttgggggccgggtagatatcatcattaaggatgatgccggagagatgcacggagagctagtggctaactactctgaagactaccgccgggattcgacctttgacgagtatgagcagcgcgccgccgaatgggctaaatctttggtgtcagttatcaagctggccacgtttgacgataaccagattgaaggggttcaggatggcaaagaaaaaacgccagtctaa

SEQ ID NO: 184010 - DNA, 267 bp, Klebsiella oxytoca
atgaaagatttcaaaattgaatatgtgaatggccagctggtggcccttgacctaaacggtatgtctttactggataacgtgcagggcatttcctttaagcatgagctgggtgagttgccggtgattaacgttactcagggctacaaaatcaaaggcccggatgatgagccaccacgtgaggtaaccggggaagtgatccaagccgatggcggctatcagcaaccgcagcgccgcagcaagcgacagcgccaagctaagcgccgttag

SEQ ID NO: 184011 - DNA, 204 bp, Klebsiella oxytoca
atgcggccgcgttgcgcggccacactgcagggattatttaccctgttctgcaacttgctttttcagctggacgacttcagcgcgcagactatccacaacaccggcaatctgcgtaagctggttgttctggctggtaacggcgcgctgcagttcggttactttgttttcgagacgttcaatttttgtatcttgggacatctttga

SEQ ID NO: 184012 - DNA, 426 bp, Klebsiella oxytoca
atgtttaaacgtgatgagctagtgctggctatgtattaccgcagcacaaaagacgctgacaccggcgataagctggcacttgttaccgtgaaggtgaaagaggccgcgaatcagagcaacgttgtacagagctctgagctgatttgtcgcacatctacaggtaacaaaaaagcctatcaagttggcgctcaaagtatctcaagcggttccgatccactgctaagcgccattgagaactattggcgctctaatactgagacgctggcgaaagagctcattactgagtctctggaattctttatggaaaacgtctcacctgaaaatacgtggatgagctcagatggccttgagatattcgcagcggccgagctgggttcacacctaccggatagtgtcttgaacgccgacagcgccgccagcgcctaa

SEQ ID NO: 184013 - DNA, 504 bp, Klebsiella oxytoca
atggacaaggaaattacacacgcgcggctcaacatttcgcagcttgccgggatcaccggcgtacaccgcaccacgctggccgcacggcttaaaggggtaccgcttgccccgggcagtaacaagcaaaaaaaactctattacctaaaagatatcttgtgcgaattcctcaacaactccgaaccggtagacgtggagaagatgaagccgagcgaacgccaggcccactacaacgccgagctgttaaaagtgaagctggaacgggaacagggtgaacttatcccggttgatgaggtggtagccaactatgccgccattgttaaagctgtggtgatggagctggaaacattacccgatgtgttagagcgagattgcgcgcttccacctgaagccgtagcccgggtgcaggaagtgatcgacgatttgcgagatgtgatggccgacaaaatccgggatgaagaccccgaagaagaagaagaggaggacgacgaagccgaggaggggtaa

SEQ ID NO: 184014 - DNA, 2166 bp, Klebsiella oxytoca
ttgagacggtttaagaagcgacgcaggagcccgcaagccagcggtaagcaggtcagaaaaaacgttgcagatatgatgcgcgcaccgcgtcgcatgaaggtaagcgacgccgtagcccaatatatgcgggtacctaaaggggcggctaactctgtaccgtgggaaccggatgtagcgccgtatgtgattgagcctatgaattgcctcgcttcacgcgaatatgacgcggtgatttttgtgggaccggcgcgaacgggtaaaaccattgcgctaatcgacgggtggatcgtctacagcatagtttgcgacccggctgacatgctcgttattcagatttccgaggagaaagcccgcgaacactcaaagaaacgtttagccaggacgtttaattgtagtcctgaagtcaaaaagcgcctcagcgctaagcgcaacgacaacaacgttcacgaccgcacatttaaagccggtaactatctaaaaatcggctggccatcggtcaatatcatgagttcttcagattatcgctttgtggcgctcactgattacgatcgtatggacgaaaacatagatggagagggggacggcttcatgctggcctctaagcgtaccactacgtttatgagctccggtaaaacgctggtggagagctcgccgggccgtgatgttatcgatgtaaaatggcgaccgcagaccccgcacgaaggcccgccgtgtaccggtgttatgagcctttttaactctggtgatcgtcgccggttgtactggccatgcccccactgtggcgaatacttccagcccattatggaaaacatgaccgggtaccggaattccccggacgtaaccacggccagcgaagcggcttatctgcaatgcccctcatgcggtgaagctatccacgccggtatgaagcgtgagctgaataaaaaatgtgtctggttacgtgacggcgaaaccatagaccggcacggcaagcggggaggaacgccacgccgctcccgtattgcttctttctggatggaaggcgtagccgccgcgtatcagacgtgggcgcaactctattccaaataccttaacgccgagctggaatatgaagccacgcagagcgaggagaaattaaagacggtagtcaataccgactttggacgcccttatatcccccgggcgaagctggaacagcggaaaagtgaagtgctcgaagcgcgcgcggaaccgctggaagaaaattttgtacccgatggagtgcgctttctggtggcaaccgttgacgtgcaaggcggtaagaatcgccgctttgtggtccagctggtgggctacggtgagcgcggtgagcgctggatagtggcgcggtatgaaattaagtattcattgcgctgtgatgccaatggcgaggcgctacgcattaacccggccagcttcccggaagactgggatcttcttatttctgacgtattcgatcgcgcgtggccactcgccgccgatgatacaaaggctatgcgcgtgatgagcatggcggtcgattccggcggtgaagacggcgtaaccaataacgcatacgcattctggcggcgctgccggatcgacgggatacaccgcaatatctttctgtttaagggggatggcctgaagcgcgacaagctaattcaggaaacctacccggacaacaacggcaactcaaaacgccgcgcgaaagcgtccggcgatgtaccactttacttactccagacaaacgcccttaaagaccgggtgaacggcgcgctatggcgcgaaacgcccgggccggggtttgttcacttcccggcctggctggacagctctttttatgacgagctgacgtatgaggagcgaagcccggatggccactggaaaaaaccggggcgcggggctaacgaggcctttgatttgctggtgtacgccgaagcgctcgccatcctgaagggctacgacaagattaagtggccgctcgctccgaaatgggcgaagccggaaacgtggatcgatgccgtagagcgctattcaccggccgcctctgaagaaaacgccccgccaccagctgaagaacctgcgcaggaggcaaaacccaaaaagaccccgaccgcaaaacccaaacccaaacgaaagcccaaagctaaaaaatccgcctggtcaggcgggggaggatggttatga

SEQ ID NO: 184015 - DNA, 219 bp, Klebsiella oxytoca
atgaattgtagcgacatgcgagaaatcattgatgaatacgtaaaggccgaacgcgccgtattgcagggaaagacgattaagtttaacgggcaggaaatgaccacggagaacttgaacgagatccgccatgggcggcaggagtgggaacagcgtttagcgcgtgagcaaaggcgcttacgtggcggcggtatctttaaacacgcgcggtttgttcgatga

SEQ ID NO: 184016 - DNA, 1524 bp, Klebsiella oxytoca
atgaatattctggatcgggcaattggggttttctccccgggctggcaagcggcgcgcctgaagtcccgaaatcaagtgcaggcttatgaagccgccacgcccaccaaaacgcacagaggcaagcgggaacgccggaccgcagaccagctaacccgcgccggtagtcagtcactccgggagcaagcgcgttacctcgatgataaccatgatttggtgatcggagtgctggataagctggaagagcgcgtgataggcgaaaacggaatagcggtagacccgttaccccgcctgaaagatggcacgatagataaggcgctggcgcggcaaatctcccgcctgtggggggagtggtcagttaacccggaagtgactggtgaatttaaccggggaatgcttgagcgaatgatgttgcgcagctggttacgcgacggggaagtattcgctcaatgtatcaaaggcagacaggaggatttaaccccaccagcggggatctatttctggcttcaggcgctggaatgcgattttgtcccgctcgacgacgaccctgggcagaacatcattcagggggtgaggaaaaataagcacggtggcccgaaagcctatcaggtttataaaagccatcccggggcgacgtatcacaccaaaggcgatgtgaaagaagtttcctctgaaaacatgctccatgtgaagttttcgcgccggttgcaccagacgcgcggcgtttccatgctcagcggcgtaatcatgcgtttagccgcgctcaaagagtatgaagatgcggagctggtggccgcacggattgccgcatcgctggggatgtacattaaaaaaggtgatggtcagagctatgacgacaccaacgcggaggaggacagagatatagaaattgagcccgggatcattttcgacgggctccagcagggtgaggaaatcggaatgattaaatccgaccggccaaacccaaatttagaaacattccgtagtggccagctccgcgcgattgctgccggtgtgcgcctcagctattccagtacatcccgcaactataacggcaccttcagcgctcagcggcaagagctggtggaatcgaccgcgggctatgccgtgctgcagcagtggtttattcaggcttttacgcgccgcgtgtatcgcatgtggcttcggatggccatcaccagcgggaaaatcaaattaccggcgaatctcgataaagacacgctctacagtgcgaaatatcgtgggccttctatggtctggatcgatccggtgaaagaggctcaggcgtggcgtattcgcatacgtgcgggcggcgctactgaagcggaaatgatacgcgccagcggtcataacccggatgaagttaaggcggaacgtttatcagaaattgaggagaacaaaaagcacggtctggtatttgacagcgacccgcgcaacgacaaagggaataacgacacgaaagcggccagcaaaaaggccccaaaaaactcacctcctgataaaaacgaggaacaaaagaatgaatga

SEQ ID NO: 184017 - DNA, 2040 bp, Klebsiella oxytoca
atgaatgaaccacaaaaggccggatttataccgccacgtgccagcgttgggggcgaaccgggagcgccgcagggtaataaatcatggtttagcgtgaaagccagccagaagcccgcagaggccgttatagatatctatgacgaaatcgggttttgggggattagcgcgcagcagtttaaacaggatctcgatgcgctgggcgagctgaagaacatcacgcttcacattaactctccgggcggcaacgtgggtgacggcgtggcgatttttaacttgttacggggtacaggcgcatacatcaccgttcacattgacggaatcgcggcttctatggcttcagtgatcgccatggtggggcataaagtcattatgcctggtaacacaatgatgatgatccacaagccatggggaagcgctgccggtaacgctgacgaaatgcgcgagtacgccgattttctggataagtgggagggattactccttaccgcttacaccacgaagaccggcaaaagcgcagaagagatcgccgtgatgttggccgatgaaacatggctgacggccactgaatgcgtggaactgggctttgctgacgaaatcagcgatccgctaagcgcgatggcctgtatttattcacaaaaacttaaggactattccaaaatgcctaacgatattcgcaattctattacccctccgcgcaactctgtaacgcagccaccagcgccgaacccggcaccggtacaacaaccggcaccggccaacgccgatccggccgcatttcagaatgcattcatgcagcagcagcaagcgcgcgccagcgggattcgtgaagtgttcgcgcagttcccgcagcatgtcaatctggaggccgaaagcctcgcggatttaaattgctccgtagatcaggcgcgtcaaaaactgcttactgcgctggcgggtgaaacgaccacgaccgataccaccattccgcctcatatgcgccgtgttgataatggccagtttgttaccgatggcattaaaaacgcgattagcgcacgtgtaggacattgcgcggtagaagccagcaatgcttataacgttatgacgttgcgagatctggcgcgcgtgtcgctcacagagcgcggggtttcgattatgggtatgaatgcagctcagatggtagcagctgctttcactcactcctcctctgatttcggctctattcttctggatgtgtcgcataaatctatgatgttgggctgggataactccccggaaacttacgagcgctggactaaaaaagggacgcttaccgattttaaaccgtctaaccgcgtggggatgggcggctttgacgcgctggagaaagtggatgaaggcgcggagtataaatacatcaccaccggcgataaaaaagcaacgattgccctggcaacctacgggaatcttttctccattactcgccaggcgattattaacgatgatttgggcgcgcttaccgatatcccgcgcaaaatgggtatggccgcgaaggccactatcgggaatcttgtgtatgccctgcttactggcaacgtgaaaatgccggatgagatcccgctctttgataagcgccatggaaacatcgtaaccggtccgtttaacgttgacacaattagccaggctgaacagttgatgctgctacagcaggacgacgaacagccgctgaacattaccccggcgtttatgctggtgcctgtgcaactgaagagcaaagcgcgacaggtgatcggctctgatagtgtcgccggtgctgatgtaaattccggtgtactgaacccgattaaagactttgccgaggtgatttctgaagcacgcctgagcaagcacagcaaggataactggtatctgacggccgcgcagggtacggacacaatcgaagttgcctatcttgacggtatcgatactccgtactttgaccagcaagatggctttactactgacggagtcgcaacaaaaattcgcatcgatgccggtgtaagtgcgctggattatcgcggctttgttcgcggctccttgaagtaa

SEQ ID NO: 184018 - DNA, 327 bp, Klebsiella oxytoca
atggctaaaaattacattcaggacggaaacactattcaccttcagaacgcgggcgcaaaagtgattgccagcggtacgccggttgccgtgggcggcatgattgcggttacgctggtggatatccagcccgccagcagcggcaccggcgctactaccggcgtttttttgcttccgaaggtggaagcagaagaaatcccgcagggctcccgggtgtatctgaaagacggcttgattcagctggaagaggctgacgcggtagccgctggcgtcgcgtggtataccgccgagagcggacgggggcttgtggaaatcaaaattaatgtctaa

SEQ ID NO: 184019 - DNA, 282 bp, Klebsiella oxytoca
atgtctaatccctttgatttgatggctgcgcgtatggatgcggtaaccgtaaaccgcatggccaggccgataaagattaacggtttgccattcgacgccatcccggcggtgtcgctagaggaaatgggctcgctggcgggtatgggtactacgttagtggttttctctggcgagtaccggccccgaagcggtgatactgttttctatgatggccaggagtggacggtgacccggtttgagaagttcaacggtaaaccgaaaatcacactggaacaggaatga

SEQ ID NO: 184020 - DNA, 579 bp, Klebsiella oxytoca
atgagcataaaaaatctggaaaaggcgattaataacctgaatagccttagccgtttgattgtgccgactgcgaccgccaaagcgcttaatcgcgtggggcaagcgacaatccggcagggaagccggaaagtagcaaaagaggccgtagtgggcgacggcaagaaaaaggggattccggtgaaacttgtcaggcagcgcgcaaggctgaaaaaagctaacccgcatcgcctgagcgccggaattaagattaaccgaggtaatttgcccgctatcaaattgggggccgctcaggtgcgtctatcgcgcaggaagggcaacgagaaagggcgcggcagctatctaaaaatcgggccataccgtttccgcaatgcatttatccagcaattggccaatggccgctggcaggtgatgcgccgtgttagtgattcgcgttatccgattgacgttgtgaaagtgccactggcaaagccgctaacggtgaacttctggaaaatatctcggcagctgattaacagcgacatggggaaagaaatttcctacgcgctgaaaaatcaattaagaatccatctcacgcgataa

SEQ ID NO: 184021 - DNA, 402 bp, Klebsiella oxytoca
atgagtaaacactcagacattcgtgcgtctgtaattaatcacctgaaaacgatttgcccggaaaatgtaaacattattgatggtctgccggtatttatcgagcagaaccagttaccggccattgctgtatatttaaatgatgctcagtatgcggggcaaacaattgatgctgatgattgggaggctattttacatattcaggttctcctgaaagcaaataagccagattcagagctggataaatgggtggaagattttatttatccggcagtgaataaaaacgatgcgttgagggcattggtcgaaaacatctatccgattgggtacgactacacccgcgatgatgaaatggctttttggggctccgccgatatcacttttaaaattgaatatacgatgtaa

SEQ ID NO: 184022 - DNA, 735 bp, Klebsiella oxytoca
atgccaaaatcaactaccgcgccaatgaagggcgcagaaacaacactttgggtgtactcaggcaccggcaacgctctttcaaatccgctatcagatgctgactggctccgtctggcgaaagtgaaagaattaacgccgggagaaatgacggcagagtctgaatctgatgattatctggatgatgaaaacgccgactggtcgaacacaatgcagggcgcaaaatccgccggtaacacctcatttaccctcgcatggatgcccggcgacactggacaaaaagcacttgtggcgtggtttatgtctggtgatgtgcgctactacaaaattaaatacccgaatggcaccgttgatgttttccggggctggggctcatcgttgggtaaagcgatcactgcgcgtgaagtagtgacccgtaccgcgcaaatcactaacaccggtaagccgtcactggctgaagacgacgcagcgcctatttcgctgaccagtatcaaattagataaaaacgcgctcagtgtagcggtgaaagcaacctccacgattgcgatcacatttacgccggatagcgcaagcgataaaggctatcgcgtggccagctctgacccctcgaaagccaaagcggtggccagcggtagcaatgtcattgttaccggcgtggcggcggggacttcaaatattgtcattatgaccaatgacggaaatatcgtggcaacttgcacggcaacggtaacgggttaa

SEQ ID NO: 184023 - DNA, 459 bp, Klebsiella oxytoca
atggatatgttgaaaaaaggtgatttcacttaccgtgatattacagtgacgctctctgagctttcagcgctgcagcgcattgattatctggatttcctcgcgaagtctgaaaaggttttgccgtcccttgatgattcgctttcagagtctgaaattacgcgcttgctcttacgtctcgatattgaaaccggcgctttgctggtgggtatgtcgctatggcaagagaaccgaaaagggccgaagccggatgagctcgccgctaatattgtggaatcgtggccgccagaggctatccgggcggctgagctacgtgttaaagaactttctaacatgttgccgccggaagtggtggagcctgaagaagtcgcgcaggaagaggcggaacagggcgacgaagacgccaggacactacgcgaagacccgccaatgacggcggaaaagcctacgccagtgaattaa

SEQ ID NO: 184024 - DNA, 3093 bp, Klebsiella oxytoca
atggcccagcagattagcgatttaatcataaatctcgatgttgattcggcatcattcgccacgcagatagcgaaaataaaaggccagttaaatggcatgggggccgatgcgacgaccgcccgccgaagtattaacgaatcagctcaggctcagaccgaggcacttagggcaacaatgagcggcgctgcagacgccgcaaagatcgcgcagcaaagacaggagaccgcaagcgccagggtaacgaaaagctatgaacaaacggcgcaatcagttgatgaggttcaccggcgcataaaggccataaatgaccagtaccgcgccggtaatggtgacgccgcaaagctggctcagcagcaggatgcattaaccgaatcatttttcaaacagattgaagcaatccgctccctgaaaggggaagccggttccctcgcggcggtgcaagcaagagtaagggcggcgcggggctctggtgaaatatcgcagggtgattatctttccctgatttctgagctgaccgcccgacagaaatcgctgcaggaagctgaagcgaagacgacgcaacagaaagagcgttttctccggtcgctgaaatctcagctcaccgcgcaaaagctgactacatcggagcttttgcgcgtcaaagctgcagagctgggtgtgagtgatgctgctgatatctatatcaggaagatggaaaaggccgggaaagccgcgcatgggctgggattaaaaagcgcgggagcgcggcaagaaatcagcgttttgatttctgagctggcgcgcggtgagtttggttccctgaaaacttcagggatcaccctggcgaatcgggctggatggattgaccagcttttatcattgcgtgggctggggattgccgggctggtgggcggtgttactggctcactctatcttttagcaaaggcatggtatcagggcgcgcaggaaggggaggagtttaacaaacagctgattttaaccggcgactacgccggaaagagtcgcgatcagctcatgcagctggcgcgctcaatgtccggcaatgggtttaatcagcatgcggcagctggcgcgctggccaaagtggtgggctctggcgcttttaagggtgacgagctggagaaagtgacccgtaccgcgttactgatggaaaaagctgtagggcagtcagtagacgagacggttaagcaattccagcgcctgaaagatgatccagtcaacgcggcgaacgagctcgacaaagcgatccactttctcaccgcagagcaaaaagaaaatatccgcgtactgagcgaacagggcagggagacggaagccagcacgatagcggttaacgcctttgctgaggcgatgggcgagcgcatgcccaaagttgtggagaatctcggatatctggaatcggcatggcgcgccgtgaaggaggccgccagcgatgcgatctccgcaatgatggatataggccgcgacaggacgctagagcaaagaatttctgagctcagggataaagtggcggcgggcggtgttcaggtaggaaacgcatatattccggccagcaatgaagaccgggcgcagctggccgcgctggaggaagaaaaataccagaaagatttagccgcggctaaagaccgggccgagaaaaacgcgcaggagctgcaaaaacgccgggacgctcagaacgccgcactaaatcgactcaatgaagatgaaaacttacggcatgcgcgagagctggcaaaaattaaggctctggaatacgccgacgagaaagttaaaaacgcagcgatagagcgcgaaaacaagcggcataaaaaagcgcttgagaatgaaaataagaagccgaaaacaccgaagggggcgaagtaccgcgcgcccgccggtgagctggccagtgaaaaggctcaggccgagcttttaacgcttcaggctcagctaaagacgctgcagcgttattcccggccagatgatcgcataagcccgcaacggcttgcactgcagaaagcggaggataaatacactgtcttagaggaagcggcgcgccgtcgaaaactgacggatcaagagaagtcgattctggccacaaagacagaaacccttgaacatcttaaacaggtggccgcgctgggtgaccaggtggcccggcaggagcggttaaaccagctcagggacgcggccagcaaattcaccgaccagaaaaacgcagagataacccggctgcaggggctctccaccggcaagactgagcgtgaatctcagcgtgattcgacgctggacagcctccgcactaaatatcaggacgattccgccaccagtgagcaggtattagcgaagcagcgcgagctgtatgccgccgaggatgatttgcgcggaaactggcttgccggtgcaaaggccggatgggctgaatatcgcgacacggcaaccgacgcatacagcgccctgaaatctgtatctggtagcctgttttcggggctggcgtctcagctaaccgagctcaccacgaccggcaaagcgaacataaaggaattcggtgtttcgatcctcaaaatgctggctcaggtactcagccaattaatcgtagtctggacgatacaaagcgcgctcggatgggctaccggtagcgtgaacaccggcgcgcttacatcgttgctcggaggtgccgcaaacgctgcaggaggcgctgcagggggcgcgaaaatggcaagttatgacgttggcggctttactggccacggcgggaaatatgaaccggccggcaccgttcacaagggggaatttgtgttcactcaggaggccacgaagcggatcggggtggctaacctttatcgccagatgcgcggctatgccaccgggggctatgtgggtaatgcatccagcccggcaaacacgcgagcgtttgctggtggcggtatcagtgtttatgcgccggtaacgttcgttaatggctcaggagagggagaaagcgacagcagcgaagccgataataagaagatggaaaaaagtctgagaatggttgtagagcgctctgtgaccgagggaataaaagtagcgctcaggccgggcggtatgatttatatggctcagaggagaaagtaa

SEQ ID NO: 184025 - DNA, 348 bp, Klebsiella oxytoca
atgccgattgaaacattcgcatggcgtatacaggcaaacagccagcctactatcagcagcaaagacaatatcagaaaggttcaatttagcgatggttacacgcaggtttcaggctctggcctgaatgatgaacagctgatatttagttttacttttagtgggaatatagataccgctatggacattcacgcatttctcaggcggcataaaacaaagtcatttgcatttaaaccgccctttggtgagcttacgctctggcgtgtgcaaggggattctttgcaatattccgttgtgagtaaaacgattgttaatgtaactgcaacttttgaacaggcatttaatccatga

SEQ ID NO: 184026 - DNA, 753 bp, Klebsiella oxytoca
atgattaccaatgattaccagaaattagagccgggaaacgaaatcatattatttgagatagacgcaacgaattgcggcttgtcagataaaatgtattttcataatcacctgataccgtacaccgaggaggaattaaaagcggctggctttgaggctgataaattgcgctcaaagtctatctggtggcagggtaacgaatataaaccttggccgtgtcattatgagggggaggaatcatccaccaccggcagcgccgcccggcctaaattgagcgtgggtaatattgatagctcaattactgcgttatgcctcgcctacgacgaccttttaaaagctcgcgtaattattcatgagacgttagcgcaatatctcgatgctgagaattttaaagaaggtaacccgaccgccgacccgacgcaggaaaagcgctcactgtggatgattcatgccaaaacgcaagagcttgatacggtagttgagtttgagctggccagccctatggatctggaagggcttatgattcctacgcggcaatatcacgcggtttgcacatggtgtattcgcaaccagtaccggagcggcgacggctgcgactatgccgggacgcgctattttgaccggaacaataagccggtttctgacccctcaaaagatgtgtgctctggaacggttgcgggctgtaaggcccggtttggcgaagacagtgaattaccattcggcggctttccgggtacaagtctaatcagaagctga

SEQ ID NO: 184027 - DNA, 714 bp, Klebsiella oxytoca
gtggaggctcagacgattgaagatatccgacagcatgccattgctgactacccgcgcgaggcttgcggcgtggtggctaaaaacggcgatgttgaacggtatttcagatgcgggaacatcaccggcggaaactcagaggaatgttttactttgaacccgcgcgactatgccgccgctgaggattggggagaggttgtggctatcgtacatagtcacccggacgcgaccgcgcgcgcaagccctaccgatttggcgatgtgcgatgcaacgcggttaccctggcatattttcagttacccggagggcgacttgaggacatatcacccgcgcgacgatctcccacttgtcgggcgtgattttgtgctgggggtttacgattgctgggggctggttatgtcctactttcagcaaacgcatggaatcaccctggatgatttcagagtgagctatccgtggtgggaggatgaatacccggacaatttttatcacgattgctggtatgaatgcggattccgtgaatttgatgggccaccacgcgacagcgatttagtgattatgcaagttcagtcgaacaagtggaatcacagcggggttttagtcgatggcggcatgttgttacatcacctttatggccacttgagtaagcgtgcgccttatggcggatactggcgtgacaggactatgaaaatactcagacacaaaaaccttatttga

SEQ ID NO: 184028 - DNA, 615 bp, Klebsiella oxytoca
atgatgtgtgaacgcgatgaaatgagcgggcgtgaaacgaaaatcattctgtccggtgagctgggtaaacggtttggaaaaaagcacgtgcggcacctcgatagcgcagccgaagcgggcgtggctctggctcatacactggaaggattcgagagcttcatgattcaaagtgaggcgcggggcttgcggtttgccgtttacctcgacggtgaaaacgtgaatcaggaggatttggcgcgccgtggtgttcactcgtttgatgtgatccgcattgtgccggtagtcgttggtagcaaaaaggcgggggcgctgcaattgattatcggtgtagctctggtcattgcgtctatctggatgcccggcctctctatagcggcaagtgacatgctttttgccgccggtgcggccacggcgctgggtggcgctatccagatgctatcaccgcaacccgccggactatcccggagtgagtcgccagataataaagcctcatacggtttcggcagcgcgaaaaacaccacggcgcagggctacccggttggcttgctttacggacagcgccgcatcggcggggcgattatctccgcaggaatttatgtagaagaccagcagtaa

SEQ ID NO: 184029 - DNA, 10869 bp, Klebsiella oxytoca
atgcaaaaattaatatcaggccgtaaaggcggcggcggaagcagtcatacaccggtagaaagcccggatgatttgcagtcagttgctaaagcaaaaatgcttattgcgctgggtgagggtgaattttatggccagctgaccgggaaacaaatatttcttgatggcacgccgttagaaagtgaagacggtacgcaaaactttgctggcgttaaatgggagttccgaccgggaacgcaagaccagaaatatattccggggatgccgggaactgaaaacgaaatcagtttaaacaatgttgagctgaaatcgggtaagccgtgggtaaggactatcacaaacacgacactttcagcgttgcgatttcggttcaaatggccttctctgattactcagcatgataacggcgacgttaccggcgcaaaagtcaattataagattgaggttcagactgatggcggcacatgggaaacctttatagaaacggcggtagacggtaaaacaacatcgggctacgagcgaagccaccgtgtaacattgccggaagcaaaaacatcctggacagtcagaataacaaaaacgtctgaagataatacatcgctgaaagtcagcgatacgatgaatcttgaaagttacactgaagtaatagacgttaaattgcgctatccgaataccgcgctactttatattgagtttgattcaagccagtttaatggcgaaattccgccggtcacttgtgagccttacgggcgcattgttcgcgtacctgataactacgacccgcaaacgcgtacatataatggcacgtggggcggtgcgtttaaatgggcgtggacaaataacccggcgtggatattctacgatattattattgagggccgttttggcttaggtaggaatatcaagcctgagaatgtttcaaagtggcacctttatacaatcgcgcgttactgtgatgagcttgtaccagatggtaaaggcggcgacggaaaagagcctcgctatctctgtgatgtgtatatacaggaaagaaacgcggcatataattttgttcgcgacttctccgctatttttggcgggatggtttgctggagcggtgagcagattctggttactgcagatatgccgcgcgacgtggattataactttacccgcgccaataccgtggggcaaccgcgctactcaagcaccacggcaaaagaccgctacacaaacgcgcttgtgtcatggtctgacccggcaaacggttattctgaagcggtgcaaccggcctttgtaacggaatacgtcgcgcgctatgacttccagcagctggagataaccgcaatcgggtgtacccgtcaaagcgaagcataccggcgcggcctgtgggccatctatacgaataaccgcgatagagttattgatattgatgtgggtatggatgggaaaatcccgcaaccgggctacattttcagttatgcagatgagcgcctggccgggcgtgtgatcggcggcaggattagcgcggttaatggccgtgtgattacgcttgacagagatatcccggcggaagctggcgaccgtttacagattaatttgccgtctggattatctcaggcgcgtactattcaatctatcaacggaaaacgacaggtaaccgtaacaacggaatatagtgagacgccagaagcgcaagcggtttggcttgttgaatattccgatttatacgcgcagcagtaccgcacattgtcagttaagaataacaatgatggtacgtatactatttccggtattttccacgacccggacaaatacaaacgcattgattcaggcgctatcattgatgggcgtcctgttagtgtgttgccgggagcaactcaggccgcgccggaaaatataacgattaagtctacttttgtcattaatcagggcatacgcatagaaagtatgcaagtagattgggatatggcaaaaggtgccgtgtcttatgaggcgcaatggcgcagaaataatgataactggattaatattccgcgcagctcgacaacgggttttgaggttaacggaatatatacaggtcagtactctgtgcgagtgcgtgcaattaatgccgctggtgtttccagtagctggggttatgcgccggttaccacgctaaacggtaaaacgggctcaccgcttgcgcctgttgattttgcaactaaatctatcttgcatggtgtttcgctgagctgggaattcccagaggattccggcgacacgctcaagacggagatagaatacagtacggacgaagccggaaaagatgcgcgcttactgtctgatgtggcctacccggcgaaaacttatgagcagctgggcctgtctattggtgcaatattttactatcgcgcccggttggttgatcgctcaggaaatgcaagccgtttcactgactggattatcggacagtcaagcactgacttagacgagtattataaagcgctcgacgaggcaattaagggaacagaatcatttgaaaaactgcaggaggatatagagaagggccaccaggatttagtcgaagaagctcaaaaaatacgtgatgagctcgcggctgaagttgatgaaatgaattctcatgtggattcaactgtcaacgaattaaaagactctgttactcagcaaattaaagagggtacggataacttacaaaaccagattaatcaatcaaaggaggatatcgaacaggctcaaactgatatcggcgcggcaaatcaaacgatagagcagcaaaaaaaggatactgatagcgcgctggagcaggtaaacaaagatattaaagccggtgatgaggctaaccagaaagccattaaaacggctgagaaccagctaaaacaggcgattgagcagagcaatagcggctggaaagatgccgtggaggcggaaacacaaagccgaatcgacgatgtaaactcagcagcgcagaaagcagcggatcagctactgaatgagaaaagggatcgcgaagcggcaataaccggtctgcagcaaattgttcaggagggtgatgattctctggcgcggcagattgcggaaatctcagctggcagcggccagcaatttgactctttcaagatttatcattttgaccaatccgcgcagggctggacagaagacgacgccggaaacgtcgctatcccggtaacgtctgagggctggctgaagccagcaaacagcacggccacttgcatttcaccaaatggccaggctatcccggcaatggcttaccgtactgtgatgatgcgcgttaagcgcgtgggaaatcctgagtggagcggccttttctcgtggatcggcgcagatgaaaccggctggagcaatcagcgctcgatgtcgatcgccgcgcctgagtttgattcgaatggcgttaccgtcgttatgctggcggatattccgtggaacagctcggagacaatccgccgttacaaagtcgcctttaccaaaaaacaggattcgaataactattttctggtgaattgggtatccgttggccgaccggcaccgggtgcgagcacggcggcgctacgtgatgaaacgctggcgcgcacaaaagccgatgaggcagaggcaacaaagcgatcaactcttgcggctcagattcgcggaacgtccgacagcaacagcctaaacgatttacgctctggcctgatttacgatgagaaaacggcgcgcatcgatggcgataaagccgaggcatcaaagcgcgaagcgttgcaagttcagtttaacgagaataaagccagtgtggccactgagctgaagacgttaacgacagcacaaagcgcccaggcggagcagatttccgggctgaatacatcgctggggaaaaaagccgacgccgccgcgctgcagacgctgaaaacgaaagtggaggatcacgataaaacgctgagctcgcaaactacgctactcaatacgctgagtaatcgcgtagggcagacggaaaaagacggggccgcaaacagcaaggctatcagcgggctgaattctgacgttaagaagcagggcgagacgctcagcgctaacacaaaagccatcaccactttacaaggcgacctcaaaaccacaaatgagggtttgagtaaaaaagccgaccagaccgcgcttaattcgctctctggaaaggtggacgcgaacacaaaaggcattacggcgactaacgccaatgtaaccacgttaaccgcagctgtgcgcgcaggaaacgccgccagcggcgatttcatccctaacccgacatttgacccggcatataaccagatgggctttaccgtcgtttctgcgactgctgacggtgtgccgaagggatgcccgtttgattatgtggccaggctggccgggcgcgaccatcacccgaattttaatagcattgtggccactctgggcgatgtgtttgaaatgtctgtgctggtggcctgtggtgccggtagcgccgtgtttaatctctatctgggtacggcgctatctccgaccggcggcgtgggcttgcctctgtttaataaaacgctggctaataccggcagctggacgcgccacacctggcgattcaccgtcactcaggcgatggtagaccgtggctatattcggcctttcctgcaggttaaccagagtaacccattcggcactatctggtatgccacggactggcatatgcggaacatcactgcagcggccaaagcgcagacgaccgccgacgcgaccgctaaagcagtggacaccctgagcaatacggtaacgcagcaaggcaaggatatttccagcgtatctcagcgcgccacgcagctggaaaacagcgttaaaactatttcgggcgacgtggccaggaaagccgatgcggaagcactgcagaccctgcagaacacggttaagcagcagggaaccacactaagctctcacactgagtcactcaccagcctgaaaaatagccttgattcgaccgtggccgatatggacgcgagcggaaaaatgccaggtaacttgatagctaacccgtcatttgagcgcgggctcactggctactctggtggcgcgtcgtttatcaaagtgatcaacgcctccgcgccgcataccggcggcaagattcttagctgtgaaacaggcacggcttcagtcgcgcaaagtattgcagtaacgaaggacagaacataccgcttaggcgtgtgggcgcggtgtgaaagcgggacggtagtagataacaccggcaacaataaaatcagaatcggcagcaatgttttgctgaaagattttctgatatcaccggcggatctcccgaccggctcgacgtggaaagaaattgcccttgagtggaaatcgacgcttaccggcaacgttgacgtttctatcaactcctcgctgaaagctggaaagcaatatttcgatgatttctattttatagacgttaccgaccgcgtaaacatcaccgccaactcaagcgcgctcaccaacttaacaagccgggtaagcactgcagagggcaagattgaaagccagagtaaccagattactacgctgaaaaactcgctggctgagacggataaaaacgttgctaaaaaagctgatgcgctggcgctgcagcagttaacgagccgcgttgaaaaaacggaaagcgggctaacatcggcaagcacggcgattactaacctcaataactcaattgaggctttgagtaatacgggtgagaatcttgtacttaactatgatttctctcagggctccgcgctgtggaggactcaggagaacgcacaaaacccggtgacgtttggcgactacggcgacggcgggaaaggcgttaagctggttaaggtaaacgggacaacctcgccgggcatctttgcaaacaataagcgccccgtaccgattactggtcaacgtaaatatcgctttgtggtacgcgccaaaggcgtgagcggtgcgaaaaatattctcttgcgccgctggaattacgctgcagccaaagagggcgcttacgaagaaaaatccttaacgctggatactgcgtggaaaacctacacgtgggaaacgtcgcagacccccgccagcggcgtagatggccaggcatttggcttatattgccatccctcagtggctgaaatctggatcgacaatttccgggtttttgatatcactgacgaggtgaacagctcagcgaacgccgcagcactgcagacgctgcagagcaaggttaacacgcagggcgacacgctcagctctcagggcagcgcgataaccaagctggaaaatggattaaagaccacgaatgataacgtggccaggaaagccgacgcctcagcactgcagacgctgcagaataccgttaagcagcagggcgacacgctgagcgctcagagctcgacaatcaccgagttaaacagctctctgaaacgccaggagaaacgcggcgctaatattttgccggatggcacgtttgagagttatgcgaatggaaccagcctccacactacgcggctgatagtaacggatgaggataagttcagcggtacgcgatgcttacgggcaagccgtgccaacaactacaacccgaattcaacggataacaacgactgtaattttttcagcggcgtatcggcgcgcgccggtgcaacgttttatgttgagttttgggccaagccagacccaaaggccacgacgatggccgaaaacgttcaattgtctgtaggtttctcatttcaggatatggccgggagctggcaatggccagcgattacccgaaccaaaaaagacctttccggcggctggactaaggttagcgggtatctgacttgcgatcgcaaaaccctcaagcaagcgatggttagaatctcgatcccgaacgtttccacggtgaaagccggtgatgcgtttctgattgacgagctgatgattacagaggttaccgacgcgaaaaaggcgctcgacaatgccgaggtgaacgcgaaagcaattacatctctgagctcgaccgttacgcagcagggaaaggatattacctctcagggtagtgccataacgaatttgcagaacagcctgaagaccacgaatgagaatctggccaagaaggctgatgcgcaagcactgcagacgctgcagaacaccgttaagcagcagggcgacacgctgagcactaacagcagcgcgattactcaaatgcagaacgccatcaccggcattaacgcagatgaggcgctttctgtatcgatgcccggcaaccagatttcaaacgccagctttgaaaacggactcactaactacttcggaaccaatggatcaaccgtagttgaaaagctgcaggtgccacactctggcacggccgcactaaaaatcaccggacaggccgcgcccggtcagaatgttaattttgtgaagggtaattcctacttaattggcgtttgggccaagcagctgggcgggacaactgacaacggagacggagacaataaaatcagggtgggcggcgcgagcggccagccaattttcacaaagacattcagcagtgaaaaactggattctaactggcggctggtggccgacacgtggaaagcgacggaaagcggcaaattgccggtatccctgaataaccgcatcaccgccggggcgcgttatttcgattcattccatgtgattgatgttaccgaccgggtaaacctcgacgcgaccgcgacggcgctgcagacgctgcagaacaccgttaagcagcagggcgacacggtgagctctcacaccagcgcgataacgaatctgcagaatagcctgaagaccacgaatgagaacgtggccaagaaagccgacgcctcagcattgcagacgctgcagaacaccgttaagcagcagggcgacacgctgagcgctcacaccagctcgatcaccaagctggaaagcagcttaaagaccacgaatgagaacgtggccaagaaagccgaccagaccgcgcttaatacgctttccggcaaggtggacacgaacaccaaaggcatatcggcagcgaacaccagcataaccacgctaaccgcagctgtgcgcgcaggaaacgccaccagcggcgatttaatcactaacccgacctttgacccggtttataaccagatgggctttaccgtcgtttctgcgaccgctgacggtgtgccgatgggatgcccgtttggttatgccgccaagctggccgcgcgtgaccatcacccgaacttttcaagcgtggcggcgaccgttggcgatgtatatgaaattagtgtgctggtggcctgtggcgcgggctccgctgatttcaatatctatatcggcacggccgcaacgccgaacggggggatctccgcgccgctttcctctggtgggaacaccaaaaaaacatcggcatggacgcgggcaacatggcgattcaccgtcactcaggcgatggtagaccgtggctatattcggcctttcctgcaggttaaccagagcaacccattcggcactatctggtatgccacggactggcactggcggaacatcaccgctgcggccaaagcgcagacgaccgccgacgcgaccgccaaagcagtggataccctgagcaatacagtaacgcagcagggcaaagacatttccagcataagcggccgcactacaacgctggaaaatggcttaaagaccacgaatgagaacgtggccaagaaagccgacgccgccgcactgcagacgctgcagaacaccgttaaggagcagggaaacaccctcagctctcagagtggggcgctaactgagctgaaaaacgacctgagtgataccgtagccagtatggcagcagatggaaggattccgaacaacctgatttccaacggttcatttgagcgcggtatggatgcattcactggctggagcagtataaccaaggtcattagcgcacaatcgccaaactatggcgataagattttgcagtgtggagctggattggctggcgtttatcagaaggtgcctgttaagaagggtaatacttataaaattggtgtgtttgcccgtgctcaggctggttcggtaatgaatgaccagggcaacaacaaattgcgtattggtcaatcatccctgctttatgatcgtcagttcaataccgcgaatcttcccactggctcaacatggattgagctgacggggacatggaaagcaaccgttgacggaatgattgacgcctcgattagttcatcactaaaatcaggtactcagtattttgacgacttctattttgtcgatgtcacgagtgaggtagatatagcggcaaattcagcagctatcagctctctgaatagtcgcgtgacgaaaaccgaagacggcataaagacgcaaagcgaatcgataacaaagctcactaactcgcttaacaccacgaatcagaacgtggccaaaaaagcagattcggcagcactgcagacgctgcagagtacggtaaccgagcagggcaaaaagttagagacgcaatcaggctcgataaccagcctgagcaactcgattaacaccgctaaccggaagggctctaacccgtggattgatagtacgtttgagacatacgcagacggccagaagctcgccgggggctctcagattgtcgttggaacctctttcaccggcacgcgctcattgcgagtaacgcgcaacgcgaacaccaacgggaacgcggatcagctaatcggatcacgacaggctatccgtgatgatgctgtataccgggttgagttttgggcgatgatgcccgccagcgaaaatccatccactggctggaattgtgctgtgggcttccatgcgcaggacaagagcggcactaataactggcagcctggcgtttatgtcaacgaggccgggctgggtggccggggtaaatgggtgaagttttccgggctggccaaaaataacaaatcgggcagaactaacgccgtgatctggatttctccgcgcggtgccaatggtgcaaatacgccaggctataacctgtttattgataactttgtcatgactgaagtcaccgacgcgagcgccgcggtcgatggcgtcaccgcgacaaacacggcagtaaccagcctcacgaaccgcgtgaagaaaacagaggataatattgaggctcagggcaaggcggtaacctctctcaaaagtgaggttaacaacaaggccagctcctcagctgtcaacgagctgagcaccagagtaaccaagaccgagaaaacgctagagacacacacaagccagataaccggcctaacgtcctcactcaaagataaggccgatgccagcgctgtgaacaagctaacaacgcgggttactgatgctgaggggaaaatagacgctcacaccacgagcataggctcgctgaattcctctgtgggtacactctcatcgacagtgaaaacgcagggcgagacgctggccagcaatgataaaacattaaaggccatgtactcaatcaaggttgagacgaacaacggcaagaaagtaggcgcgggtatcgtgttagggagcgacggctctaccagtgacatgattttgtatgcggatcgcttctccctgttcaaccgcaacagtaaaaccgccgtgccggtgatgattgccgaaggaaacgagctgtacattgataccgcccggattaagaacggttcgatccagaacgccaagattggcgatattcagtcaaataactacgtgggtggacgtgagggctggcgtattacgaaatcaggggcgagcgaatttaataacgtggttgttcgtggagagatgcatgccgctagcggaaactttagcttcaatggagtcgataatacggtggtacttgacggaaatggcgtcactgtcaaccttcctggtggcggtatgattagattaggaacatggtaa

SEQ ID NO: 184030 - DNA, 966 bp, Klebsiella oxytoca
atgggtgcaggcttattaattgatttgaatgatgggggaccgcgaatggaaattaccgcaggccttcgctgtccttcatttagtcatttcgtagctgaggggtgggggacaactaaaactactgtccagaattacgtgccggggagtcaggttattgtcgtacctcacagggcggttcattcagcaaaagtaaatacgaacgatttaagcccggcgctcgccgttctcagtagcgtttcagtttctggttcaacgattgaatttaacgttacatggtcgcgtaaatggccccgcgatcaatatacatttccctgttccatcttccagattttgccatcaaacacaggacagggtttattgatacgagattctactgatttcatgtccattcagaacacagccactattggttactgtatctggcgtggaaaagtgactgtagatggttcgtggacgccacctgctattgaagggattgaccgtgaaaggtatatgatttttgcaaaatggagtgatgcagacgctacgatagaatatgacggcaatacagtcagggcattaagaaactggagcggaacgaatgaaaacagaactgttactatggatgtggccatatttgcaagtggcgttaagcctcagcccggtaccgggctgaatttctttaatcgtaatggtgaatgcgtattttcaacgactaaacggccttttatttacacggggcgaacatgggtcccctcgtttgtggcaaaagatatcggaaactcaatggtgcaacttggcacctggggctacagaagcaggaattacaacggctggtgccgtgtaaagttcctgggtattgttcgggatggtaacaggatttggtgtggaaccggcagaacctacaatgaatggacggcaaattatggtgtcgaaagtgacggggtatcagggttagatgttttgcttatagatgcaatgtattga

SEQ ID NO: 184031 - DNA, 339 bp, Klebsiella oxytoca
gtgaaaaataaacttattttattagcagttttggcccttacaggctgtaagtctctggagtatgtgcgttcccttgatcccgtagctaaaggggaaaccccaaaaactgtagaggcatttatggagtgtatttctctcaagtggagcactagcggaggtcagctaagcactttaccgctggccaacggaatgagcatagggcagcagcagccgagggggggttatgatgttgtactggatgctaaaaggacggcaaacggtacagaatatgtcttgtatgaaagagtaccgtttttaacatctggtagttatcagcaatcattaaaagattgtcgataa

SEQ ID NO: 184032 - DNA, 234 bp, Klebsiella oxytoca
atgggtatgcatgcgggtaacgtgtggcgtatcaactcgaaattcatcgaatttttatacccgttcaccatccattttttggggcagattttggggcaaaaacgcttttggggcatgatttggggcgttcaaaagtctgcatttgtccgtatttgttcaaatgtcaatcttgctatatcattgaaagtattgcagatcattgaatttgctaaactattttttggcatgccataa

SEQ ID NO: 184033 - DNA, 1542 bp, Klebsiella oxytoca
atgcaagatattttatcatggattgacgtcggaaaactttcggctgagcgcgatgacaatcttattaattattttcatgataatggagttttgaaaaacataatcgatacaccatcttctttcttagtattaggaagaaaaggtgcaggaaaaactgcactctttagatatctaacaagcaatccatatcaatttttgaaaaaagatgaagtattagtatctctatcgtttgaggactacaactggagagtccattctcttttaagtaatgagtatgcagcaggttcactggcttacaaacaatcatggaaatttgttatactagttgaagtaataaaggcatattataaatatttaagtgacgctaaaagtaaaataccaaaaccattacaaaaagctcaagacgctttaaataaaatctttgatacaccatttccttccatatctgtattagtcggaaggaaattattgaatttaggtaaggtctctttacctaaagcaggtttaaatattgatgacggggatcttaactctttagatgtagatggcggtgaagttctgttcgaaaatgcagtcaatgacccttctttaaaagataaactttgtaataacatagaccatttaattactttttttgaaaactgcctgcaggcatgccaacctctacatgcaaaagtttttgtctgttttgatcggattgatgaggcctgggatgacatttcagttgatatttcgcgacgagttatcgctggcttagtcacggctgctgactctctcactcctaaatataaaggatatgttagacccttgatatttttacgtgaggatatatttgaagtattaagcctgaatgactcaaacaaattacgagaagattgtggggaattattacactggagtagagaaacactgatgaaaatgcttctccagcgaattaactattatgccgcacgcaataacaaagatttagtacacgatgttgatgatctcttcgatcgccctgaaatgcgacaacgagctaaaccgtctaactatcttatgaaacgctctatgatgcgccctcgagatatgatttgcttgttaacaaaaactatatcatcaatgcgtgatgacaaaaacgatccgttttctgaaaatcaatctgttggaaacaaattagaagcagaatatatttatcatgcagagcctagttactctgaatggttaaaacaggaagtgattgatgaatgggcagtacaaagaccagaaattcgagttttacttgcagccattcagaataattcatcaaccgttttcactaaagatgaactcctctcagaaatacagaaaatagatagcacatataatgatgaactcattaatgagtatattagatttttgttcgatatatcgctcataggttttaaggtagggcagtccactatatggcgatataaatgcttttatccgtcacaaggctttattgattctgatgagtataaaattcatgatggtttaataagggttttaaacttaaaagaacccagagaaaaaacagaataa

SEQ ID NO: 184034 - DNA, 261 bp, Klebsiella oxytoca
gtgcagttctgcgagtttctcggacgccagcgtcggcccaaagtcggtatagcgctcgcggataatattgagagcatactgagcaaggccatcaggaagctggttattgctgggttttccgcgacggcggttagccataccaagcgagccagattcacggtaacacgacagaagacgtcgatactggcgattgggaatgcccaagcgctgcgcggccatctgcgaggtcagtcgctggccgacaacatcctgaatggttaa

SEQ ID NO: 184035 - DNA, 1212 bp, Klebsiella oxytoca
atggcggcaagatggcaaggtactatcgcattacttttgttaataattatttcttacgtcgatcgggtaaatatctcagtgatgattctgaaccccgaatttgccgctcactttcatttaaatgaaaacagaatgttacaaggcatgctgatgacatgctttcttcttggttatggtttatcggctttaatattaactccccttatagaaagtaagctcaactatcgccaggggctgttaagcagcgtagcgatatgggcgctggtttgcgcggtttctccgctgctgggctccctgctgggcatgttaatcgcgcgcatcgttctcggcgttgccgaggggccgctattctcgctgaaaacccgctttatcagcgatagcttcgccgccgatgaggtcggtaaacctaacgccgtgaccgctctcggcgtttcactcgggctggcggctggctttccgctggtcacctggctgatggcgcacgtcggctggatgggatcgttttacgccctggcgctgctcaacctactgctcggcggcggcttagtctggcgctttttacctgctccagtcgtcaatgaacgccgcgccaggcccggtatgattacaaccttgaccctcgcctggcgcacgccgctgctgggctggatcctgctggtggagatcgccaccctcagctatctatggggcagcagcgcctggctgccggcctggctgcgcgatgagcatcacttctcgctacaggctaccggcctgctggcggcggttccgtttctgctgagcctgggttcaaaatttctcggaggggtacttctcgataaaatgcgcccggagcaggcgccggtgctgtttattatcggcggcctgctgactgccctgtcggtactggcgctgatgctcagccaccagcaggcaatgctggcgctgtttatgctggcggcgaacgttttctgggggctgcagggcgcggcgatcccggcggtcgtgcagcatcatgcgccgcacgaagcggtaggcagcgcctatggcattattaatggcatcggtaatatctgcgcggcgtttatcccgctgctgatgggaatggtcatgaaatcggcgggatcggtaagctcaggattctcggtgctggtagtatcgcagctgataacgctttgcgccggaggcatgctgctgctgcgcatgcgtcgcgcagcagcagtcagcgtctga

SEQ ID NO: 184036 - DNA, 699 bp, Klebsiella oxytoca
atgaaagcgttacttgttttatctttaatgacgtcatgtttgactttttcaataaatagtcatgcggcggtttcggtcggcgggactcgcctggtttttcatggcgatgaaaaagaagcatcgattactgtaagcaatacgaacaagggcattcccgttcttattcagtcatgggtggacgaaggggagaatagcaaagctaaggccccctttatgattaccccaccattatttcgtcttgagccaggccaggacaatactttgcgcgccgtctttacaggtgcaaaccttgcgcaagaccgggagtcattattctggctaaacattaagactatcccttcagttaaaaaaaatgaggtacaggctaatacattgcagctggcgatcaaaaaaaggctgaaatttatttatcgtccttcagctgtgaaaggtttacctgaagaaagcggtgataaacttatctggaaaaaagtcggtaaccagatccaggtgactaacccaacgccgttttatatgaacttcagcgtcattacggtgggcggaaagatatttaaacccaccttaccagaacagacctatgtggcaccagcaacagaacgactatttactattccagcaggggcagtcggtaacaccgttagctggaaaataattaatgattacggtacgagtggcaaagagttccactcaaaatattaa

SEQ ID NO: 184037 - DNA, 2526 bp, Klebsiella oxytoca
ttgcgccagttcaatttcaatatgaaatatacatgcctcttgattatgtctgcgctattcaatgctccagccatatcgtttgcagatgagttttttaaccctgctttgcttgaggttcgcgaaggggatggcgcgccgacgacagacctctcggtatttgaagtcgtcaatgggcagccagcaggaaactaccgtgtagatatctacgtcaataacgaaatggtgaccgcagatgcccgcgatgtgatgttttcaaagaacaaggatggaaagctggatccctgcgtcaccctggcagaacttagccaatggggaattgataccgcctcatttccagaacttgccgtcaatgatagcgaatgcgccaatcttgcgggtataccggatgcatttgccgactttcagtttaaccgccaaaagctgaatctgagtatccctcatgcggcaatgaatacgcgcagcctggatgaagtgcccgttgaacgttgggatgaaggtattccagccctcctcctcaattacaacatgaatagctatcagagccgatttaagggtgcagagacttatgagagcacgtatttgaacctgcgtcccggtctcaatatcggtccctggcgtctgcgcaactacaccacctttgagcatagtaatcagagtggaagtaaatgggacaacgtctatagctatcttcagcggaatattatctctttgcgcagccagctgacgttaggcgacagttcagcaccagctgatgtcttcgatagcgtgccgtttcgtggttttcagatggcctcggacgacgacatgctgccttccagcgtacgtaactacgcgcctgtgattcgaggggttgcccgcagcaacgccctggtcaccatccgtcagaacggctacgtggtctatgagaccaaagtggcgccgggggcgtttgagatctccgatctggcctccaccgggggagcaggcgatcttgacgtgaccatcaaagaagccgacggcagcgagcagcacttgcgcattccctacgcatctttgcctgttctacagcgtgaaggtaagtttcgctatagcgtaacgggtggccaattccgctcctacgattctcgcacggaaaaaaacctgtttgttcaggggaccggaatttacgggctttcatggggctttacgctctacggtggcgtgcaaaacgcaggcaataaatatcagtcatatgcgttgggtgtgggtaagaatatcggtagctggggcgccttttccgccgacgccatccattcccgatccatctcgaccgataccggcaggcaacagggccagtcgctccgggtacgctatagcaaaaatttcctgcagacgggaacgaactttaccatcgccggctatcgctattccacctccggatttcgctcgctggaagaaacgctggggacctaccgcagcgataataacattccttcttatatcaccgatcgccggcgcaaccgtgcagagctgtcgctgaatcaggatcttggcgataactttggggcgttgaatgcatccttgattagcgaagattactggcagaaagaacgtaacagcctgtcggcgaacctggggtattacaaaaatttcaacgcgattggtatcagtctgaactactcctggaaccggaataccggactgtatggccatgccgaacaggataatgtggtctcctttgaaatcaatgtgccgctggataaattcctcaaccggacatacgcctcatacgggacaacccatgcgagtggaaacgggaccagccacaacctgcgactgaatggttcagcctttgaggatgccagtcttgactgggggataaacgcgacgcacgccgggcgtagcgaacaacaagtcgtcgggggcaacgtcagctggaaggcaagctacggaacgttaaatggttcctacagccgcagccgcgacagccaacagctggggtatggcatagccggtggggtagtgattcatgagaatggtatcacgctgtcccaatcgctgggtgaaaccattgggttagttaaggctcctggcgctgaaggcattggcatcaataactacgccggtatctctacggatagccggggctatgcggttgttccttatctgacaccctatcgccgcaatgatattagtctgaatagcaagaccctgcgggacgataccgatatcacctatatgaccaataaagttgttcccacccgcggggctatcgtcagggcggagtataaaaccgccattggccaccgtgtcctgatgacattaacgctgcccggcggcaaaccggtcccctttggcgcaatggcgtcactgcttaaaagtgaagaaaacgcgtcaattgtcggtgatggcggagaagtgctgctgagcggtttaccgcaaaaagggacgctgcaggtgaaatgggggaatggccaggggcaggaaaccgcctgccgggtggagtatatagcccataaatctgctggcgcgtccggtctctggaacgcgacgagcgtctgtcaataa

SEQ ID NO: 184038 - DNA, 1164 bp, Klebsiella oxytoca
atgaagtggtttgtttttatgttcgttgccatcgcagcgacgctgatggtcacccctgaggccaatagcggatcgtttgatccggtaaccggcgcttatactacggatccgataaccgtcacgctgacgccaaggaccgttacggccagcgcgtcggtaatcgctaatggtgaaagggtttactgggccgctaataattatgctcaacgtggaggaccattttactgggggccgcatacccatacaatgagcagttctgctattgccacaaccgccgcaacaaaaattaacgcaactggggtatgctcggcatccgccagcggtacatcgcttaccataagcggatgcttctcctttatggagccttatatgatctacatgggcaaaagtgcctcttgtaaatcgttttatagtgtacagagcaatgtaagttatttaacgagttttggggagtttgttgggctaacctttaatttaggctcttctcaacgagtttacacattaaataaatcagcaatatcaagcgtcaatacgacttctgttacttatccgcgccagacggttgggccatttcaagtatcgtcctcgccgtatgacgccgacttgaaggcgacgcttaccgccaaaacaccaccctatgtttattttaactgttccgtaccacaaggtgcgagcatgactctgagcacagcgggagtcgtcgcccaggcttttgagatggtaaccacggtcaacaaacccgcctatgccccgacgattagttactcgccggcgcttcctataaccaatactatcgccgttaatattcgcaacattgctgcgatggaaattctccccagcacggtattcaacaccgggactatctccgcctggcgcacaacctatatggaacaaccgcttaccgtaaccgggcagggcaatataacccgcaattttggcgcatcgcagaactttaacgttcttgaatcctggacctgcgcgacaacagggcaaatcgattttcgaataatgcgcgacaataccaacgccaacgtctgttcgggcgccacctatacccaccccgtgcagacgccacagtcgttgacggcgcagtggaaagcgcaaagctcgaacgcctcaggcacctggagcgccagggctacagtgacctttacgctgccctag

SEQ ID NO: 184039 - DNA, 1092 bp, Klebsiella oxytoca
atgaaaaacgcgatttatcttttaaccggcggcattgctctcgccctgtttgccgcagcaccggcacgcgcggcgatgggcggctgcgaagccgtaggcgggcctgttaattttaccaccagctttgccaacgactggacaaaagagcaaaacgtcgccgggactttaatagacctgacctccggcaccacctctggcggtagctataaaatggtttgcgactgtcccgccaacaccaaggttaatctctactacaccaccaccacgccgttagctaactccggctattccggatttcaaaaattaaatgacagtctggatattaaaacggtgattaccgatgtacccggcgtatcggcgcttaaggttcccactggtgtgaattcaccggtcagaggagacgggtcttttcaggcctcaaagggcaatagcgtatgcagtggggatcctgaggagcagcgcgccggggcatttaccgtgggcagtaacgtcagcattacctttcgcgtcacgcaatcttttttaggccggatggagatccccagcacgcatattgcaaccctccagtcagcatggagtagttccagttcatatgcaaaatttgtctacaaagatattgccgatatttatctccagggcagcatcaccgttccgcaaagctgtaagattaacgaaggcgatgtcattcaggtcgaccttgggcaaattcgcgcttcaacgttcaccactaaaggccatatgccggacggatacactcctgtagagtttgacattgtctacgattgcggggatacgtccttgtttggaaaaaatgactatatccttctggatgtccagggcgaggatatctttgatgagtacacattagccgcccgccgccgggaatcagataacgccgcagatattggtattcagatgagtaaccttagcacaggtgggggaactaccactgttacgggtgcgccagctattaatttatatgattcagcaggcgttgttcggatgcgggcgacgccaattaacctggtcggtggggccctacagccagggcctttccgtacctctgcaaccctcaccgcaacggttagatag

SEQ ID NO: 184040 - DNA, 558 bp, Klebsiella oxytoca
atgactacggtatttgttgcaggctcgataaccatcaaaaacctcgacacgcttatcgtggatcgcttgaaaaaaattgttaactcacaatttcagatagttgttggtgatgccaatggtgtcgactcatctgtgcaacgagtgttggtagacctggggtgcagacaagctaccgtattcagcagttccgaaaaaccacgcaacaatcttggttcatggcctgtacatgttgtagatacaaatcatgcctcaggctcccgtgcgtttttcactgccaaagacctcaaaatggctgaagaggcagattatggcttaatggtttgggatgctaaaagtacaggcactttgagcaatgttatcgaattactgaagcgtaaaaaatattcggttgtctttgtgaataaagccaaaaaattttttattatcaaaacgcccgaagatctggatgctctccttgattgcatgacatcagccgctttggaaaaagctgatgaaaaaatcaagttacgcgaaaaagtaaaccagctaaaaaacgaacagatgcagatgtttatgtga

SEQ ID NO: 184041 - DNA, 582 bp, Klebsiella oxytoca
atggatgtcaacctgaaacaaattgatggtaattggcagctaggttttgcaatggataagcacagcattcgcagcattccaatcggagaagacgaatggggacatatgcgattcgaaacagaacgaacggaagtcggtgaagcacttttccagctgaaatatcggaatgattggtcgcaagtcactcctttggcccaatgcctggctgataacgcctaccccaacttcgacaacatcggctttatcgtgcccatgccagcatcaaatccaagagatcgacaaccagtgacagagattgctcaggaattggcaagattagttgataaaccctgttttgatggcttactacggaaagctcctggaggggcctcgttaaaaaacttaagttcaaaggccgaaaagatcgaagcaataggcgattcgttctcggtacaagatatcattagcaatcaaggatgctggaacgtacttgttatagacgatctgtatcatacaggggcctccatggaggctgcatgtgatgttctaaacgggtatgctaaagtaagaaacatatatgtagcagctttgacctggagataa

SEQ ID NO: 184042 - DNA, 1014 bp, Klebsiella oxytoca
atgaacaaaatcagagccgccgtggtcggcgcaggtatctacggcaggcaccatatgaacgcgtaccgccataacccggacacggtgctggtcgccatctgcgacaccgacacagaacgctgcgacgacctcgccatggcctacggcgtgatgggctatacccggcaggatgtcctgctgcaggaggaagccatcgacgtggtctcggtggcgacgccggacccgtaccacaccgaatccatcctcaccgccctgcgccacggcaagcatgtactggcggaaaagccgctcgccacctcggtacgcgaatgtgaactcatcgtggagatggcacagcagcgtgacctgctgatcggcgtcgatttccacaagcgctgggacccggcagtgatgcgcattaaggccgaactggagaagccggaagccgggcgcatcctgcgcgggcatatcagcatggacgatgtcatcagcgtaccgacggagtggctgaactgggcgggcgcaagctccccggtgtggtttctcggctcacactgctttgacctggtgcgccacctttccggacaggaggtggtgtctgtgtatgccgtcgggcagaagcggctgatggttgaatgcggcctcgacacctttgacagcgtgcagagcctgctgacgatggctgacggcagttcgtgggtggtggaaaactcatgggtgctgccggaaggcttcccgaaggacaacgatgggcgtattgatatcctctgcgaggccacctatatccgcagcacctcgcagcatcgcgggctggaaatcactacgccgggcatgacgctcacgccaaacagctatttcatcaactaccgcaacggcgttgccagcggttttggtatcgacccgatcaatgactttgtgcgggcggtcatacataaagcgccgtacccggtcaccgcgatggacggactggcggtgagccggatctgcgaggcggtgcaccgtagcctggagagcggcaaacctgaaaatgtgtaa

SEQ ID NO: 184043 - DNA, 522 bp, Klebsiella oxytoca
atgtttctggtctccctggctgaaggctttatccacctgttcctggccgcaggcaaaatattcctcgacatgatgaccgggcttatcccgatgctcatttgcctgctgctggccatcaacttcctgatgaagctggttggcaccgtgcggatggagaagatcgccgccctgctcggccgctcgcgcatcctcacctacggcgtgctgccggtgctcggctggttctttatgagcagccccggtgcgctgacgctcggcaagcttttacctgagaagagcaagcccggctatgaggatgcactcggcaccaccgcccatccgctcaccagcctgtttccccacgtagtgccatcagagctgtttgtctggctcggcgtggctgcgggggttaaggcactcggcctgcccgttacctcactggcgctgcgctatattgccgccgccatgctgattggtttaatccgcgggattatcaccgagtacctgtttctgcggctcagcaggcgggggaatgcatcatga

SEQ ID NO: 184044 - DNA, 975 bp, Klebsiella oxytoca
atgttaaataaaatctataaatatactccattaagattcgatttctttgataatcttcttctaagagccagccaaaaatatgcgttaaatgatccatttgaacttaggccaagccatcatagtgaaacaaatagtatcgatatgaagcattttgaagaactttcaaacgcttcatattttgattatgcagtgatttcgctttcagaaacgaataataatcttttgatgtggtcacattatgcagatcaacataaagggattgtcattgagtttgataccagcaaaccattattcgaaagttataaagattttactgctctaagatttgacgaagatattgaaggggaaattattgacatagaagaaaacgaacgaagagaaaatataaaagcggggtgtattcaaagagtgcgttataattcaaaacggcccaacattaaaaactttgaaaacatcctcgaacatttccttataaaaagtgaagaatggatatatgaaaaagaacatagaataatattaccacttctaactgctgatttcataatcacccatgaaaaattcctagataaaattgcgtttactttatatgatgatgagtatttcaatagaacatcagtaggcaattcgatgtacctaattgatattaaaaatttattaaatagagagggtgaacgttatcttaatgagttatatgaatctcctcttgtatcatatgaagaaacaaaaaactcttttatagaatctatctatcaagaatacctgaaagaaatatctgaagacccaagaactatcttcctttacaaaacccctcccgaatccattaaatctatttaccttggttgcagagttagcatagcagatcgagataagctcatgaaaaaaatcacaaacagcagtaaattatctcatgtaaatatataccaagctataacaagccctacgagatttgaactggaatttcaactattaaaataa

SEQ ID NO: 184045 - DNA, 216 bp, Klebsiella oxytoca
atgaaaacccgtactgacagtaacgatacttttcccgaaagcggtaacgtgcgtatgcggcaggtggtccagtttctggcgatgagcgaatcgtcggtttaccgcctgattaaagacaccaactttccccgccccgtccacctctcttcccgactggtggttttcgatgccgctgaaatccgtcagtggcagcaacgccgcaccgccatccgctaa

SEQ ID NO: 184046 - DNA, 681 bp, Klebsiella oxytoca
atgaaaaaggttaaatggattaagttaaacatacggcttgagtttgaaacagccgttagacgtctttctcttgattcttttactgaggataaagggaaggggtttatttttgataaaatacgccatgatttagcacatggacgctttgtggagcgtattgtttatcatgacaaagtattaaattttgacggaagcgaaactacagttgaaagagtcgaatatcgcactacaaatttcaacttggctataaactctcttcctataatgcagattactaaccccccccgaacattaaaaccattttcacaggctttggtcaaaaatcttggcttaggagttagcctcgaagagatagatataaacccaatagactggcttaatgaaatatctttaaatgtaaatatcaacttaacacaactcgatatttcaagagttagagtctctgattatgccactgctaaaatgcaaattattggtagcagcgatcttagaaaatattataaaaatgagcttgaaggcaaaaaaataagaattgacagaattgtttgctcggttaattcattagaacattccggcaagcttaaaataaataataacggccttgcttacattgatgttagaaatgaaaatgagtttattaaaatcgtgtttgattcgttaaaaaaagtggcctttcaataa

SEQ ID NO: 184047 - DNA, 1080 bp, Klebsiella oxytoca
atggctaaaaaactatacttcgcaactgataaaaatatttatgatgctttgcatcacaaaagaataacccctacgaagttacatgaattattgttgaacagaggtgtattcttatcaccagaacttgataaggaaatactaatcgaggaaatatccaaacttcctcatggatttaacgaattagagcacataaaaaaattggtcaaaacatatgatccaagagaaagcactactagtgtaagctttcaaacttcaacaaatcaggcagaattaaaaagtgcagctgaagcattgaaaaaaacatgttcttctagtaaaggtcaaagcctgaacattgtcacaaaaaaagatggttctcttacagtcgaatacaaatacgaagaaatagacttatctaaaacagcattacgtcaaatcgataaacggaatgtgacaattgagctgcgccccggaactgacaaggttgaagttcgtatgcctcaaaatcccgaggcaaaaaaagttattgagagtttgcaaaacgagctatctaaaatcaagtccgaacctattgaacgttttgaaatttctttgctggcaataacagaccctacattgcgaagtcagttctttcaagaattaatgaatggtctacatggttatgagactgatgatgtgacgaaagttgaattaaatcgtagtactgacgcgaatgatgatgaagacagggaagaaacaattgataccggatttgttaagaaagccgttttgaatggcgaaggggtgaatagttcagctatattctctcaactgcatgagaagggttattatattggtcgcattgcatggtcatcaaaacctataaatggaattggtgatagaattaatgttgaagcgttttttaaagattctgaaaaatgctgcgactttgcttatcaaattaaagggataaataatcaaaaagaagatgatttcaatgtaaccattcgagcggcaacggcacaagagaaaaaacatattagtgaattaattgagtcagccgctgaaaatgcctataatgtaataataggatcagaggtaaacgaagatgaaaaaggttaa

SEQ ID NO: 184048 - DNA, 1002 bp, Klebsiella oxytoca
atgggtggagaaacttcggctattcagagagtcgctggaaagatttctgacgatattttctcggtatttaaatgggatcgtgcagcaagagcggatatgaactgggagtgttgccaagaagcacattccaagaaaacccatccaagtgatgttgtatttttctacatagatccatatgaagaggaaatggtctatctgaatactgatctcaaaagctatgcagaaggtactattgggaaaaaaattgtcgaaggcgctttaacctcacttgctttagctaccgaatgtgcaaatgtaagtgaagagtggcgattaaaatacgttcatgatgattctctaggatataatgttagaggactgttgttcttatataatcatgataattcatatgataaaaacttctatgagaatattactaaaaaattagaccatactgctataaactgccctccaaacataaagctacatttgcttgatccctataaaatatctgatttaatcaatatatcttctgatataactaaattaataggttctggtaaacttcctcaacctgataagttcacttactattatccagatctttccctcacaagaataaaacacccaattaatcaggcaacacctgcgacaattgaattgttgacatcaccatatattataataaagcatgaagcttttagttggcttagagataagattccagaggggtatgtggtttattataatcaaccaggagattctgtagacgaatttgtatatttctttgatatgctatcaacttatcagatacttaccgaaggtaaaccaattgtattacgccactgtcatactcatccaaatgaaaatgccattcatcactttgaaaaagcaaaaaagaaatacagtactgactggcttttaggggaggatgaaagactttttcttaaaatcgatttcgacaagactgataaaattgtcgttgaatatgaccttgagcaaatcggtatggagcaaagataa

SEQ ID NO: 184049 - DNA, 1248 bp, Klebsiella oxytoca
atgcctaaggtattgaaatccctaaccaataccgagatcgctgccgccaagccgcagaagaccgagtatatgctgcgcgatggcgacggactggcgttgttgattaagccatccggcagaaagatctggtacttcgaatacgctcccccggcgctgaaaaaacggaccaaaatcagcattggcccctacccggtagtcaccctcgccatggcgcgagatttcaggttgcaataccggcgtttacttgtgcagggcatcgacccacaggcccatctggagcaggttgcagaggagcaacgactccagaatgaatgcacgctggaaaaagttgcggaacagtggctcaaagaaaaaaaacggaccagcgatcttagcgaagatcacgccaaagatgtctggcgctcgctggagatgcacgtcttcccttctctgggtaacacgcccgtcactgagatccgcccgaagatgctcaaggaacacctcacgccactggaagaacagggcatcctcgaaacgctacggcgggttatctcacggctcaatgaaatcttccgcttcgccatctccgaagagctcatcgagttcaatccggctgacaacctggtcgcacgcttcaagaaaccgaaaaagcagaacatgcccgcccttcaccccagcgaactgggcaggctaatgctggcgctacagaacgcctccatccgcaaggaaacacgctgccttatcgaatgggagctactgacctgggttcgccccggcgaagccgttagcgcccgctggggcgacatcgatatgaaaaaagcggaatggcgcatccccgacacctttatgaagatgaaccgttcgcacacggtgccgctcagcaaacaggcgctgcgcgttcttcagataatggagccggtcagccgccatcgcccatgggtgttccccagcatccgcaaaccactggagcatatgcaccagcagaccgcaaacgccgcgcttatccgcatggggttcggcggcgaactggttgcccacggtatgcgcagcatcgccagaacggcgggagcaggccattttccccgtgaagtactggaatcggcattggcgcaccagaaagaagatgagatcgaagcggcctacaaccgcagcgactatctggaacaaaggcgaccgctaatgcagtggtggggaaactacgttgatgctgccagacggcaggcgctgctcggtgaagaagaaccgctgcggatcgtggaaggagaataa

SEQ ID NO: 184050 - DNA, 762 bp, Klebsiella oxytoca
atggtctgtcagatggagctgaccagccatctgctgacggcagcagccttcggtacgatgaaaaacagcgaaaatgagcttgctgagcagcttatagagcagaccggcgataacaccctgacgttaatggataaaggttattactcactgggactgttaaatgcctggagccaggcgggagaacaccgccactggatgatcccgctcagaaaaggtgcgcagtatgaagagatcagaaaactgggcaagggggaccacctggtcacgctgaaaaccattccccaggcccgaaaaaagtggccgggtctggggaatgagatgaccgcgcgactgctgaccgtgacgcgcaaaggaaaagtctgccatcttctgacgtcgatgacggacgccatgcgttatcccgggggagaaatggcagacctgtacagccatcgccgggaaatagaactgggatacagggagataaaacagacgatgcaactgagcaggctgacgctgagaagtaaaaagccggcgcttgtggagcaggaactgtggggagtattactggcttataatctggtgagatatcagatgatgaagatggcgggacatctgaaagggtactggccgaatcagctgagcttctcagaatcatgcggaatggtgatgagaatgctgatgacgttgcagggcgcgtcaccggggcgtatcccggagctgatgcgtgatctggagagtatggggcagctggtaaaattaccgacaaagttgcttaactga

SEQ ID NO: 184051 - DNA, 411 bp, Klebsiella oxytoca
atgcacattggacaggctcttgatctggtatcccgttacgattccctgcgtaacccgctgacttctccgggagattatctcgacccggaactcatctcccgttgtcttgaagagtccggcacggtcaccctgcgcaaacgccgtctaccgctggaaatgatggtctggtgcatcgtcggcatggcgcttgaacgtaaggaaccccttcaccagatcgtgaaccggctggatatcatgctgccgggcagtcgcccctttgtcgcacccagcgcagtgatccaggcccgtcagcggctgggcagcgaggccgtccgccgtgtgttcacgcaaacagcgcagctctggcataacaccacaccgcatccgcactggtgtggcctgaccctgctggccatcgatggtgtgttctga

SEQ ID NO: 184052 - DNA, 1197 bp, Klebsiella oxytoca
atgccactcaatgcacgtcaggtagagactgcaaaacccagagacaaagcctataagctcgctgacggcggaggactctatctcatggtcaatactaatggttcaaagtactggcgtatgaagtatcgatttgccgggaaagagaaaaagctctcgtttggaacctacccggacatttcactcgcacaagctcgcactaagcgtgatgaagcaagaaaaacgctagcgaatgacatagatcccggtgaagttaaaaaagccaaactgcttgcccaaaaactctcagtgacaaacacttttgaagcaatagcactcgaatggtacaacgcaaaagtatctggctggtcgaaaaattatgctggttacgttaaacgagcttttaataataatgtcttcccctatctaggctcccagccagtcaatgaaattaagccgctggagcttttatctgtattgcaacgaatggaaaagcggggggcattagagctcgccagcaaagtgcgccagcgttgtagcgaagtgttccaatatgccattgttactggccgcgccgagtacaaccctgcagctgatctcggtagcgctttgcagggttacgagaaacaacattatccttttcttaccgcagcagagctgcccgagttcttgcacaagctttcacaatactccggcagtttaataacgcttctggcgacacgactgctaatgcttacgggcttgagaacagtcgagctacgtatggctgaatggagtgaaatcgactttgataattctatttgggaaatacctaaaagcagaatgaagatgagacggcctcacattgtccccctttctactcaatccctgacagcacttcggcaactcgagcaattgaccggatcttaccactttatttttgcaggtcgaaacgatgttaacaaaccaatgagtgaagccagcatcaatatggttctgaaaaggatcggttacgacaagagagcgaccgggcatggttttcgtcacaccatgagtacaatcttacacgaggaaggattcaatactgcatggattgagacccagcttgcgcatgttgataagaatgcgattcgcgggacgtacaaccatgctcagtatctggaagggcggagggagatgatgcagtggtatgctgactatattgataacattagcaagaataaagttatcatagcattatga

SEQ ID NO: 184053 - DNA, 3012 bp, Klebsiella oxytoca
gtggttatctttgaagatcttgataggctaggaacgcctgagattttcgttaagttgcgtgaaattaacaaaatagttaataacaatattgttgatggcaacccggtcaggtttgtttatgcggtaagagacgacctgttcctgggggctgatgccagaactaaattctttgattttattcttcccgttattccatttatggatagcagaaatgcgtttactctattaaagaggaaaatgtcgctcgatacgcataatgataaatatctgaaagacatttcggcatatataaatgatatgcgcagcctgcaaaatttggtcaatgaataccatgtattcagcaatatcgttgataacggaaatgataaaatcaaactgttgtcgctggttttttataaaaatatctacgccttagactatttccttaccgataagaaaacaggagttttatattcatttattcgtgactatcgcactcgcaaacttcaccgtaatcatttctactctctggaaaaaaaattggatagtttacagtccgaaatagaatatcttaatcatgaacctatgtatgatcataggggaattagagaggaaatagtttgtcgatatattccgaaaatactctgggatggcattcattttggtacggggaatggatacagtaatttttaccccctaacaaccttggctttaattgatgatgaaaatatttttttagaatttttatcgcaaaaggaaaatttatatataggctattttgttagtcatcagagatattcactctcactttttgatagggcattaagagaacaactaaaagaagaatacctgaaacgaaaaacaaaaatgggtaaagataaaaactcggcttttagtgagctgcagataaaaataaagaaacttaaagagtcaataaaattaaaaaatgccctttcgctgcgagaacttacgctaatcatcgggcgtgaaaaatttgaagatattgctcaggggtatcttgaggcgatggagggtcatgacttcgtctctgagcagcagctccatgctttgcgtaccgatatgcgcaatggcgggttagacgccttgtatctgctgctgtctgatggtctggtgatgcaggacttcatggcctaccgctctattttccatgaaggatcgatgaccgtaaatgataacgacttcctgaaagccgttggtcaggatctgagctacgcaacctcaaacggtgaatattttatcgatgatgagaacagagtcatcagcgaactggttgaacataaccgtatttatgccgatggagcgtttcatcatcaactggtgacacatctgattgataacgaggatgaacatctggctggtatgatcacttcgctattcagcaagtctgatgaacatatccttgctgttttttctgagctttatagcagatttggcaaacccgagaccttcgataagttaatcgttactgcactgcaaaaaaatggttatcttgacagaatggttgccgttctcgcaggccagccgggtgaaaaattcaccaatgatattgctataagtgtgatagcctgcgtatcgcctgaacatgcgctagataaatcgcaataccgccagcttattcattcgctgggctgccgtatcatctctcagctcaccgaggagaatcaggaagagttcatgcgtcacgtacaacaggcggatgcatgctatgacgagctgttcgaaccaatgacgctaacggagcggtattgcctgcaatttattgcacaaaacagtctgtatcagttaactcggcacaatgttggtattgccgtttcgtgtcttattgaaaacataacgcctgaagaggcggaaaggaaaccttggacgctcgcctatgagcataaactcaatgcggtttctgattacttcaatcaaaacatcgatacattcgtaagtgatgtgtttatctcctctgctgaggatgccgaatgtattcgctacgttctgacccgcacctccctaagagatggttccaaaggcgatatcgtcagaaaaatgaccttctcgtttgctgatctgtccgggatatcggctaaagaagaatttactgaagaccagctaacgatctcctatcacgacctgttttaccgttatgaccgcgtcgtgccgggatggggggcgctgatagactatatctgtgaagactgcaacatggcgatactgacggcgtatgtgacaaagcatgtagctgcattaggtcagtcccccttagaagtctatgatggcgaccgctatgacctgctgtacatgaaaattatctgtaatgatgacctagacgagtggacttatcagaacttggttgcaccgattgagattaacatgcgggaaattgatgagcacctcagcgcacgtaatttctgcaccttgatagctatgttgaaactgcctctcgacgcggatgtgtatgaaaaaattgcggctcaatacgcggacctggatgagaaaatcagtgatgccttcgtctattggttcagtcagtataaaagtgaatttttggcgcagcccgagttctatctaagaaaagaaaaagatgcgcgcttctttatagccatgctcacaaaagtcatgacttacgcactctttactgtgcaagagagagcggacctggtgtcgctatttattgattatttcattgcgtctgatatcgctgaccttaatttcccaaatgatgtcctgctgcaggtgtttaacagcactagtaatgaagaattcaagggcatgctgtttacgcgatttattgtggcaggtctcaataaacatcaactggccgggctttgtcatcagttaggtgaagatgaattgagaagtatattccttaatcgaacccgagcgacaattgctgttgcaaacagggggcgcgtgatatcaattcttgagcatctgcaagcagtacgcatcatcagagatttcaaggaacgtgatgatgggaaattctctgtcgttatcgaacctaacccagaggatgaagattag

SEQ ID NO: 184054 - DNA, 858 bp, Klebsiella oxytoca
atgagcgtgttgagttgggcaataggcctgtgcgggaagatggaagcgtggctggttaagcgccaggcaaaagatcagctacagcgcgcagagcaggggctgagtcttatggaagaagaattaggtgatcgctatgacaccttagcgccgaaaactatcaatgatgccagtatgcgagagtatttcattgccttgaaatacgccttgtctcagaaagacgtgagaaacattgccattacaggtagctacggagcagggaaaagtacggttatttcatcatttatgaaatatcactgcgatgataagtacatcaatgtatctcttgcgggattcgatatgacggaaaatgaaacaaccgtcagcccaactcaccaagaagttgaacttagtatactgcaacaaattctttataaagaaaatagagagaaacttcccgactcaaggatagacagaataatcgatagagggccccactatgtcagaggaacctatcgggccttacttaaagtcattgcgcccatcgcggttgccgcatttattatatatttcaaaacaattgcagagtttctaagccttccaccatcctggaccgaggtgtttaatgcacactatattattaaaggtgttatattaattttgctggcctttatggcgctatactttataactgccagtgcatcacgaatcggtatttttgataaaaaacttaagctgagcaagattgctcttttaagtggtgatgttgaggcaagcgaccaagagacgccatccttattgaataactgccttgacgagattgtgtattttttaccaagttggaatataaagtggttatctttgaagatcttgataggctag

SEQ ID NO: 184055 - DNA, 3843 bp, Klebsiella oxytoca
gtggcaatcttcgatatcgataaagatgaattactcggactctcagatactcttttggaagagttaattgcgcgccttgctgaagccgaagtggcggcctgcggtcatagcccggcgcaggtgcgctggtcgggatcgatcaacgcacctgatggtggaattgatgtccacgtgcaggtgccggttgaacagctcaactccggctatattgagcgaccggataccgtcttccaggccaaaaaacacagaatgcgcagggcagatattctgcgagagatggctccttctggcgtcctttctcccatgatatccggccaggccacaaaggggggaagctatatcattgtcagtctggatgaggactgttccccctctatgcttgccgaacgcgtcaaggcgatgcatgaggccgtcaggcatgatccctctcacccaactcttcatctggctttctatgatcgcgcaaagttggctcagtggatacgacagcatccgtcagtaatgctgtgggtaaacagaatactggggcggggatattccggctggcagccatatggagcgtggagttgccctccagagggggcggaagataccctgattaccgcgtccggtatcacgatctcactttcgtcagaaaaaggtcacccccttagtattaaggatgccatcgggccgatacgccagcttatccggaccactcggaaggccgtgcgtattactggtttatctggcgtcggtaaaacgaggattgttcaggccttgtttgatgaatccgtaggagccgatgccctggaccgcaccctagcggtctatgccgataccggtgacggtccgaacccttcggctgcagctatgctggaacgcctcattgctgaccagcgcagcgcaattatggttcttgataactgcccgtctaaactgcatgcttccctcgcggcgagagttacttcggtggggaacaggatcaagctaattaccgttgagtatgatattcgggaggacaaacctcagaccacggaggtgatccacatcgaggcggtaggaccggaagtagcggaaaaacttctgctacggcgtttccccggtatcggacgattgaacgcccgtcgaatcgctcaattcgctgacgggaatgccagagtctcgctggctatcgccgagagagtggaggaaggggaatcgctggccgttctgtctgatgcacaactcttcaacagactttttgaacaacgtcacgaaccggacgagggattacgggagcaggccgagctactttcactggtctactcgttttcgattaacttttctgaaacaggcgacagtgaactggagagcctgggtacgctcgcgggctattcacataaccagctgtaccggacgctcaaaaagctgaccgatcgccacattcttcaggccaggtcgcactggcgagccatcttaccccatgctatcgcgaacaggctggccgcctccgcattggacagctttccggtggagtttcttcgttcatgctttgaagtgccgggacgggagcgcctgctaatgtcgtttgctcaccggctgggtcttttacacgatcatccggtggcaaaggagattgcggctgcatggcttcagccgggagcgttgctgagtaacttgctggcgttagaggacttaccagctcgtatgctggagtacattgcaccggtggtgcctgacgttctacttaaccggattgacgaggacctcagggctacagactttaaaggccagaaaagacattacgatccgcgctggagcactatcctcgaccttttgcaggcactggcctgggagtcttcatactttgaccggtgcgccagccttctgctgcaagtcgcggatcatgaaacggataagcctggtcagaagaatgcacgcgacaaactcaccttgttctgtcagccctacctgtcaggcacacatgcttctctggagcagcgaattgcgcttcttgaagaatgtatctcttcaggtatgtcacagcgtcgggcgctcggactgagaatgctttctgccggacttagcggttcgacgtggacaggttcgggtatctgtgagtttggtgcccggccgagggattatggggcagaaccagactatgaggcgttgatgacgtggcggcgtgcgttcattgcgattgctgttcgcatcgggaacgctggtgatatgcgtcttgccagcggtgcacgaactattctggcaaattcactcagcggcctgtggagtgacaagaagatgggctcagtcctggttgatgctgcacgtacactacatgcccatcgtccttggggggagggctggaaggcgattcggacaaaactgtactttatgcagaaggatcctcaggtatcacccgttctgcttgaaacttttgatgctctgcaaagggagctcagaccgaatgatttgctttccggtatccggctttatgtcctgagcaaaggtcaccacaactgggtgcttgatgacgaatttaacctaaatgatcaggaccgatacgctgaagctgaagagcgactgatggccagagcagagcaactggggcgtgagtttgccgcttcaacactttgcctttctgatctgaggcccaatttgttctcttctgagtggatgccttaccggagcgcattcgggcaggggcttgctcagggaactgcgagtcctcgtgaaatctggcaattgcttataaaagaacttgaacaggactctactgaaaataaagatttttcggtctttcttggctttatcgacggagtggatcgtattaatgaagctatggcccatgaatttctggatcagtgcgctgtgcatccttccctatgtcgagttctagttaaattacatcctgagcgagattttacagaaagggatttgaatcgatgcatgtcgcttctggataaaccggatatccatccgtttatgtttgacacctttttgtgggataaaaaatgccggcatcttccagtctcccgggtgctcgaactggctgaacgactgttagtcatggaaagcggcgaggaaccgattttgaatggactcggcatgaggctacacggcaaaaaagcgacagaggacatgcctgggccggaacttcttcaaatcggtttcagggcagccattcaggttttacagaaagatactgacgctcggggtagtcttgtagatgtctttatggaatcggtcgtggcggaggcattgcagttagacgaacatgacgtgctcaagcatcagtggctggatgctgtcttctcagcgattgataaacactacggctatatgaatgagtatcgtaaaaccatagagacaacagtggcacttatacctgaagcgtttctctcccgcctgtttgcagattctgaagaccaaaggtgtatgcggttgttctttatgcgtggaagtattggggatactccgctgctttcaggcgttgacatcgaaaccttgattgactggtgctccagcagtgacgatccgaggatatgggcatttgtgccgcaggggttagaactctgggtaagaattccagacacaagcgggacggtcttacatgaaaatgctgtcaaattcctagaggcggcacctgaaccatccttggtccttgattcttttgccgaattaacgagtcccacaagctggagtggcagccttgcaaacatatggcagtcgcgggctgacgctttcagtaaactcattgaacacgagcgggacgacatttcaaacgttgcaaaaaaaatccacgagagattgatgcttatgattgagcgtcaaaggaatcgggaacaacaggaagatcgtaaaggtgaacagtggtttgagtaa

SEQ ID NO: 184056 - DNA, 1407 bp, Klebsiella oxytoca
atgacattgctcccagatgcactggatgattttgtcactgaagataacccagtcagagtagttgatatatttgtagatgggttacagcttgattctcttggtttcagaagagttaacgcaaagcgaaccggacggcccggatatcaccctgccaccctactgaagctgtacatttacggatatctcaaccgaattcagtcctcccgaagactggaaaaagaggcccatcggaacgttgaactgatgtggttacttgaacgattaacgcctgactttaaaaccattgcagactttaggaaagataacggtgaaggtatcaggaatgcttgtcgggcctttattggcctgtgccggcaaatgcaaatgttcactgatgttgttgttgctattgacggcagcaaattcaaagcagtaaacagcaaaccgaacaactttacatcccagaaagccaaagaccatattgagcgcgttgagcaaagtattacttattatttaaacaagctggatgaagccgacaagaataccgggcccaatgcaagcacaaagttaacagccactaaactggcctggctacaaaagcgtttacgtgaacttcaggcaatccaacacgcagtcgcacaacagccagataaacaactctctttaaccgaccctgactctcggttgatgaaaacaaataatatgaaccggcaagtttgctacaacgttcagacagccgtggatacgaagaaccatttgattgttgcgcatgaagtcaccaatacaacagatcgggggcaacttggttcagtggcaacactggctcagaaagctgttggccggaaggacataacagtacttgccgataaagggtattacagtcgcagcgatattaaaacagttctggatagcggagccgtggctttggtgccaaagggagatacctctggtgctgaacgtaaagggctctataaccgctcaatgttcagatataacagggaaaaagatgtttatgtatgtccaatgggcaacgagcttcagaatcgatttacctcaatagaggacggtctggagcaacaattatactttaacaatattgcctgtcgcgattgcagccagcgctccaggtgtaccacatcaaaacgcgatccaaggcgtatacggcgctgggttcatgaagctgaaatggaagaaatgcatgccagacttgaggcatttcctcaagcagtagtcatgcgaaagcaaacggtagaacatccgtttgggacaataaaaatgtggatgggtgcaacgcacttcttgatgcggaaatttaaaaacgtcagtacagaaattagtctgcatatattggcttataacctgaaaaggatgctatcaatatggggtactgaaggattgataattcagctgcaggaacaatacggctaa

SEQ ID NO: 184057 - DNA, 1152 bp, Klebsiella oxytoca
atgacctggagaatgatacttaatgaaactgcctggtttggcgccggggcgattaaccatatcgtcgatgaagtcaaacgcagaggatacaaaaaggggctggtggtgacggatcgggtactggtggagtgcggtgcagtggataaagtcacctccctgctggcgcacgccgggctggagtttgacgtttttgccgacgttctgcctaacccgactattgccatggtgcagcagggggttggggtatttaaacgcacctcggctgactatctggttgctattggcggtggatcaccgcaggatacctgtaaagccatcgggattattatcaataacccagaatttgccgatgtccgcagcctggaagggtttgcttccacccgaaaacccagcgtgccgattattgccgtgccgaccacggcgggtaccgctgctgaagtgaccatcaactacgtcatcaccgatgaagagaagcgacggaaattcgtttgtatcgacccgcatgatattccgctagtttcgatcatcgattccgacatgatggccaccatgccgccagccttaaaagccgccaccgggattgacgcgttgacccatgcgattgagggattcacgacccgaggggcatgggagatgacggatatgctgcatctgaaagcgatctcgttgatttcccgcagcctggtcgattccgtggccggtaaatctgaaggaggcgaggggatggcgctggcgcagtatattgccgggatgggcttttctaacgtggggctaggcctggttcatgggatggcgcatccattgggagcattctataacatgccccacggtgtcgccaacgccattcttctgccgcatatcatggaatggaatgccggctataccggggagaaatatcgcgacatagcccatgcgatgggggtagagaatgcgcatagcgtgaaccttactgatgcccgcagacttgctgttgatgccgtgcgctcactgtgtcgtgaggtaggcattcctcaggggcttaccctcgcaggcgcaagccatgaggatattcctcagctggcgcaggcggctctggacgatgtttgtacaggcggcaatccacgaacggcctctttagaagaaataaaaactctctatgaaagggcgatgtga

SEQ ID NO: 184058 - DNA, 453 bp, Klebsiella oxytoca
atgtttatcgataaatatttcgaagatttctctctgtctgaataccggacaactacgggacgtactattactgaaagcgatattgttattcatgccggacagaccggggatttttatcctcatcatatggacgccgagtggtgtaaaactcagccttttggccagcgtattgctcatggcactttaacgtttgccgttgccgtaggaatgacagctggcgttattaattctaaagccatgacctatggctatgaaaaattacgtttcccgcacccggtttttattggcgataccattcgggtcaatatttctattagcgacaaacgcgaccacccacgtaacgtaaaatatggctttgtgacggaaaagctcgaggttgttaatcaacgtaatgagtgcgtcatggcgacgcagcacgtgctactggtggaaaaacgggattttgtggattaa

SEQ ID NO: 184059 - DNA, 333 bp, Klebsiella oxytoca
atgaaaactatccagcggttcggtagtgtcattcaggtcaaacctgataaatatgcttattatgcgcaactgcatgctaatccgtggccagaagtgaacgctatgattaaagcctgcaatatctctaactactcaatttactttaaagatggctggctatttagctattacgaatatcacggtgatgattatcaaaaggatatggcgaagatggccgcagaccccgttactcagcgctggtgggatgagtgcataccttgcctgatgcctcttgaaagcaggaaagagggggagctgtgggcatcaatggaagaggtttatcacctggaataa

SEQ ID NO: 184060 - DNA, 903 bp, Klebsiella oxytoca
atgagtacaacatttagcggcattatccccccggttccgacattgtttgatgagcacgagcagttagatcggctggcgatgtcgcggttgattgatcatctgattgccagcgacgtagatggccttttctttctcggtagcgctggcgaattcgcgcatatgtcggacagcttgcgccaggaagtgatgcagttctgtattgagtatgtcgcaggccgtaagccagtgctggttggtatctcttgcccgggcacacaggcgacgattgagtttggtcgtaaagcgctggaggcgggaacggatggcgtggtggttatcaatccatggtacaatccgctggccgaagagtacttgttcgagcatttccgctatattgccgaacaactgccgttgcctatcatactgtataacttcccggcgctgaccggccagtcgatccctgtttcctgcatccagcgtttggcgctggaatgcccgaatatcgttggcctgaaggatacggttgacacgttaaatcatattcgcgaagtgattcatgcggtgaaaccgttgcgccccgattttgccgtgttctccggctacgatgaatatctgttcggtacattaattttaggtggtgacggcgcgatccccgccagtgctaactttgctccggaactaacctgcggcatttatcagcactggcgtaacggtgagctgggtgaagcggtcgcgttacagcagcggctctcctggatcccgccgctctacggcctggatgtgcctttttataatgtcatcaaatatgccttacagcttatcgggctcgatgtgccggttaattcgttgcgtccaaccggaccactaaccgaagagcggagaattaaagttcgcgaggtgctgaagcaaagcgccattatctaa

SEQ ID NO: 184061 - DNA, 870 bp, Klebsiella oxytoca
atgttgcacattaccgatacccatctccacctttgggatctgtcacgctttcgtctgccgtggctcagcgcggttccggcgctgaaccatgacgttagctggcaggattatcgcgcgctggtcgggcaggatacgtggtgcatcgatcgtgcgttgtatgtcgaagttgacgttgcgcccgagcagcgtgggtcggaaagcctgtatttacgcgagctatgcgcagatccgacgaattttgttgagggtggcattgtctcgctcgacctgcagcagcccgaggcggtagcgcgctggctggataccaatgcatatcacacggcggtgaagggcgtgcgccacgtactgcacgttgccagccaaccgcccggagtctgcctgacctctgactttatcaggaatgttaatgcgctgggcaacgcgggactctgttttgaagtatgcctgcgtaatgaagatctggcggatgcggtggcgctggctgaacggacgtcaacgactctggttttaaatcatatgggcaatgttgatagcgttcgcctggcggaagatgcctgctatgcggcgaactggcggcgaaatttgcaggcgctggcgcagcagcggcacgtctggtgcaaagtttctggggtcaatattcctgtgggtagcgattgcgatggcgttcgcccggttgtggagcagtgtcttgagttgttctccgccgacagggtcgttttcgccagtaattttccggtctgttcactgaataccgggctcgtcccgtgggtcaacacgcttatacgcattactgatgcgcagggaagcgcctggcaagcgcgcttttttagccacaatgcgcaacaactctatcggttaagggaagcatga

SEQ ID NO: 184062 - DNA, 1056 bp, Klebsiella oxytoca
atgacaacgcaactgaacatgccgcaatacagtaaaccggtggtcattattggcgcgggtggaatcgtcaccgactcgcacttgcctgcttatcgtaaggccgggtttcaggttctcggtctgtatgaccgtgattatcaaaaagcgcaaagcgtagccagccagtgggatattcctcatgcctgccagacgcttgatgaactgatcgcactggcgcaatctgagggttgcgtatttgatattgctgtaccggcttctgagattttgcctatcctgcaaaagttaccttccgatgtcggtgcgctgattcaaaagccgatgggtgaatctatcgaacaggcgaaagcaattcttgattgttgtcatgagaaaaatattaccgctggcattaatttccagctgcgtcgtgccccctttatgatcgcagcaaaaaaaatgattgatgaaggcctgctgggggatattcatgatgtcgaaatgcgcgttatttgccagacaccatggaatctctggaagtttttattcgaaaaggcgcgtatggaggtcaattatcacagcattcattacattgatacgattcgtttcttccttggcgatccgcagtccgtttattgcaaaaccatgaagcatcctaaaatgattgagctggcgcaaactcgttcatcgatcatcatggactacggtgatgtcattcgtgccaatattcatacgaatcacggccatgattatgcaccagataaacaggaatgtttctttaaaatcgaagggaccaggggcgcgattaaaattcagatcggggttattttgaattatccacagggcgcagacgataaattcgaatttatccttgatgatggtaaaggatggcgaaccttacctgttgaaggtacctggttcccggacgcctttattggcccgatggctggcctgctgtgcaagcttgaagacccgaattatgtctggcttaacgacatcaacgatgcgtggaaaaccatgtgcgtcgttgaagcctgctaccagtcaactgccagcggtgcgaccgcggtgaaatactga

SEQ ID NO: 184063 - DNA, 1011 bp, Klebsiella oxytoca
atgttggcgggattttttgtcttgatgatcgcttgtatgttccagggaagctttggtcttggtatgaaaaactatagaccattttcctgggaagccttttgggtgatattttccatcattggtatattgataattcccattgtctggacgtggattgaagttccgggatttttaaagtatatactgcttaccccaggctggattttagttatcgctgctgcctgcggttttctttggggaataagcgctatctggtatggcaaaggtattgataatataggtatgtctctgactgttgggatcaataccggcgtgggatgttctctcggttcattaattccactatttattcttaataaaattccgcccgctaattcattaagctggctgctggctggaatggcggtgatgcttattggcgtaggggtgattactaaagccggtattcttaaagataaagaatcaaaacaggatgcgtcgcgggtaaaaaacgacaagttcgtcagcggcttactcatggcgctggcttccggatttggcaccgcagcaatgaacgttggctatacctacgccagccgggccagcgctctggccgtcgaggatggtattaatccggtcagcgccagcctgatcgcctatgtcatcgtttttgcatctggcggcttcatttctaatatcggttatgcgctgtgggtgctgagaaaaaacaacaccttcagtgattttgcccgaccaggttcctcctttgcatggtttaaggcgttgttaaccggtgggatttggttcgccgcgctaggcttatatgccaagtcaaccgcgctgctgggcgacctgggtccggtcatcggctggatagcgttcctgtcgggagcgctgatcatttccaacgcctggggtctcaaaacgggggaatggcaaggctatgaaaaaccgaaaaaagttatgctgctgggtaatgtgattttggttctctccgtcgttattgtcggatatgccaacggactagcttaa

SEQ ID NO: 184064 - DNA, 1143 bp, Klebsiella oxytoca
atggtgacgttgaggggcattacctggggtcatagccgtggatttacatccgtagtggctaccgcacagcggtttagcgagctgaatcccgatgtcgaaattgtgtgggaaaagcgttcattgcaggccttcgccgatggagatctggatgaactggcgcgactttacgacctgctggttattgaccatccgtgggcggggttcgtcgcggagaaagcgattcttttgcctcttcaggactatttaccaaaagcttaccttgacgatcaggcagcaaattcagtgggaggctctcatgaaagctatctttttaatggctttcagagcgctctggctattgatgcggcaacgcccgtcgccgtctatcgcccggatcacctgcaacagggtcaattcgcactaccggaaacctggcaagacctgctcgctctcgcgcggagcggaaaagtcatctatgccgggatcccgatcaacttgttgatggacttcctgatgctctgcgccacccgaggtggcacctggtttgatgaacagaatgtcgccagccgcgacaccgggatcgaagcgcttgaagcgctgcgcgaactggccagccactgttcgaaagagattttcgactacgatcccatcgccgttcacgaactgctttcgacccgcaatgactggagctactgccccttcgcctatggttattcaaactattcccgcgccggatatgcccgccacctgctgaaagcaacagacgttgtctcctggcacggtgaaccgctgaaaaccgttctcggtggaaccggcctggcgatttccgcgaaatgccagcataaagaggcggctctcgcctatgccagctataccgcttcagcggaggtacagaaaacactgttctttgataacggcggccaaccgggacatcgcggggcctggcttgataaagaagtgaaccgccgcagcctggatttcttcgccgacacccttcccactcttgaccgctcggctaagcgtccgcgctacagcggctttttaaactttcaggatcatgcaggcgacctggtacgggaatatgtcatgaacggtggtaacagcagcaccgttttcgccagcatgaacgcactttatcaaaaatcacgcggcttaatggagtaa

SEQ ID NO: 184065 - DNA, 1155 bp, Klebsiella oxytoca
atgcttcctttaacaggtttagtggtactggatttcagccagtttctggccgggccttccgctgcactgcgcctggcggatatgggagccagggtcatcaaagtggaacgtcccaggggtggggacgccagcagaaacctgagtcttaacaatcagtggatcaataacgacagcctgctttttcatactatcaatcgcggtaaagaaagtttcaccgctaatctgaaggagcctcgggagctggagcaggttaagaggctgatcgcccaggccgatattcttatcgaaaactttcgcccgggcgtcatggacaaaatcggtctcggctatgaaaaagcccgtcggctcaatccacaactggtctatgcctccgtcaccggatacggtaccgagggaccctgggtcaaaaaacccggtcaggatctgctggtacaagccatgtcggggctcacctggctaaacggcaacaaggatcagccgccgacgccttttgcgctgtcggttgctgattcgctcgccggggcacatctggtggaggggatcctcgcctgcctgattcgccgcggcaaaacccggctcggcgggcgggttgaagtcagcctgatggagtcactactcagcatgcagtttgaagttctgaccacctggcttaacgatggacgccagcccccctgccgtagcgcggacaataatgctcatgcttacctcgccgcgccctacggtatttatgcaactcaaaaaggctatatcgcactcgccatgggctcggtggttgagcttggcaaaattttagggtctccagtccttgccgaatactgcgaaccgaacgaatggttcagccgtcgggatgagattaagcaggtaattgccgggattttggccaaggaaggcgcctctttttggctggaaaagctcgaagaagcaggctactggtgcgccgaagtgagtgactggtcaacgctgagggcaagcgagggattccgtgcactggatatgactcaggatgtccagctcgatgacggcaaaacgatcgtaatgctgaaatcgccgctgcgcttcaatggcgagcgcacttcatcctcccgtcctgcgccagtattaggagcaaacacagcgcagattcaggccgactttcacttagcggaggttgattga

SEQ ID NO: 184066 - DNA, 1122 bp, Klebsiella oxytoca
atgaaaccactgacaggcattaatgtgctggatttcagccagtttctttccggcccctcagcggcgcttcgactcgccgacttaggggctgacgtaaccaaaattgagaatccggacggcggcgatatctgtcgtaggctctatatttctgagctgcagattgatggtgacagctcgctgttccacgcgattaatcgcaataagaaaagcatcaccgtgaatctcaaggatgaggggcaaaaaaacgccctgcgccctctgatcgaacaggcggacgtggttatctttaattaccgccccggcgtctcacagcgcctcggcctggattacgcagcgctgcgggaaatcaatcctggcctggtttacggtgaaatttccggctacggagatagcggtccctgggtttcgcgtccgggccaggatttgctggtacaggcgctttcagggctgtgctggctcaacggagatcaggatcagcccccgcttccattcggcctttccgtttgcgatattttcgccggagagtatctggttcagggactaatggccgggctggtacagcgggccagcagcggtagcggatgcctggtccaggtaagtttactggataccatcctcgacctgcagtttgaagttttaaccacctggctgaacgatggccagcagcaaccggtcagaagtgaggtcaataatgccaacgcctatatttccgcaccctatggtatctatcctaccgccgacggttttatcgcgctggcaatggcgcctgttcctcttctgggtaacctgctggcctgcgcggcgctgcttgagtttgacgaaccaaaagagtggttcaaccgtcgggacgagatcaaacgagttctgctggagcacttgcggcataagaaaagcgaggagtggttaagcattctggaagcggaggatatctggtgcgctcaggtgatggactggcagcagttaattgccagcgaaggctttcaggcgctgaagatgctgcaggaagttcggttaaagagcggaaagacactgcaaaccacacgctgtccgataaaaatcgacggagagatcttcacaagcgccatcggcgcaccgccgcttggtgcccataacttggggtaa

SEQ ID NO: 184067 - DNA, 738 bp, Klebsiella oxytoca
atggccagggttaaatctgctgagagagccttccgcctgctggaattgattgccagtcatcgggagggtttaagctttaccgagctgcaaaccagtctcgatattcccagaagctccgctcatagtctgattcaggagtttatcgataacgattatctcctttatatgccggatacgcgcttatatcatgcgggtctggcgctgataaaaatcgccgctaactgcattgaaagcaccgatctgatccgcgacttgcggttgctgaccgcatttttgagtaaacggctgggaaaaaccagtcacgcagcgattctggacggcaggcaggtggtttatctggcgaaagcgcttgcccaggacgacctctcgttaatgcggcatatcggcaatcatctcccggcgcactgtaccgccgtcggtaaagtgctgctgagccaatacggcgatgaggagattacgcagctttatggcgacgtgccgctggagaaaatgacggtcgattcaatagggacgttgccggtattgcttgccgaattaggtgaggtgcgccggcagggatacgcgattgagcaacgcgaggccaacgaacgcgcggcgtgtattgctctgcctgtttattctggcgcaggaaaaatggtcgcggcgtttagcgtgaccgctcttgcctacgagtgggagtcgctggtgcttgatgatgtgctgacggtgatgaaagagtgccggatactggcgcaatag

SEQ ID NO: 184068 - DNA, 717 bp, Klebsiella oxytoca
atggatgtgacagcactcaagaaaacgacccttaccgagcagattatggagcagattgcttcccaaattacctccggaaagctcaaacctggccaacgcctgccgaacgagcgagctatgggggagatgttcaatgtcacgcgcagccgggtgcgtgaagcgctgcgcgcattatcgctgattgggcttattgagataaaacccggcgatggcagctatgtctgcgaaaacaaaccgcagcttcctgaagagacaatgacttggatcttccataaagagattcacaaccttgatgaaatctatgctgcaaggaagctgatagaagaagaggtctatctcaccgcgattagcgtagtaagtcatgatgatcttattcgctttcaggccttaattgaccagatggtggagctgattgccggtgacggtaagccggaagcctaccatcagttgcttgatgaatacgatctcttgatgggccgtctgtgcggcaaccaaatctatgacaagttgatgcaaaccattgtgatgctgcgtaaggacttctcgcgtaaattgcttaacgccgacggggcgatggcgcacagctttaagctgaggttaagtattcatgaggcttttatccagcgggacaaagtccagttgcgtaaaaatctgaagtccttctatcagtcttcgcgcaaattctacgatcatattgcggataataaagacaaataa

SEQ ID NO: 184069 - DNA, 702 bp, Klebsiella oxytoca
atgatcgatttcaatgatccccgccaggtcgcgaaggccattcagttcaccaacgtcaacccggatctgacccgcgaagggcttatccagcatctgaacatctgcatggagtaccagttcgatgccgcgatgatcgccccgtgctgggtcgccgtcgccaaagacgtactgaaaggaaccggtatccgcgtcgccaccaccgtgaatttcccccaggccaacgatacgacggcaatgaaggtcgccgtcgtaaaagagctggcaaaagaaggcgcagatgaatttgatttcccgcccaacccgggctttttactcggagggatggacgatctctatttcaacgagctcaaagaggttacccatatcgcccatgacctgggaatgaaagtcaaagccatgctggagttcggctttatcaccgaagaggcgatgaagatcaaagccacccgctacgcctatgaagcaggtattgattgggtgaaacaatcgagcggctggggcaaaggcggatgcgcggcaacggtagaagacgttcaacttctcaaagccaatattcaggcaccttgccgggtaaaagtatccggtaaagtgaacacgcttgagaagatgaaagcgatgttcgtcgcaggcgccgagctggttggcaccagttccggtccggagctggtgaaaggtctggtcggcgacatcaacgcctattaa

SEQ ID NO: 184070 - DNA, 930 bp, Klebsiella oxytoca
atgagtgtatttattctcggcagttatgcaaaagccctggtgatgacggccgaacgcatcccgctgaccggcgaaacgctaatcggccatgactttcgccagacctggggcgggaaaggctccgacatggcggttcaggccgcccgcctcggcgcggacgtggcctacagcggcgtggtcggcaaagacacgttcggcaacgagtttgttgagctgatgctggaagaaggaataaatatcgacggtctgacgttaaccagcgaactgccgaccggcgccggcctgattattaaagataaagaagctcgcaacgttattgtagtcgacatgggggccaacaaactttttaccccgacgctggtggacaacgctcttgagcagattaagcgctgcggagtcgcgctggctcagctggagattccgctggaaaccgcgctctacggcctacggcgcgcaaaatcattagataaaattaccattctcaaccctgctccagccagagatctgcgcggccttgacctgagcgcgattgactacctgacgccgaatgaaaccgaagcccgcgtcgcgctgggtctggcgccggacgatccgcgcagcaatcaggaaatcgccgggatgctgctggagaccggctgtcgctacgtcgttatgacgcttggcgatgcgggctccgccgtctttggaaccgacaccctccagcagatcccgccgtgccgggtagacgtcgttgatagcaacggcgcgggcgacagttttaacgccgccctcgcggtagcgctggatgaaggtctgccgattagcgaagcggtactgttcgccaacgccacggcggcgctgtgttgttctgactgggaaaccgtaccttcttataaataccgcgcggatgtcgatgccttcctgcactctcacgtcgtgaccgaggaataa

SEQ ID NO: 184071 - DNA, 501 bp, Klebsiella oxytoca
atgagacccgatagaatcttacaccctgaactcgccgccgccctggcgaccctcggtcataccgatatcgtgctggtgaccgacgcgggatttcccattccggccgctgccaggcgtatcgatctcggcctgtggcacggcaccgtcgacgtccgtgacatcctgcgcgtgctgcgcgcggaaatctttgtcgaagaggttcacttcgccagcgaagtgcgcgactgccacccgcagctgtatcgcgaaatacaaactatctataccggctccggcgcggagtttcaccccgccagccacgaagtcctgtgccacgatatcgcgcatcgagcaaagctgatcgttcgctccggatcgtttgaaccctgggctaatttcgccctcgtctccagcaccgacccctttgcctggtttaccgacgcttcaggcgtgcagccgctgcccgcttacgtcgcgcgacgccagcgcattgtcgataatgttgtgcccacgctgagctaa

SEQ ID NO: 184072 - DNA, 1047 bp, Klebsiella oxytoca
atgaaagcagcggtagtcagtgacattcaccccggccaggttgagattcgtcagatggccatgcgacctttaacctcaggcgaggcgctggtagacgtggagtgctgcggggtctgccataccgatctccacgtcgtacagggcgattttggcccggtacccggtcgggttcccggtcatgaaggaattggcatcgtgcgcgccgtcgccgacgatgtcaccagcctgaaacctggcgaccgggtcagtatcgcgtggttctatgaaggctgcggcgtatgcgaatactgcgtcagcggtcgggaaaccttttgccgcagcgtcaaaaacgccggctacagcgtggacggtgcgatggctgaacagtgcattgtaaaagccgactacgcggtaaaagtccccgcaggtctcgatccgctggttgccagcagcattacctgcgcaggggtcaccacctataaagcgattcgcgtctctggcattcatcccgggcagtggctggccatctggggcgctggcggtttgggcaatatggcgatccagtttgcgcataacgtctttaacgcccgcgtcatcgccattgatttacaggatgacaagctggcgctagcccgcgagtgcggcgcggaaatcaccctcaatcccgggcgggacgacgtacctgcgcgcatccagcaaataaccgatggcggcgcccactgcgccgtagtggttgccgtggcgcgagccgcctttcaccaggcggtcaacagcgttcgcgccgcgggcaaagtggtgtgcgttgccgttccgccgggcgatcttgacctcaatatcgtcaaaaccgtccttgatggtattcagattgtcggcagtctggtgggcacgcgtcaggatctggcggaggcctttcagcacgcgctggccggacgggttcgtccggtagtacagccccgtcgtctggaggagatcaacgccatttttcacgaaatggacagcggttcgattcagggccgcatggtgattgacttacgcacggtgcggcaaacagaggagtcggacgcatga

SEQ ID NO: 184073 - DNA, 1152 bp, Klebsiella oxytoca
atgaaaattaccggctggcgcacgctgaaaacctggcaccgctgggggcgtccaattggcgatgtcaacggcaccctcacctccggcgttaccgaggtcccggtgctgatcctcgaaaccgatgagggcatttgcggcctcggcgtcggcggacacgcggatattgaacgcctttttccggctatcgaaggggaagatccgcgtgcggtcgcggcgctttacgaccggatgcaggcctgggtgtttaaaagcggtcatgccggcagcgtctttggggcgattggcgttgtcgatatggcgctgtgggatttgaaggccaaatgcggcggagaaccgctgtggcgactgctcggcgcgagaagtcctttcgtccccggatacgcgtcgggcctggactttccgctgtcgctggaagcgttaaccgcgctacatcagcgttttgccgaacggggatttagcgcctttaagcttaaaggcggtctggacgtcgaagaggatttacagcggctgcgggcggtacgcgaagtgtatctccctaattcgccctcgccggtgatgatgatcgatgttaacgagtcgatgagcgttaaacaggccgttcgctacgtcagtcgcctgcaggaagcgctggatctgagctggattgaagaacccgtgcgccgttgggacgctgccgggcacgccgccatccgccagcaggtgcgctgcgcggttgccaccggggaaaatcttaccggcctcgaacagtttctgccgctgctgaaagagaacgcggtagatgtgctgcaggcgggtatgtgctggggcatcacccactttctgcgcgtcgctaatctggcgcaggcgtttagtctgccggtcagcccggtcggctacaacgccaaccccgtggcccacgcggcggcggcggtcagcaatcatctgagctgcgaaatacaggatctcagtttccccacgggcttacgcgtggatcagcgcatcgaaaacggcggcatcgtgctgggcaacgaaccgggacttggcatcgccattgatgaaaaggcattgcaacaacagctcagcgacgacagctggacgatagcccagggtccgcacgtcaggcccgaacgcgcgggactgcgcctgagtctgcgaacgcctggtaagggttaa

SEQ ID NO: 184074 - DNA, 951 bp, Klebsiella oxytoca
atgaaaacagtaccttttggacgcacgggaattgagattccggtgctggcgatgggcgccgcttctctcggcagcatttatcatccggtatcgcagcagcaggctaatgaaaccgtggcgacggcgcttgcccatggtgtgaactattttgacgtcgcgccctattacggtctaaccaaagcggaaaccgcgctgggcgcggcgctcaagggcgtaacgcgcgatagctacgtcctggcgaccaaagtcgggcgctacggcgacagccggtgggatttctcccgcgaagcgacgctgcgcagcattgatgaaagtctgtcccgccttggctgcgactatatcgacgttatccagtgccacgacatcgaatatggcgatatggggcaactactggatgaagcgttgccgacgctacgtgagctacgcgccagcggcgtcgtacgccacgtcggtatcaccggctacgatctcgctttactggaacgcgtcgcctgcgagcaaaaagtcgataccgtgatggcctactgtacctggacgcttcaggatcggcgccttggcgcggtggcccggaggctaaaccaggcgggtattggcgtactcaacgcctcgccgctggcgatgggattactgacccgcggcggcgcgcccgactggcatccggcgcatcaggacgtgcagtctatctgccgtcaggtatccagcctttgcgatagccacggcgttaatatcgcccaggtcgcgctgcagttcgcactgaccaccgccgcggataacggcatcgcctctacggtgatcggcaccgccagcgccgacaatatgctggataacatccgctggtgtacgcagccgctcgatccgcagctgctcgcgcaaatcgatgcgctgatggccccggtgctcaacgttggctgggatctgctgccgggcaacggaggaaaagcgcaaaaatga

SEQ ID NO: 184075 - DNA, 870 bp, Klebsiella oxytoca
atgagcaccctcgatagccatctgcatctctgggacccctgcgcgctacgctacgactggctgcgcgaacttccggcgctgaaccgaccgtttttacccgctcagctggcggaggatgcgcagtcgccgaaggccgccatcgtggttcaggccgactgcgccgcgcagcaggctcttcaggaggtggcctggataaaccagctggctgaaaacagcccgatagagcttgccggaattgtcgcctgggcgccgctggataagggtagcgccgtggcgccctatctgcgccatttacgtgaactgccgcgcgtggtgggcatccgtcgttctttacagaatgaaccgctggatctgttttatcgcgccgattatcgcgagggtttactggcggcagcccgcgaaggctttgtgctcgatatctgcgtcagggcatctcagctcaccgcgctttacgatctgctggcctggctatatcaacgtgcgccggagacgcaagtcgtgctggagcatatgggtaaacctgctatcgctgacaaccggtggccggagtggcgcgaagcgtttaccgccctcgccggctttcctcatctggcctgcaaaatttccggtttgccgacggaagcggactggcaaagctggcagccggagcagctgcgcccgtggatccagctggcgataacggtatttggaccgcagcgctgcctgttcggcggcgactggccggtcgttgagctggccggcggctatgcgcgctggcaggcctgcgtacaggaagctattgcccacctgaccctggaagaaattaacgccgttatgggcgaaaacgcgcgtcgtatttatctgacgcaatcggcgggaggaaatatatag

SEQ ID NO: 184076 - DNA, 1305 bp, Klebsiella oxytoca
atgtccgataatattaattcattgccaggcggcacggttggcgataagtcgcaaagcgcaccgcctgcaaatagcattatggtcacggggcgtagaaaaaatatcctgctggcttcgctatttactaatttctttgttctgctggcgctgtactgcggcgttatttcggttctcctccccaatcacgtggcgcaaatcgatccggaaaataaagcgaacaacctggcgatagtcatgaccaccgcgctgctgtttacgatcttcgcccagccgattgccggggcgttatccgatcgctgccgttcaacatggggtcgccgatcgccgtttatcgtgggcggcgcgttaattggcgggctggctatctttggtatctccatgaccaccactatcgccgggattgcggtgttctggctaatggccgccgtctcgctaaactgcatgaacggcccgctggcgacggtcgtcgctgaccgcttcttgccggaaaatcgcggtatcgcttccggcttcgtcggcgcgggttccaccgcgggcggcacggtgggtattattctcgccggctatctggcctggaacctacagttgggctatctggttttcgcgctggctattgccgcctgctgcgtagcctttgtgctgattaaccgcgaaccatcgacccgaaccatggaggttgaacccttccgctggggggcgttcttcaaaaacttctgggtcagtccgcgccagtatcctgattttggctgggccttctttggtcgtttcgccatgtacctgggctaccagggggtggtcacctatcagctgtatatcctgcaggattatattggcttaagcgtagaagactctaactacgctatcggcaccatctcggtcattaccctggtgacgctgcttttctccggcctcgtttccgggatcatctccgacaaactgcagcggcgaaaaatatttgtttttctctcgaccctgctgatggctgccggtttgtgcgtacctctgataatgccgacgcttagcggaatgtatatttatgccgcgattatggggctgggctacggggcctacacgtccatcgacatggcgctgatgactcaggtattgcccggcggtggtaaacaggccggcaaagatatgggcattctgacgattgctaccgtattaccgcaatccttcagcccaatattatccgcatggctgctggcgacgttcagtaataattattcagcattatttatcgccgcgattgtttttgtctttgcttcatcgttttttgtattacccattaaatccgttaaataa

SEQ ID NO: 184077 - DNA, 927 bp, Klebsiella oxytoca
atggctcagcctctatttcacgggatcattcccccggttcctacgctatttaatgcgcagggagaattcgatgaatccgcccagtcgattttaattgaacatctgctggcctcaccggtagacgggctttttttcctcggcagcgcgggggagttcgcccatatgtccgatgcgcagcggcgtcaggtgacggaattttgtatcacccgggtgggcgggagaaaaccggtactgatcggtatcgcttgctgcggaactcagcagacgattgaggccggacagcatgcgcatcaggcgggcgcagatggcgtcgtagtggtgaacccctggtacaatccgcttagtgaaagcaaccttttacatcatttcacgacgattgccagtgccctgccgttgcccatgattctctataacttcccggcgcttaccggtcagtccattcctccgtcggttattaagcagctggcaatgcgctgccccaacatcgtgggcctgaaagataccgtcgatacgctctcgcatatcagagaaaccctgcacgcggtcaagccggtacgtccagattttgcggtgtttgccggttatgacgagtacctgctggggacgttgattctggggggcgacggctgcatccccgccagcgccaattttgccccgcagctcacctgcggaatactcgacgcctggcggcgccacgatcctggcgaagcggttgcgctccagcagtcgctttcctggatcccaccgctctacagcattgacgtgccgttttataatgccgtgaaatatgccctggttctgaccggcgtagatattccggtacattcactggcgccggcgtcaccattaacggaagaaatgcagaaagaaattaaacggatcctcctgcgagcccatcttattaataaggatgacgataatgaataa

SEQ ID NO: 184078 - DNA, 333 bp, Klebsiella oxytoca
atgaataaagttcgccgctttggctgtgtggttaaagttcgcccggagaaactggattattataaagcgctgcacgctaacccgtggccggaagtcaacgccatgattaaagcgtgtcatttacgcaacttctcaatttattataaaaatggtttcttgttcagctatctggaatatgacggtgacgattataaagctgaccaaaagaaaatggccgcgcatttaaaaacccagcagtggtggcaagagaccggtccgtgccagataccgctggacggcgaaccggaaggcacgctatgggcggaaatggaagaagtttaccaccttgattaa

SEQ ID NO: 184079 - DNA, 1521 bp, Klebsiella oxytoca
atgaaaatatcctcgatgaccctacgcggattctgcctgattaatatcatggcgatcccctacgcattttccgcgcagaatgtcagtattgagcaacgcctgaatcagctggagttacgactgcagcaggcggagcagcgcgccgcggcggctgagcataaaaatgctgaattagcgacccaactaaaacagaccaaagagggttcgcaacaggcgcagaaaaaagtcgcagacctcgaaactcggacaaaaaatattgaaaaaatcacgccggacgataatggctattttgaacttcacggctatgcgcgcgccgggatgatgaccaaccataacgcccggcatacccagggcggcccgtttatgacgccggcaggacaaaccggcggcgccattggccgtctggggaatgaaccggatacctatgttgaagtttatcttgaaaaaaaacagcgcctggataatggcgccaccacccgctttatgaccatgatcgctgaccagcaaaagagctacaacgactggaccgccgactccagcaccttgaacgtcagccaggcgttcgcggagatcgcctccctgccgagctttaccgggccgctgaaggacacaacgctgtgggccgggaaacgcgtcgatcgcgataacttcgaaattccgtggctcgactctaaattcgtcgcgctcaacggcaccggcggcggcatttatgatgtgcgctggtctgaaaatacgcgcagcaacttctcttttatcgggcgcagcttcggcgatgtcgacgtggtcaataatgatgtgcagaactacattctcaccgccaacaactatttcggcccggtacagctgtttgtcagcggtatgcaggccaaagacaacgaggagcgggaaaccctcagcggctataaagtctttaacgccgccaataaaggctataccgtcctgctgggctaccagggcgacagtttttatggtctaacgcagggagaaacgcgcagcgtgctgtcatggggtcaaggtctgggtgcggaggttaaaaatatcggcaccgatccggctctgcttaccgacgccagcaccctacgctttgccagctacggcatggttaacctggcccgcaactgggatttcgcgcccgccatcctcgcgcagtacagcagcgatcgctacgttaagggcgacgactatcgctgggttaccctcaacggccgcctgatgcagaacattacgcaaaacttcgccttaggctatgaggccacctggcaatatatggatctcgaccccaacggctaccagcagtatcagaaagtgcgcggcaatttctacaagctcacctttgccccaaccttccgcccggacgatatttcgcccttcttcacccgcccggaactgcgcgtttttgccacgtggatgaactgggataaggcgctggacaactacagtccaaacgacacgctgggtcagaaaggttttacctctggaggagagtggtcgtttggtattcagatggaaaccttcttctga

SEQ ID NO: 184080 - DNA, 876 bp, Klebsiella oxytoca
atgaattcactcgcgcagcgaacgctggtcattgaaaactggtatagggagtccgatgacttttcgacgctggttaattatcgggttctccgcgccggacatattcgcgccagtaccagtttccgtattcagcgtcagtccgtggtcggccatgagctaatattttgtcttaaagggcgcggagttattcgcctggaaaataacctacatcatgttcaggaaggcaatctggtctggctgccggtaagatggccgcatgagcactatccggatagcgccgagccatgggaaatattatggctgcgtattgatagcggaaaattaaataacatcatgcagattcttaacgtcctgcaggaacccgtgttttcttttcagcagccggaaaaagtgatcgaaatttattaccagctttttcatttaatgaaaagccataccctggtttcggatgcccattgcgacgcgctgtgcgcaaagcttatttttacgttactggaaaaccgcagcctggaaacggaaagatcgccggtgattacccatagcgggcttggacgactgatttatcagatccacagccactataatgatgagtgggacattgaaaaatttatgcagtattgccaggtcagtaagtcgcagctatttcgcctgtttcaggaaactttcaatcaaagtccgttgaaatggctgaaaaactatcgcctgtcccaggccaggaggctattggtggaaacggaagacactatcggcaaaatcgccgggctggtgggctataacgatccgctgcatttctcgcgagattttcatcgtgcggtcggggtctccccaagcgaatttcgccgtcaggagaaacagctgtcgagcgtttcgacgtag

SEQ ID NO: 184081 - DNA, 273 bp, Klebsiella oxytoca
atgaaatctaaaaaatctgtttttattgaagggcatatcatgtcgaacagctgtcacggacaggctggccaacctttctgtattcaccgggtcaggtttagtaatggtaaatatgcgattattcgggtggcatccgggatatgtttcaaaccaggcgaaattattcaacgaaacgattgtgagtggttttataaacttaccaaaattcggcttctttcttttgagtaccttgatgatgatgaatcaagaagacaattccttgagtatcaatga

SEQ ID NO: 184082 - DNA, 219 bp, Klebsiella oxytoca
atgaccttaagaattaaaggcctggtaaaatggttcaacaaagacaaaggatttggcttcatctctcctcttgatggcagaaaagatatctttgttcatttttctgcgctcaacggcgatggttttaataccttatttgaagggcaggaagttgaattcgccatacataatggtgaaaaaggtcctgctgctacaaacgtaatactttgcgatagatga

SEQ ID NO: 184083 - DNA, 474 bp, Klebsiella oxytoca
atgaaacgaagaacgcacatttactacacgccagaacagaaagcgattatctgggacagatataagcaaggtgattccctgcatgatatcgccagaatgttcgacagatttcattcttctattatgcccactatccacctgactggtggctaccgtcctcccgtgcgaaagcggcaccgattagcgctttcgcttgatgaaagagaggagatatccagaggactggtagcaaagctcagtatcagggacatcgctgccaaattatcaagagcaccctcaacgattagccgtgagatcaagaggcacggtggtgcaaaacaataccgtgcagcaaaagccgatgcagctgcgtggggaaatgcgttgaagccaaaaccttgcaagctaattgaaagcccacatagtgtaaaatcattgcagataagatgcatcaggactggttgtcggttggctgaaacgctgttatccggataa

SEQ ID NO: 184084 - DNA, 573 bp, Klebsiella oxytoca
atgaacaattgcgctgaaaatgaagcgttaaagacgaactctgatggtaacaatgtcatgcttattcgtagagtgttgcagcaggcgactgatcattacccacgactgtctgcgctggggtttactctacagtatgcgaattgccactcctgcgacaacgaacaacaaggtaatgcccagttgctacgttttcacgctgaagcctattgcagaattggcgattattcaaagatacgtattgaagcgggtaaaccgtctcagcctacgcttcttcgctggttgtgggaggctgaaagtatttcaacatgtcggatgatgatgctattcaatcaggcagtttgtagtcatccccgacatgactcttcagcaatggatggaattcaggaagtcatgtcgttgctggtggctgcatggcgtgaagtagaaccgggcggggaattaacggaaataaatgcacatcgggtagagagaacgatgccagcagctttcgataaacgttatgcagagttacgagatgcagcattgcaaatagcctcacctgttgcttttgcccggagctgttcgactatgtaa

SEQ ID NO: 184085 - DNA, 579 bp, Klebsiella oxytoca
atgctcaaaaattcagatggaaattttaatgaagactggttcctggcttcagttcttaatgcacatatcgatgaaatgataaacagatactcatgccttttggcattacgtatggattttttctacaaaaagaaaagtgccaggtattcaagcttacatcaccaaacacttgaacatgacttgcgtgaactaatggaaaaaatgacaaaagagaaaggtgtggtgggctatttctgggttgtcgaatggactgaacgacatggataccatgcgcatgtcgtattctggctggacagacaaaaaacacagcactcttatccctttgcccttacagcaaatacactttgggaggaaataacgcaccgggacggcgtatcgcaccgatgtgaatatcggccgcagtattctagaaatatcaatatacctgttcggtataacgatccggaaagcattaacaatatccgtcatgttctgagctatctggctaaggaagaacaaaaagaaggtttgtgtgcatacggctgtaatgacgttcctccacgctcagcggcaggacgtccacgtaagccaggcccctga

SEQ ID NO: 184086 - DNA, 240 bp, Klebsiella oxytoca
atgacaaacaaaactcaatcgatatcatccagcacccagacaaccacatctttactgagcgaccagctcgttgatatgacgttcatcaccgcctatacaaacatgacagacaaatggttttaccgattaatttcagagaatgcgttccctgcaccaattaaactgggtcgtagttcacgctggctaaaaagcgaagtggaaaaatggatgctggaaagaatacaagcatctcgaggttag

SEQ ID NO: 184087 - DNA, 1152 bp, Klebsiella oxytoca
atggctaaatgtgtacgaaaaaactgcaatcgtttagtgtccccattacctgaagcaaaacgtaaaaggctctgtaaaaaacattatttgcgcttctgcgaactgagtgagcgcaaggaaaaagaccttgtttatcggattaataaatatatccctcgtaaaataaaacgattaaagaaggggcgcatttactattgcgcattcaatagcaggaggggatatgtcagaaagatatcttcaattgaaaatgctggattaataagacaggccagagagaagcttgtattaatacgaaaaacaccagcctggagaaacacagaaagctatgtacgccgtataagaatcgggccggatcttcctgtttcattaaatgaagtaacggaactgtatagtatctactcctggattaatttttgtaaaaacagcaagctttatgcaataaattatcttggtggcggcgagggaaatttaaaattgcaactttataaacttccttccccaagtaagataggagattcctcacaccaacaaaacatcattatacctattactttaaaaaacaaagtaattaatcaactcgcaaaaaaccgcaatatcaggggtactactaacgtaaaaaaaacactcagcctgtacaaatctttaattacgttagaggatgaacggtctgtggcattaaaattactccaattaacaattgagacacctttacacccccaccaatatagtaataatctaccctatcttagccctggcgatacccctccactatttggcctcttattaaatgaactgaaaagattgaatgtcattggcgtaaatgattctatgttaaaactcgctaaaaaatataaaaatgaatcctttacgttagagttgatagctattcatattatttttaacatggcaagaaatggcacccccgaagtttattcatttttatcaaataagtttgataaaaatggctgtttgtacagatccgtaatgattaccttcatgatgcttgagttggatttggattcttattctgaattagtggggttttacaactctttctttagtacgaatgtaataaaaatcaaagggaatatattgctatggacgtcaggtaagaaagaaaaactcccttttgaataccgacctggaatttaa

SEQ ID NO: 184088 - DNA, 894 bp, Klebsiella oxytoca
atgcctcaaatccccgacccgcaggatacaagcaatgttctgcgcacctgtcttaatctcttacccccgcattctgctgaacgtattctttcccgcctccaggaggcgattcgctatgaacccatgataggcatcatgggcaaaagtggtgcgggcaagagttcattatgcaacgcgctttttcagcaacccgtttgcctgaccagtgatttgctcggttgcacccgggaaccccagcggatgatcctagatgtgggtaatcgttgtatgacgctggtggatttaccgggtgtgggtgagacaccggaatacgacgaggaatatctggcgctctataaggcgttgctggcagagctggatttgattatctgggtgctgcgtgccgatgaccgtgcccgggcaacagatatcagtgcgtacagggcactgatggaagcaggtgccgctccttcacgtttcctgtttgtactgactcaggccgaccgtattccgcccctcagggatggtgagccctggcaagcatcaccttcttctgagcaatgcctttcactagcagcggtcagtgctcaggttgccggacagttgccgtcctctttcccggtcatggctgtctctgcacataccggctataacctgcccgccatggtggagttgatggtgcatgccttacccgtacaggccagcagtgccgtgtattgccagctgaaaccagagaatcagaccccggacagcgacgccgctgtacggcagcagtttggtgaggcagcgggtaaggcttttgacacggtaattaatcctgaccacttgccctctgcctggactgccctgttaaagagtatcagacagaagttagtgcaacttgccacggcattatgggaccgcatatttggctga

SEQ ID NO: 184089 - DNA, 678 bp, Klebsiella oxytoca
atgaaaattcagaccgtgattgcatttgttttgtcagccatttcggtttctgctcaggcgggtaactgggctgtgaaaaacggctggtgccagacgctgaccgataatggtcaggcactggtgatgctgaaaaacaacaccattggcatctttggtcagttgcagggctgtcccaatggcccgcaggagctgatggggagtcgcatcagtgtaaacggcaatctggtacccacatctcagttgtgcaaccagcaaacaggatttaaggctgttgaggttgaaggcgggcaggcacctgcagccgccagaaaggcaattgcttcgattgcaggtcaggaaacatcgacccttcaggtctttggtgcgcaactgacattcacccgtggggacatgatgacggtctgcccgaaatacgtatccggccttgctgccagtgccgggagtcgagcgccggagattaacaaaggctcagtcatgaaagcggccaaagaagcgtatacgaaagagtatgaccgtgacacggctgaggccgctgattttggcagctacaaagtggagggaaatactgtggtttatgaggtctacaatgccgggtaccgtacctacgataaggtgacagtcaccattggtgctgatggtaaggccaccggtgccagggttgaatatatggggcaataa

SEQ ID NO: 184090 - DNA, 819 bp, Klebsiella oxytoca
atgcgattagcatcccgctttggtgcggtgaaccttgttcgccgtgaccgtcccttaacccgtgatgaacttgctcactatgttcccagcgtgttcagtgaggaaaagcatgaatcgcgcagcgagcgctatacctgcatcccgaccatcaccctgctggataacctgcagcgcgaaggttttcagccgttctttgcctgccagacccgtgtgcgtaaccccgacaagcgggcacacaccaaacatatgctgcgtctgcgccgcgaagggcagattaccggtaaacaggtgccagaaattatcctgcttaacagccatgacggttcgagttcataccaaatgctgccgggcctgttccggtcggtctgtcagaacggactgatttgcggcgagagctttggagaggtgcgagtgccccataagggaaacgtggtggaaaaggttatcgaaggggcttacgaggtgcttgaggtgtttgacagggtggaggaaaaacgcgacgccatgcagtcacttatgcttccgccaccagcacaacaggtactggcaaaagctgcactgacatatcgctttggcgaggagcgtcagcccgtgacagaatcacagctattggcccctcgtcgctggcaggatgagtccggagatctctggacaacttatcagcgtattcaggaaaacctgattaaaggtggtttgaacggtcgcaatgcaaaaggaggacgcacacatacccgtgcaattaaaggtattgattgtgatgtgaagctgaatcgcgcgctgtgggtgatggcagaaaatatgctgcaactcgcctcatga

SEQ ID NO: 184091 - DNA, 474 bp, Klebsiella oxytoca
atgtccgaactgattttaccttcggtcttcccgatgaatgagcaacgtaccatccgtcgtgccctgcgattactggagaaatatcagcggcagcccagtgaatcgttccttgccgctagtttcgcgaaaaaatggttacagctctatttggcaaagcaggagcgcgaagtctttgttgttatctatctcgataatcaacatcgtctgctggagcatgaaacgctcttcctcggcacgattaaccataccgaaattcatcctcgcgaaattgtgaaatctgcactgcgtcataatgcagctgcggtaatcatctctcataaccacccctctggcattaccgatgccagtaaagctgatagagccattacgttcaggattatagaggctctgggactcgtcgatgtccggctactggatcatttcatcattggtgatggtgaagcgttgtcgtttgctgagcatggatggctataa

SEQ ID NO: 184092 - DNA, 222 bp, Klebsiella oxytoca
atgaaaatcatcagtaagcgtcaggcgatggcaatttatcgtctgcatcctgaatcccgattgtttcaattctgtaccgggaaatattgctggtccgggagcgtctgccattactacggtcgtgaagttccggatatcaagggtgttctggctgtctttgccgagcgacgcaaggaccggaacggaccgtatgtctctctgcgcagcgtcactctaaattaa

SEQ ID NO: 184093 - DNA, 357 bp, Klebsiella oxytoca
atgtcgagtaagacactgacagtgaatgatgataccgctgagccctggtgggggctgaatcgtaatgtcattccttgttttggtgcgcgtctggtccaggaaggtaaccgcctacattacctatctgaccgcgccagcataataggcctattcaataaagcggatttgctccgtcttgaccaggcatttcccctgatggtgaagcaactggagctgatgctctccaccggtgagcttaatccgcgccacccgcattgtggcaccctttaccacaatgggctgacctgcgaggccgatacgctgggcagttgtggctacgtgtatctctccgtttatccaaccccgcggtcagtataa

SEQ ID NO: 184094 - DNA, 207 bp, Klebsiella oxytoca
atgcctatacctgtggcacgcctgaatagtttatggtgggaactgggaaacattgccgtcatagaagaaaaaggcatactgaccaccagagagccatttatccacttccccaccggaacaccagttttcgatatctgggcctggtttgaagctggtaatgaagatttcgtggttgcccgtgaactttacgggctaaatactcattag

SEQ ID NO: 184095 - DNA, 363 bp, Klebsiella oxytoca
atgcagtttttaactgaaccgaatactaagtcgggtggctcttgcatcgtcccgctgcactgcatctttaccagcatacagtgcagtactgctcacataacggatcaggacaacgaacggttttatcaactgtcgcatgatcagactgaatacagtgatgcggagtggattcactttaccggaacgggctacttgctccggctcagtgcctggcaatacccagtgctcagattgaaacgactaggcctgtcgaaagcgtgtcgtcgattgatcctcatgttatcccaccagtatgcgatcacctctatccatctcgatgctgcgggagatgtgctgcctggagtggagcatttcgattggtga

SEQ ID NO: 184096 - DNA, 798 bp, Klebsiella oxytoca
atggagaaggttttcttgattaataaagaggtggcatttttcactaaacaaaacttgttgattaatctgcaggactcacaaataaaacaaacgcttaatcaaccctgcgctcgctgtcttgagactttacttgaatctcagggacagcttgtcactcatgaaacactctatgcatcaggttggccacaagcaccgcataaaacagcaccaaacaccctctaccagaatatccttctggccagaaaagcgctcaaggctgttactgataattctgtagaatttatccagactgtgccacgtaaaggcttctgctttaacagctctatcaatgtgacttggtatagtgctgctgagtcagagaattctttaggggatgttgaacaaaatgagcaatctgatggcccacataataaattatatgtacttcagaattacatcaaatcacatattactatttttagcacacccattttggtagtgatatctgtattgtctataatatctttttttatagccgggtacagatattatcactcaatgccaactaatctcagtaatgaatatgttttctatgcggatgtcaatgattgccatctatatcttcataacaatgtagcaaagaatattgatggtttgaacaccctactaaaaaaatacccagtcattacgggaaactgtaaaaatagcccttatcgatacatcagtttttttttgaaaccgcagaggatatatttcttgtcttgtaataaatccagcaaccctgatatgatatgttcagccgcttttataagaacttaa

SEQ ID NO: 184097 - DNA, 285 bp, Klebsiella oxytoca
atgatcagtggagattatactcatgatgcatataaaaaaacacctgtaaaaatatttagtgtgtttgattacaaaatagatggcgaacttttttatattaaaataagggagcagcaatccatcttgccatcaactcctgatgatactaaccttaatctgcttcttccttttgttttaaatagccgtaatattgagtatgcttttcaattttataagcagcctgagtcagattatttgattaaacagaacggcagggtgctcttttattgtaaaaaaatgcgctaa

SEQ ID NO: 184098 - DNA, 552 bp, Klebsiella oxytoca
atgaatataataattatttctaacgatcgctacttctcctgtggctttatagatatcatgcaagatagcggctaccagtgtaaatattctgattttagcaacctcacctccagaggtttacgaaatctgtcggctaactatgacctggtagctcttgatattagctatgtgcaaaacattaacgaatttcttgccgctagctacggaataaaaaacatttttttgctcattgatatttccactaacttcattaaagagggggcacagtttatatcaaagcgggaaagtaaaaataacatccttagaaagacgcagcaatatctttattttaagagggaaaggataaaatacaatgaattcaagatgttaaaatatcacgctgaaggtttaaatatatccacaatagctttaaagcttaaaataaacgacaagtctgtttatcggctacgaaacagtctggtgctaaaacttggttttcgacgttaccatccactgacggccatttgctgtgaaaaattatcttcatttttatggtccgacactaaagcgtga

SEQ ID NO: 184099 - DNA, 1203 bp, Klebsiella oxytoca
atgaaacgatggataataagcctggcggcattgatttcagtatggtcgccatgggggcaggcagcaacaacgtgtgaaaaaaattactctggtcgaactgactatattaattatacagttcctattttgagcagtggaataattatctcagcaatgcgagacctacccataggtggaatattgtttcgacaggttatcaaggatcctgattcgacaagcataggtttctatgaatgttcaaataattccggcggacttgaatcggtagcaaggacgacaggattctacgctgatggcgcactcccaggtattgtcagtacttggtctgggcataatgtctatgacacaggagtccctggtattggcttggttctgctgcatggcggctatggaagtgcaatgcaggaatctagtcatggcttgagatttccacattttcaaactgaaaacctcttaacatttggttcgagcttgatgggaggggggaatggtatgggggtgtgggtactcgaaatcctgttagtaaaaactggagatattccggcgggaacctggactgttccgattaatttaccgcccatggtgattaatgcccagttaaccggtgatttatcccctgttagcgttaaaaaagattatggctcccggtttacaatatctggctcggtcaatgttcttgctggtacttgccagaccccagatgtgagtgtacctatggggcaacacgaggtttcgggcagtacggtaaatacaaattgggtagatttcaatattagtttgctgaattgtcctccgatgtatggccgctactcaaagaatcatccagaagcatcacaagcaacaaaccaatggatggcatctggaagtatcgaaggtctcccggatcagcccaataccgtggggatctcattaaatccggtgaacggttatgaaacccttgcgtctggtggccaatgcgcaaagctcactccaagtaccgacaccgcaagcggtgcctgccttgaaattcaaaatgtaacgggtaccaatgtgctaaccaattcattcacgaataccgtgaccgatagcggtttgacgttacttgccagcgccgcaagctaccagattccattaaaagcgcgctacggactcattgcaggtagttcgacaatgacggctggcaaggctgattcagctattgagttcaccattaattatcagtga

SEQ ID NO: 184100 - DNA, 2508 bp, Klebsiella oxytoca
atgtatttacccacccgatttattctccggcccttagctggggtagtcgcactattagctatgccactgtatgcccaggacattgtggagtttgacaccatatttatgagcagaggctcacaacaaacgctggatgtcagccgttatgagcaaaatcaggccgcgccgggcacttatcgcgccgaagtctatatcaatggtctcttacgcgggatgaaagatgtcacggttcgtatcaccccgccaaaacgcgatagcgaaatatgcttaaaggtgcaggtgctgcgtgagtttgatattgatattgaaaaactctccccagcggcccaggctctgctggctaaaagtaaagccaatgactgtctggcacttcaggaacttattccccaggcaaccgtacagctcgacagtggcgaacaacgacttgatctggaaatcccggcactctatttaacccgtaatccgcgcggttacgttaatccggccatgtgggaccatgggatcaccgccggcctgctcagctacagcgccaactattaccgcactgcaggccacggccagaccacggatagtgcctatgccggtctgaatggaggtttcaacattggaggttggttatttcgtcataacggtagcctgacctggcaggacgatttaggcgggcgctaccagacgctgaatacttacgtcgaacgcgatatcccacagatccaggggcgcctgacgctcggggaaaccaataccaccggggagatgtttgataccctggctttccgaggggtgcagattgccaaccaggaacagatgctgcctgactcccagcgtggctatgcgccactggtccgtgggacggcacgcactaatgcccgcgtgcaaatacgccagcaaggccggttactttatgaaactacggtgccgcctgggccgtttgaaatcaatgatctctaccccaccggttatggcggcgacctggaagtgcagatccaggaagaagacggcagcattcagacccagacggtgccgttcgcttctaccagtaatctactgcgtccgggaacccagcactatagcgcgaccctggggaaactgaacaaccaatggatcgatagcgacccctggctgggcgagttcacctaccgccgcggattcaacaacctgttgaccggttatgctgggctgcagggcaacgaaaactatcaggcaagccagattggtggagcagtaggcacccccatcgggtcattctcaatggatgtgacccacgcaaaaacgtcactggaaaaaccggtttccggccatggccggaccatgaatggccaaagctatcagctgaaatacagtaaattcatcccgcagtctggcagcaatatcagcgtcgcggcataccgtttttccactgacggttatctcgactatatgacggccatgaggctgcgtgaagcacagcgcgctgacgttcgtgacataacggtacgccgcgccaaaagccgcctggggataacggccagtcaaaacctggcggaaaactggggcacgttctgggtgagtgcctatcaacaaaattactggaacagcgatgaaagcgaccggcagtaccagttggggtattcgaaccgctttggcaatgttagctatagtctgagcgccagccgcaaccgtaacggccaaggcgattttgaaaacaactttgcgcttaacatgagcatccctctgggcagtcgcagcccgttcagttcgctgtcggtaaaccttaatcacgatcctggtggcgtggtgcgcgagcagatgaccctcagcggctcggcgctggaggacaaatccctgagctacagcttgagcggagcaaatgcgaataaaggtgggaagaccagcgttagcagcagtgcgacgctgcgcacaccttacaccacgctgcaggcctttggtggtagcggcaagaattatcacaactattcgttggggatgagcggtgccgcggtgttgcatagtggcggcgtgaccctcagtccatacagcggcgagactcaggcactggttgaggcccagggcgctacgggtgcagtagtgagcggttacccaggcatcaaggtggatagccggggctatgcactggtgccgtacctgaatgcttatcagcttaatgaaatcagcattgatccgaaggggatcccggaagatattgaactggatcacaccagccagaaggtatcgccataccggggggcggtggtgaagctgtcgtttggcacaacccagggacgcccggtgtttatcaaactgaacgggacaaaagaggtgccgtttggcgcgtacgtgctggaccaacaggataatatggtgggtgtggtcggacaagggaaactcatttttgctcgcctgggtgcggatgcggggcaactgaccattagctggggtgaaggggcagagacaagatgtcgtctgaattatcagctccctccagctggcaaaacggcagaaaacgtgacgattacggcagcgtgcaattag

SEQ ID NO: 184101 - DNA, 702 bp, Klebsiella oxytoca
atgaagataactctgtttcccctgtttgctttgctgctggcctgtacggttactccggcgcacagctctatcgttatcaccggcacccgggttatctaccctgcaacagataaagaagtctcggtcaaaatgaacaacaacggctccggcccggtgctggtgcagtcatggattgatgccggggatccgcaatccacgccggaaacggctaaagccccttttatcctcaccccacccattaatcgggttaatgcggggaaaggtcagacgctgagggtccgctattccggtgatcccttaccacaggataaagagtctgttttctatctgaacgtgttggaggtaccccctaaagttcagggcgccgaaagcaaaaacatgttacagatggcctttcgtacccggttgaaactctttttccgaccaagaagcctgaccaaagaagccgctgcagaagccccgatgaaagtgatgtggagcagaagcggcaatcagatcacggcccataacccaaccccttttcacatcaatatcgcttttctgtcgagtgatgcaaagggagaaaacggtgtagcggagggtggcatgatcgtccctaggggctcattgaatctcacgttggacaaatcggttgaacgctactttcccgtcatcatcaatgactacggcgccctgcgtccgattgacataacgacaaaataa

SEQ ID NO: 184102 - DNA, 561 bp, Klebsiella oxytoca
atgaaagtaaatacactgctgctgtctactgcgatcgcttctgcatgtttcatgtctacagccatggcggctgatggtgtgattaactttgaaggaaaactggtcgcaaatacctgtgacatcaccatcgatggtcaggcttcaccggcaactgtcactctgccgacagtttccgtaaataccttggcaaacgtaggtgataccacaggtagaactagctttaacatcgggctatccaactgccagggagttacctcgaccaccacagcggccgctttctatgaagcaggggcgacggtggatagcacaactttccagctcgtgaacaccgccgcggcagcagacgctgcaaccaacgttcagttgcagttgcttgatggttctgatgcatcctatagcaagatcaatatcggtaaccaggatcagaatacaaaaactgctcaggttgcgctgaacaatggtgcggcaactcttccgtacgccgtgcagtactacgccacggacgctgcaacgcccggtcaggttagtagccaggttaacttcagcattaattaccagtaa

SEQ ID NO: 184103 - DNA, 312 bp, Klebsiella oxytoca
atgtttcgcttgctggaatttttgctaaaaaaaggaggtacggagctcattcgtgatgagacaatcatgaagtcagtatgggatagctatggattgaaagcctctggtccacgtttgtggcaggtcatgaacgctcttaaaaataagcttattgcgctgggggtgagtcgtgattttattattcgcgtagagagccgaggatatagggtaaacaccaacttttttgaaccattgtatatcagggctgcttgggaatggttaggccaatttttaatagaacgcccccattctgcttcatttagtctttcctga

SEQ ID NO: 184104 - DNA, 249 bp, Klebsiella oxytoca
atgtcagaacttactctcaccgaaaccgaagtgttaaccggccacaccgacgtgatctgctcttccagcattgagcgcatcgtcatcggacgtaataccacgctggcaaagattgaagcactcattcagcaactcaacgatgtttcaacgctgacccgtagtatcggagggaaaatcgctcttgactgggctatgaagcaggacttccgctgcggcggctggttaatggaaaaagagaaactgcgatga

SEQ ID NO: 184105 - DNA, 402 bp, Klebsiella oxytoca
atgaaagccattacgcgcaatcttgattgcagcatatggcgagacgtgatgaagaagtccaggatgctctcactaatggatgcagaggcccgtaaccattgctacaacagcctggaaaaggacgatattccggaagtcagccaagagaatattctcaacacattcgagcaagtgcatcatagcaaaggtgacgtatttgaacgtggggcgttcaatgtgtataaaggtctgagctgggattacaagagtaacagcccgtgtaaatttaggaaaaagatcatcgtgacagggctggcgaaatatgagcgttggggatttgggcttaactgtggctggcagcgcgatcgattagctgaccttgagcggatgctgatgctccttgacggtaagcgtacagagtga

SEQ ID NO: 184106 - DNA, 708 bp, Klebsiella oxytoca
atggaagcccacctgaaggcgcttcagaaggaaagtgatgcgcttaccggtcgggccgacgatccggcagttcaacgaccactccgccagacccgtacacgtaaaccgttccctgaatcactaccccctgatgaaaggcgcatgcttcctgccgaatcctgttgcccggactgtggtggttctctgagttacctgggtgaagatgccgctgaacagctggagctgatgcgcagcgccttccgggttatccgcacggtacgcgaaaaacacgcctgtcgccgatgtgatcgtatagttcaggcgccggcgccatcacgccccatagaacgaggtatcgccggtccggggctgctgtcacgggtactcacgtcaaaatacgcagaacatgcgccactgtatcgtcagtcagagatctatgcccgccagggtgtggaactaagtcgttctgtgctgtcaggttgggtggatgcgtgttgtcgcctgctggcaccgctagaagaggcgcctcaggactatgtcctgacggatggcaaacttcatgtcgatgacacgcccgtccccgtactgctgccgggcaacaaaaagacgaagactggtcggttgtggccggatcaacgctgccggcagcagtgtggttcgcatacagccttgacaaaaaaggcatccatccgcagagccatcttgccagcttcagcggggttcaactag

SEQ ID NO: 184107 - DNA, 213 bp, Klebsiella oxytoca
atgaaatcattaaccgcagtgcgtaaaaaaagccctaattatcccgttgaattcaaaatcaaaatggttgatctctcacatcgacaagagatctccgtggcgcaaatgggctcaacgataatctgctgttcaaatggtgccagtactagcgtgaaggaaaactacgctctccttcaacagcagaaaacagcatgcctgaactgctcccgataa

SEQ ID NO: 184108 - DNA, 1353 bp, Klebsiella oxytoca
atgtttattaatctcaaacgcttgcctgacaggctatttctttacgctgtcgtatgcggtttttctattgctgcgattaatttcgttaccggctcattaattcatcgtatctctacaacttcatcaatgctgtttcctgtattgactatttcactgatgggtttccatattatgattgcctgttttatgggcatgaaatatctgtgcgataaaaagcagctgtacctggcgccaatagccttcgcttttgcctgttcagccctgttgatgctcgggaccataggcagctacccggactggctggtatgtgcccagggtcgcgtcatcaaccagaatgacgcgctaattttttattttttccgcaacgtcatgatggccgttttatttataacttcgatcgttttatatcggcttcgccaccgtaccactcattcaggaaaaattcacggtctggtactgctgggttgttttattttgatcgccgcaacgctcatattgtcgtggattcattccagcaactcaccattactgagcattgaattcattgataatctgacctatacctttacgccgctatggcataaccgggttggctgggtattaattggtacatggtcatttacgctgattttacttattagcctgacccggctacgcaatatattctggtacagcggcgcctttttttgtaccgcctatatatttacgctgctggttctgctctccacggtcaacggtaacgctcattcctggaaccaggcgcggctctttgaaacgctgagcactctgtttttgattttagttctgcttgtggatgtttttatcctctaccgggagtcaaacgaaaggtacgttcgctcgtaccagaattctattcgcgatcccctgacccggctgtataaccgcagctatttctacgatacgctgaatcaacgattaacaaaagtctctgcatcacagccgctatcggtcattgtctgcgatcttgaccgctttaagcgcatcaacgacacgtacggccacgtgcagggagataaggtcattcagtttgctgccagcgtgctgcagaataacgtgcgccaggaggacattgccgcgcgtatcggcggggaagagtttgccctgctgctggtcaatatcggcgccaacgaagcgctggccattgccgaacgcatccgcctgtccgtcagtgaacagcatgaagggttaccggaaagaatgaccatcagtatgggcgttttcaccactcaggatgcgcatgttgcggcggaggagtgcgtcaagcgcgctgataccgccatgtacgaagcgaagaacaccgggcgtaatcgcgtagtcgtctggcaggcgtaa

SEQ ID NO: 184109 - DNA, 930 bp, Klebsiella oxytoca
atgcgcagcatcgcctccgggtattcagctgctctgttctctgcaaggggtattctgcgcgctgctcccgggggcggcgctcaacgcgccttgcccgggctacaggttcatcgccgattgcagtgtggtagcccggacagatgcgcagcatcgcctccggggcattcagctgctctgttctctacatggggtattctgcgcgctgctcccgggggcggcgctcaacgcgccttgcccgggctacaggttcatcgccgattgcagtgtggtagcccggacagatgcgcagcatcgcctccggggcattcagctgctctgttctctacatggggtattctgcgcgctgctcccgggggcggcgctcaacgcgccttgcccgggctacaggttcatcgccgattgcagtgtggtagcccggacagatgcgcagcatcgcctccggggcattcagctgctctgttctctacatggggtattctgcgcgctgctcccgggggcggcgctcaacgcgccttgcccgggctacaggttcatcgccgattgcagtgtggtagcccggacagatgcgcagcatcgcctccggggcattcagctactctgttctctacaaggggtattctgcacgctgctcccgggggcggcgctcaacgcgccttgcccgggctacaggttcatcgccgtctgcagtgtggtagcccggacagatgcgcagcagcgcctccggggaattcagccactctgttctctacaaggggtattctgcgcgctgctcccgggggcggcgctcaacgcgctttgcccgggctacaggttcatcgccgtctgtgggagatacccggacaaggtgcgccagcaccgaaatccgggacaaacaacaggaaaattattcgatacctttgctgcgcagataatcttcgtagttaccggtga

SEQ ID NO: 184110 - DNA, 189 bp, Klebsiella oxytoca
atgaaagtgctcagtaaaagacaaatatcattaatcaatcatttaacgcaggaaagtggctggccacctcccgggcggcaaaaatactcaatatttcagtcagtacgctcagacgagatgttgaagctattaacctttatttcactgataaaggtcattctgtactcagtaaacccggtctgggcctga

SEQ ID NO: 184111 - DNA, 207 bp, Klebsiella oxytoca
atgcgtcagcaaatcggtcgcaatgcccaccagccgcttgtttttaagtatgtttacaacctgcgcatccccggagataagggggaggggaacaacgtcgttcgcctcaagcttcaggcccagaccgggtttactgagtacagaatgacctttatcagtgaaataaaggttaatagcttcaacatctcgtctgagcgtactgactga

SEQ ID NO: 184112 - DNA, 207 bp, Klebsiella oxytoca
atggatcgcgaaagtaaaaggtcaagaacagaaaaaacattaaagcaaaaagtggtatttgctcaaattaaacttaaccgccttacgtcaatggaaaaagcagagcaaatgagagttgaaacaggactcaaagttattcttggggaggaagtggctatggctatgaatagtggcgtcgaacaggtggatgaagaactttttatataa

SEQ ID NO: 184113 - DNA, 612 bp, Klebsiella oxytoca
atgaacacacagcttgttgatttcccaacgctatattttgggacacctgtcgcgattttatccaatcaaaacactgatgggacaacaaatctcactccgatatcatcatggtggatactcgaaaagagtatcgttatcggccttggaacatcaagtaagtgttatgaaaatctgttacataaccccgatatagtcctcaatatccctgacagcactttgtggacgaaaattgaagctttaggagcaacaacaggaaaagacgtcattccttcttttaaggagaaactgggattccgtatcgaaaaagataaattttcatgcagcggtctaaccgaaaccaaaagccttgctgttagtccgggaagaatacaggaatgtcctatacagattgaagcaaggattattaatagcatgtttattggtaatagcggaatggaactagtatcgctggaagcgagcatattgaatacttatatttccgataatattctatgtgaagtagataacaattacagattcaatgtggaaagatggcaaccgttatattatgtttttcgtcattatttctctttgggaaaatatttaggaaagaatttcagatgtgatgaataa

SEQ ID NO: 184114 - DNA, 819 bp, Klebsiella oxytoca
atgcaattaccaggacaggatgagttttctgatttttttgctgcctatgatgatgaacaagccactttaaggcgtaagttttttttggaaaaatataaagaaccgtggctgtctaagtctgcattaggagattatcaagcgctgttcatgagtatctacggaattaatattgactggaaagaggggacttttagtctgcttgaggcactttcagataatcagggagagaaggctatcaaagtcaaattcgattatgacagtgatattgaaacagcaacgataagtttggttgatgggcagtatgtgtttcatcactacccaatgggaagtgatggttttgatatagaactggtgcgcattgagcatatattggctaatagtggatatactttgcgggtatatcaggacagcacttttagtgatacattatcgttcttactcattccgtcagatgagtgggaacgtgttgaacagcattatagtccagagcatatctctgcatacttcgttccgtatggaaaacaacttgttattcctgaggttgctgttccagttgttaattatgtgccatccattaaacaagaggcatcaaatgtccctgctttgtttaatgttcaaggttgccgtatttgttttttaagtgtaatgctaattgcatttgcaatttatattttgtggaatatcctgacgaaaatagaacctttatcatcaggccaaccttctggctgtgaaaatgtacaagatatatactcaaaattacgtccagaagtagccgagccattaaaagaaaaaatgcgtaagagtttggattgtaaatga

SEQ ID NO: 184115 - DNA, 315 bp, Klebsiella oxytoca
atgaatttatggcaaaagcctggaatcaagaaagggagaaaaacgaaaccggtaggaataatgaataaggtaattaactcattatcccattattataaatcatggcttgctgtagcaaaacaaaacgggataaaacttattgcgtataactgccccacttgccttgaaaaattaaaaacaatacagccacagcctggcgaatattgggacactttatctacctgcccgttaggtcaggtgctgttatttaaaataagcaaatacgacaaagtggaaattgaactgattacaaaattggatcatagagaaaattaa

SEQ ID NO: 184116 - DNA, 294 bp, Klebsiella oxytoca
atggcaacgcttgaaaaattggtagagttaatccctgcacaaaagaaagtctggaagcgttttgaaaaggcctttaaagaattcaaagcggctggaggtgcattttacacagttcttgaaactgtccacggttataacggcaagcacgtcaatgatataggcaatgacggtgattacagcctgcattttagaaacatcggcccgtcaatcatggctccaggattatctggttttgcagatggtgagcattttttgacgttcaaagatggtgttgctgtggaggatgacaagtga

SEQ ID NO: 184117 - DNA, 345 bp, Klebsiella oxytoca
gtgaccattaaattaacagaagaagccaacccgcgcgaaatgctggatattcacagagttgaatttcgggttaactgctggaatgtcagggacggtgtttattgtacccgagcatatcgaatgacaattaaagacgggatgtttgaaaaagatgtcgtttatgacaaggggagatggaagaaatggcacgcaagtaaatcggtatcaggctatgacgctgaaggcggtcgcggtaactggcgattatacggtccaaagcaagaaaagctgatggcacctcttttcacgtccgcgcaacgctgctgcgtaatagttgatgaaaataagggaaggaaagatgactaa

SEQ ID NO: 184118 - DNA, 2850 bp, Klebsiella oxytoca
ttgctcagcaccgtcgatgtctcgctgctggcgggcaataatctgcgctttagcgtgggagccggcaccgtggaggatatgacggtatcggtgaacggcaactcgctgctgacggcgagcggattgctgaccactatcgtcaatctgctgggggcaggaaataccctgaaggccgatctgtcggtggtgaatacggtcaccggtgaagttgtggcgatagcggaaaacagcgtctctatctcggcgagcctgcttggcgggctctcctacaacggcacggtctccttcgccaatctgccggccggtgactacaccatggttatctctgcgccggaaagtaacggcaccctggtatcgttaatcaacgcgctggcagcggcccaggtggcaagcttcgtcaacgtggatgtgacggattcggttggctacagcgtcggcgccattgaaggtaacgtgctggatacaaccgccagcggcgatatgcaggatagcggtcagggcatctcggtcaccagtgcggtatcggattccgtcgacggatcgaccccggtcaatgtgaccagcgctggcgtcgatatcaccggagcttatggggtgctgacgattcactctgatggcagctatagctaccagttgaccaaaggcggggccgctatcggtaaatcggatgtctttagctataccattaccgatgaagcgggtaatacatcgacgacgaacctgacgattaatatcggcggcaatatcgaaccggcgcaggccaatccggatgctcaggaaacggatctgaccgcgacgttcgatactctcaacggagaaagcggtaccgtcgggcagctcgtcggcgtctcgttactcggtaacgtcaatgttgggttacttaacggtaatagctttgactttgatgtggccgccggcgcgaacgaaaaagtgctgctgacggtctcagggagcaccggactgagtctgggcgcggcactgacgacgctgctgagcctgttgggcggcgcatcgtccttcacggcggatctctctatcatcgataaggctaccggagaagtcgtgcaggtcctgacaaacgccgtcaacattaacgttaacggcatcgggctcagcctcggctatagcggaggcggctggtcctcgatgttaccttcaggatcgtatacggcggtggtctcatcaccgaataccggaggcctgctgggggccctgctggacctgaacctggggacctttgtcaacgtctcggtcaccgattctgagggctatcacaccgacagcctgacgggcaacgtgctgcaaagcgatggtgcaggcgacgtagcggatacaggggtcaatattaaggtgaccagcgtcaccgccacctcggttaacggcgctgaacctaaggaggtcagcggcagcggaacgacgatagagggcgcatggggatcgttgaccatccacagcgacggtagctatacctatcagccttatggcggagtgaatagcgtcggtcaatcggaagtctttacttacaccattactgacagcctcggccacacggcgagcaccacgctgacgatcgatatcgatagcccggcttcgctggcggtcaatgaccaggtcacgctgaacgtagcaacggcgctggcaacggtgaatgttccggcgattgacactgcggggctgaatacaagcggtaaatcaaccacgggaggcgtatcagcaaccaggaccatcaacttcagcgttggggccgatcgcgaaatggatacgctctcggtgaaagtgaactacaccgcgagtggctcggtggtcaataccgtcaaaatagacagcacggtcagcatttatcacgtgctcagcgatggcagtaaggttctggtatggcagggcacgccgacagagagcttgaccaccgttatcggcaccacaacaaacgctgcggatacgttaacgctgacgaatgtggcattgagcgaaggtaattacgagatggttctggtgtctaaggcaaccgccactcttgatactttcttaacgccggcaccgaattataccgtcggggcttcgataaccggtacgaccattgacaccgcaacgcattacacggtggcgggaaccaacgtcagtggaaatatacagaacggaaataactcaggcggtacggaagatttccatggcgtactgtactcgtcttacagcgtctccggacacacttccagcggcgctgcggaaacctggactttccacagcaatggcagtatcacgaccagcaacgggagtaacgtaagcgcaaccagcgtcacaatttacggtgactatggcaccctgacgatggcgaataatggttcttacacctacagtctgaaggcaggaatggatgtgtcgaccatcacgcataaggaagtctttgcctactcggtaaacgacagcaatggcgcttcttccgcggcgacgctgactatcgatctgcatccgcaggttaccggcagcgtgaacggcgacgacatccacagtaccgcttacgacgataccttcaccctgggcatcggggccgacacggtaatctacaacctgctggccgatgataataccggcggcaacggaagcgatacctggaaggacttctcggttgcgcaaggggatcatatcgacgtatcggcgctgctggtcggctgggatggtaacagcagtagcctgggcaattatgtcaccttgagctacgtgggcagtaatacggtggtatctatcgaccgcgacggtggcgcaggcggccatcaatcgacaaccttaatcacgctggaaggggtgcatatcaattcgctcaacgagctgcttgataccaataactccaattaa

SEQ ID NO: 184119 - DNA, 708 bp, Klebsiella oxytoca
atgctgacagcgattctgattcggacagcgactcggattcggacagcgattcggattctgacagcgactcggactccgacagcgactctgactccgacagcgattcggattcagacagcgattctgactccgacagcgactcggactctgacagcgattcggattcagacagcgattcggattcagacagcgactcggactctgacagcgactcggatgctgacagcgattctgattcggacagcgactcggattcggacagcgattcggattctgacagcgactcggactccgacagcgactcggactctgacagcgattcggattcagacagcgattctgactccgacagcgactcggactctgacagcgattcggattccgacagcgactcggattcagacagcgactcggactctgacagcgattccgattctgacagcgactctgacagcgactcggattctgacagtgattcggattccgacagtgactccgactccgacagcgactcggattctgacagtgattcggattccgacagtgactcggactctgacagcgattctgactctgacagcgattcggacagcgactcggattccgacagcgattccgactctgacagcgactcggactcggacagcgatattgaggccaaccccgatagcaacagcccggacgttgtcgcgctggaaggtaacctga

SEQ ID NO: 184120 - DNA, 2286 bp, Klebsiella oxytoca
atgccagagcagccgttaattatcggcgttcgacaccacagcccggcctgcgccaggctggtaaaagaacgcatcgaacaaacgcgtccgcgctacgttctgattgaaggcccggtggactttaatcagcgcctggatgagctgtttttaccccatcaattgcccatcgccatctacagctactgccagtctcaggagggctgcgcggcgggacgcggtgcctggacgccttttgccgaattctcccccgagtggcaggcgctgctgagcgcccgggcgacgggcgcgcatattcgctttatcgatttaccggtctgggcgcaaagagaggatgacagcgatgcctctgacgctcgccgcgtcgatgaccagcagcgcctgtttgccgccagcggaatggagaataccgacgcgctgtgggaccatctgttcgaagatgaaacccagcgcgccggtctggagcaggcgctgaaaacgtactttatccagctgcgccgcgatagcagcggcggagaaaacagccggcagcgggaagcctggatggcccgctgggtggcatgggccatgcagcaaaatgacggcccggtcgtggtggtctgcggcggctggcacgccccggcgctggctaccctgtggcggaattgccgggcgccagcgcaggaacctgaatccccgccgccaccgacgcccgacgccgtcaccggctgctacctcaccccctatagcgaaaaacggctggacgttctggcgggctatctttccgggatgccggctccggtctggcaaaattggtgctggcagttgggcctgcgtcaggccggggaacggctgctgaaaactatcctcgcccgcctgcgccagcatcgccttcccgcctcaacggccgatttcgctgccgcccacctgcgcgcaatggcgctggcgcagatacgcggccatacccagccgctgcgctgcgactggcttgacgcgctggcgggctcgttaatcaaagaagcgctcaatgccccgctaccgtggagctatcgcggcgtgattcatccgcaaaccgatccgattctgctgaccatcgtggatgcgctggcgggagccggtttcggcaagctcgctcagggaacgccgctgccgccgctgccgcaggacgtcgatcgcgagctggcgcgcgtcgggatcgccgtaccggcaaacctgaacatcaatcgctatacgcccgagggattagcaaaaagtcaggtcttacaccggttggccatcctcgacattcccggtttccagcagcaaacgggcagcgcggtgacgctttccggcgatggcgaagagcgctggcgactgtttccaaccctggagcagcacgcggtcctgatcgaggcctcccgctacggcgcttccctggcggaggccgcgcgccagcggctggaagcggctattctggcctccggggggatcaaaagcctggccgccagcctgaatcaggccgcgctggcgggtctctccaccttcagccagcagatgctggaacagctggcgcagctgattgccgaagagagccagtttgccgaaatggggccagcgctggaggtgctttacgccctctggcagcaagatgagagcagcggtatgcaaaacgccgcggtgctggaaatcacgctttgcgcggcgcttgaccggacgctgtggctttgcgaatccagcggcgttgccgaagagcagcagtttcacgcccatctgcatagctggcgcaccctgtgccacatcctgcgcgatctccacagcggcagcgttttaccgggagtttcgctcagcgccgccctggcgctgcttgaacggcgaattcacgccgcagatgccgcaccgctcgaccgcggcgcggcgctcggcgcgctgattcgtcttgagcatcccgcggcgaccgctgaagcagcgctgaccctgctgacgcagctctctccgcagcgtctgggagaggcggtccacggtatgctggcgctggcgcgccatcagctcgcctgtcagcccgcttttatcgcgggattcagcgcgctgctcgcccggctggcggacgatgagtttattctcgcgctgccggatctgcgggcggcgatggcgtggctgccgcctcgggaacgcggcgagctggcccgccaggtgcttgatcactatcacatgtccatgctaccgacctctgcgctacaggcgccggttgcctgctcgccggagcagttaatctatcatcagcagctggaacagcaggcgctggccgcgctacgccattggggagtacgctaa

SEQ ID NO: 184121 - DNA, 549 bp, Klebsiella oxytoca
atgaagaaaaaaagcggtttattgatactgatcttgctgctggttggctgttggcgtgacattacgcagggctttcgcgccctgactagccaaaaaacgccagtagaagtttatgctgtcgatatgcgctacgcctgcggtgagtgtgcaacttaccgcatcctgcaactggaagataattcgctcagtccgaagaagctcaaagataaagattcattaacgccggaagaacgcgacagcattattcctgttggtttttatcagccagccgaagataaacgtgaggaagcgcgacgcgcagacggcaaagccctacctggccgggaatttaatctcaaattccccaccaggttaatggaacatcgctttaccaggcaaaatcgctggcctgcctgttatatttactggcttaaaggctacccaacaatcaatatgcttcccgacgcggaagaaatggtgaccaaccatttcatcgttagtgagtataaaattattcgtgttaaacaatgcgatgcgcaaagggatacagaaagtgctcgtgcagcctga

SEQ ID NO: 184122 - DNA, 3591 bp, Klebsiella oxytoca
atgcacaacgcactaaccccaccctggctggcggatgacgcgcagctggagctgacctttaaaaaaggcaagacgccgttgagccaccgtcgctggccgggcgagccggtgccgctggttaaagtggaacgacttcaacggctggcgaacgatattgcctcccgcagccagcccctcgcctgggatgctgaacaatgtactgctgagtggcaacaggcgattgcgcaggcgatgcgctgcgtgggcgaggccagagcggcaatgcccgcccgcgcgctggcggtgctgactcgtctggctgaagaggatagcccgccgcttttggatgaaatcgtccagctgcacggcgtcgaatacgcgaccgaggtggtgattgcccggcagaatatcgcggtgacgcacagcgagatccgcacgcctgatatcgtgttttgtcatccagataaagggagcaatcacggttttcggtccagtacctacaacgctttcgatctgcggctacgtaaacatctttcactggtggaagaggacatctggcaacgctgcgctgacaaactgactcatgcgcttcctgataccccaccagagcggcagccgtttattgccctgctgctgcccgagcggccggaaattgcaaatagcctgatcgaaccggtcagatatgtcggaccgtcatcaaaagagtggttaaaagcagtcgcgactgaccagggcaaactgactattctggatgagtgtagctggattaatatctttaccgaccgcgaagccagcgatatgcattacgagaactgctacggctatgccgcctgcgctgcggttttacgagaacaaggtctggctgcagtgtcccggttggcggcctatgcacacagggacgactgcggtagcctgctggcgcaaatcaaccatccgcaggttattcgcctgctgctgctggtggcggataaaaacaagcccagccagctgcgcgtggcaaaatatgccagacaatttcccgcctctacgctggcggcgctggcagagctgctggcgctaccggagccgcccgcgcgtccgggctatcctgaaattgaagacaaaaagctcccgcagcagcagaagaaacgcgaagaaagctggcgaatgctgctccggacgctgctgaatacgcatccgccgctggccgaacaggttagtccctggctaagcgcgcaggcgcgggaacttctggcgacgttccaacaggcgctgcccgcaggcgtcacggtggccgtcgataaccccggcctgccggaaattctgctctcgccgccgtggcgcagtaaaaagaaaaaagccgccgcgccgcgttttgcgctatcgccgctgaagcttacgccacaggagtactggcagcctggagagcgggaggcgctggccgccggcaaaccggcctgcttctttaacgacctgccgctgtatgagcgcattagccgcaaaggtgaggtggtattagaggagctgggctttcaggatatggattatcttttttatcaatatactttgaatggacagcaagggcatttagggtcgccgtggcacagcgcatacaggactaaaacaggctgggataaagccgctatcagagcgctgcacagcggtgataacgaagcgcttctcaaagcctggcgagactatctcaaagaaagctatcaccccaacgagtgctggaatctttatctgcttatgcagctcccccgcaagcaggcggtaacgctctggcagcgcattaatgaagaaaatttcaaatttgtcggcgctgaatacctgttgagcatcctcgggactgacgccctgcccggcctgctgctggcgctccggcatcggccaaaagagatctttccgctgctgatgcatctcggcgcaacggagctggcgctgccggtggcccgcgtctggcggcgctttcaggcgcagagccatctcgcccgccagtggctactgcgatggccggaacacgccgccgccgcgttaattccgctggcgttcgataaagcgggcgatagccgcgaagcggccattaacgccctgcgtctgctgtatcaggaaggcaatcacgcgctgctgcaaacggtggcgcaacgctggcacgaaccgaggctatggccagcgctggagcagctgctgacgcaagatccgctggataattatccggcccgcacgccgaaagcgccggatttctggcagcccgcgctctggcgcaggccgcggcttctcagcaacgatcagccgctgaccgacgatgcgctggaaattctcggcgatatgctgcgcttcgcccagggcggccacttttactgcgggctggatttagtcaaagccgcctgtcagccccaatcgctggccgctttcgcctgggatctcttcaaagcctggcagaatgccggtgcgcccggcaaagagaactgggcttttcagacgctggggatctttggtgatgagagtacggtgcgtgatttaacccagcttattctcgcctggccgcaggaagggaaatctgcccgcgccgccagcggcctgcatcttctgacccgcatcggcagcgatatgtcgctgctgcagctggaccatatttcgcaacgggcaaaatcccgcccgctgcgcgacagcgcggaacgttgtctgcaagagattgccgaagcgcgcgatttgagcgaagagcagctgcaggatcggcttacgccgacgctggggctggataaccccggtgcgctgacctttgatttcggtccccgtagctttagcgtgcgctttgatgaaaatctgcagccggtgatttatgaccagcagggagcgcggcaaaagagcctcccgcgcctgcgcgccgaagatgaccagacaaaagccgcggaagcgctgctccggctgaaaggattgaaaaaagatgccgctcgcgtggcgaaacgcctgctaccgcatctggaaaatgccctgcggctggcgcggcgctggacgcgcgcggagtttcagtcgctgttcgtcgaccacccgctgacccacaatgtgacccgccgcctggtatggggagtatacgccgctaatgagcctcgtcgcctgctcgccgcttttcgcatcgcggccgagggagagttctgcgacggccaggatgagcccatcaccctgccggaagatgcgctattcggcatcgttcatccgctggaaatggacgacctgacgcgggcggcgtttgaacaactctttgccgattaccagctattgccgccgttccgtcagctgacccgccagactctcctgctgctgccggaagaaacttcagtcagcaagctaacgcgctggcagggaaggtcgacgacctgcgggcagctgctgggcatccgcggccgcggctggtggcagagtagtgaagaccgtttctgctacgatattgcgcaacatcggctgatactggaagtgacgccgggatttgcgcactacaatatcgatgcaaaagccccgcagcagtttgatgtcgtccggctctaccagggcgaacgacctgccgcgttctcggagctcgatccccaggatctcagcgaggcgctcagcatgctggaaatcatttttcattag

SEQ ID NO: 184123 - DNA, 3639 bp, Klebsiella oxytoca
gtgaaattatttatttatcaggatgataaatcacacaagttctggtctgtggaacagcaggaaaacgaactgcacctgcgctggggcaaggtcggcagcaacgggcaaagccagattaaggttttcgctgatggcgccgccgcagccaacgcgcagcaaaaactgattaatgagaaggtgaagaagggctatctgccgcaggaaacggaagcggcaatgactgaagcgaattcatcccctactctttcgtcactttggctcgctgacgatgcggttctcaccctgccggaggagatcgcctgggaggcgttaagccaccgcgatcgtcccggcgcgccggtaacaatgccggaaccgccgcggttagcggagaaactgcgatcccaggcgcgacagattgacgtaatagatagccaggattgtcgtgtagagtggaagatggatatcgctcaggcgctggcggcggatctgagcggcgatatcaccctgtcgccgcagaggatggccgttctgctcctgccaaccattcgtcccttaactataagagccccggctttcgccaaagagcacgccagcctgctggatgagatcgtgctaacctggggcctggagtatgcgacggaggtggtggttgcctgtctgcatctttatcatgaggcagagaaacggaacaattattctacgtttcacgttaagtacactcaccgaaacaagaacctctggtttagcgactgcgaatttgaacttcgcctgcgcaagcatctttcgcttgccgataaacgaacatggcaaaactgcgcggataaactgatcgcagcgattggcgatacgccagcggatcgccagccgcttatcgcgctgctattgccagagcggccggacattgccaacaacatggcgctgcgtctgggccggatgaagcatgtaccggaccgggagtggctgaaactgacggtgacggatgcgcaagcgctggcggcaatcgaaaaatgtcgatggctaaggatatttaaagaagaccgacgctgggccgccacgctgctgctcgatcggggagttgcgggactgcggcgcttcgccccttatgccgggcaggacggctgcgctgacgttctggctcaggtcaaccatccgctggccatcaagctactgctggcgaaggcgaaccgtgctcatcagcaaatgaggctaatgcaggcctgtaaacagtggcccgccgccgccatcgccgcgctggcggaaaacattgccgggcaagccaatccgctctggcgcacgcagctgctccacctgctgcatcaacatccgcagcttgctgaacccgtagcgacgcaaatcagcgaaccggcacgcgccgtactgggggagcttcgtcaagaaaatgcctgttttgctgataacgatgaactgccgccgattctggtttcaccgccgtgggcgagtaaacagaaaaaaaatcgccagccggttctggcgttgcctgcgctgcctctggcggcaaagatgactccgtttattcccgtgtcaaacaatatctgggtttacaaccatgatgaagtcatgcagaaaacggcgcaaatcagcgaggccactcctgaagaggcgttaaaacttctgggcggccggtgcagcgacgaaacccttcaggcctggcagcgaggcgattatgccgcgctgggcgccccgcggtttgactggaatctttcgctactcccggggctgaaacggcaaaccggcctggcattatggaattcgctgactcacgcgccgcatgtcggcacagcgtatccgatggcgcattttggcattgatggcataccgggattggttaacagcgtcgcccgccagccgaaagaggcgctgccggtgacgctgcattttgccgccaccgaactggcgccgcttatcgcccgcgcctactgcaagctcaaaaccgggcgcgatatcgcccgcagctggctgctaaaatacccggaacatgccattaccggcctgctgcccgacgcgctgggtaagcccggcaacgctcaggggtacgctcgtcaggcgctacagctgctggtggaaaatggacatggcgatcttattcaacaggtggcgctgcgctggcaacagccggaagtgataaccgcgcttgacgcactgctcaacggcgaccagttaaatacttatcccgccagacgcacgccgctgccgacgttttaccagcccgcattctggacgcgaccgcagctaaagctaagcggaaaaatgctatccgatgaagcgctgcatcacctcggaactatgctgcgcttcccctcggtccacgaaatttatcctggtctgaagcaggttaaagacgcctgtacgccgcaatcgctcgccgccttcgcctgggacctctacagcgcctggataaaagccgattgtccaaaacaggaagagtgggcgtttatcgccttaggtattttgggcaatgatgataccgcccggaatttaacgtcgctcattcgcaagtggccgggtaaatcactctactcccgcgcggctgctggagtcgatctgctggcccgtatcggcagcgatatcgccctgatgcagatccgcgccattgcacaaaagaccccctctccggcattgcaggatcatgcttacgccgtgctggacaaaatcgcagcccagcgccagctcacacctgctgaactcgaagacaggagtgcccctacgctagggctaaatgccaggggaacgttgctgctggattttggtccacgacagttcagcatcagtttggatgatacctggcagttcgtagtccgtaatatggccggtgagcgtgtaagcacgctcccggaggtggggaaaaaagacgatccggcgctggcggctgaagctatccaacagtttaaaatcctgaaagaagacgcacgaacggcaattccccagcagattcgccgtctggaaacggcgatgtgccagcgccgccgctggactcccgccaattttcggcgttatctggtcgaacacccgctactgcgtcacctgagccagcgtctgatatggggcgtctatagccaacaaaaccagctgctgcacgggtttcgaatagcggaagacggcagctacagcgatatcaatgaccagacctttgttctgccatcgggcgatttgctgataggtatcccgcatattatggagatatccgtagaggacgccgccgcttttgcgcaaatactggacgattacgcgctgctctcccctttccgccagcttagcagaactcgcagcgcgctgacgccggaagaacgcagcgctacgcggctatatcgctgggataagcaaacgtgcgccagtggacgcgtgatggggctgacggcgaaaggctggctgcgcggtgctccagggtatgagaacaaaattaactatctgctcaaaccactgggcgagtggacgctggtgctggatctcaacgaaggtttcaaagcgggaatgccgcccgacaccctaagcgcacagcagacgttcatcaccgcctggctatggcacggtcagggacgagattacggtaaggactggcgtcaagagaatcccttctccgtcgtcgatgaggtcaccgcctgcgaactgatcaacgatattaattcgctatttgaatag

SEQ ID NO: 184124 - DNA, 303 bp, Klebsiella oxytoca
atgcagcgccctctgacgccaacctttggtatgttcggtctgcagattttgtccggagaaaacgaagtatgtgttatgaatcacataccaacagacgttttcatcatacggctctacctgcagtactcaatgtatgcgaaattgttattgaaggccattccatcgcgcatcatacccgcagtttcctcttgtcagccctgcagaaccttctctgaggtggcgacaaactcgcaattatatacaggttatgaagataatcacctggatgaaggccactttaggaatttcggtcgcatgaaatga

SEQ ID NO: 184125 - DNA, 1779 bp, Klebsiella oxytoca
atgtttaaattcaaggtttcctatgttgcgctggcggcagcgctaagctcatccgttgtttatgccgacccgtcaagctatacgcataggtcaggggcaaatgttattgatattgaagcgcctaatgccgcaggcgtctcgcataacttatatcgcgaattcaacgtcggccctaacggcactattttaaacaacagcgccagcgacgtgaaccacagcactcacggtagtatcgctaagaataataatctgaccaacggcagcgcttcggtaattttgaatgaagtcacctccaatcaaatgagtaaccttcagggctttatcgaggtgaatggacaaaaagccgatgtcgtgatcgccaaccccaacggcatcacctgctccgggtgcagttttatcaacaccaacaaagcggtactcaccacgggccaggtcaacctgagcgataccggcgcgattgagagctatacggtcacgcaagggaagatcaccatcggtgataaaggtatggatgcctctactaactatgccgccctgcttgcggatgccattgcgattaacggcaccgtgaccgccgccaacgcaacattaggtgcgggtaacttcacgtttgacaacaataccgggaaaatagctaccctggggaaaacggcgacggttatgcagatggttacaccagaatatagcattgatatcagcaatctgggcggaatcaaggctaatagcattagtatggtgggtaataccttaggacttggcgtgcgtaataaaggcactattgccaccaacaacgtactcgccatgaccagctatggttcgctgattaatgaaggttccatcaatacggacggcactatggctactatggtatccgctggcggaataaaaaatacgggtacgattaatagcacagcttacataacgcagctctccagcatgggcgccctgaccaatgaaggctccattaccagcagcaaacagctggttgtcggcgccagcggcgacctccttaacacgggaaatattaagggaaagcaagcgctatcggtagtcagcgacggcaatctcactactcgctatgggtcatatatcagaaccgatggtcagttagtggtttccgccaaaaacatcgacaacggcggagcaatctggggaaatatcacgaacgtcgcgttcagtggcgatcgccttagcgtcaccggcaacctttggggctattccagccttacagtacaatcagtgaagggtaaaaatatcggttcgggtgaaatatataattcaggaactattaacggtggcaatgtagcgcttatcaccgacggaattctgaaccaggagggtaaccttattgggcaaaattcgttgacgctcaaaactaaagtcatagacaacatttattatatttacggccgctctctgaatatagagagtgattaccttcgcaacagggcaacaattgatggggataattcaaacatcaccgcagtcaacggcattcttaatgaaggccaactttctgcaagcggcgatatgacgctgtatacccaaacgaatgctgacatcactaactacaataccattaaagctaatggcaccctgacgatgagcaccaggaatgtcaaaaatggcggctaccgctgcggctttttctatctgtcaacctgcggtaaaggatctatttctgctaacaaactggtcctcaactcttatcataactacgcctcggaaatgggcggtaatcagcgatataaaagtgccgaaataaatactatccgttaa

SEQ ID NO: 184126 - DNA, 366 bp, Klebsiella oxytoca
atgaaacaattaactgtatttgaaatggaagaaatttctggcggctattcctgggatttttcctcgctcggcaacgcacttagttctatggcaggtaatgcagttgaattagttgcctcagttgcagttgcagcctctgcaggtggtatggctggttctgttattggtggtcgttggggtggcgctggtggcggcatcttaggttttggtgccatcggtcagggtgtcggaatgatttggggcttagtagtcggagctatcggttgtggcattgcgggtgcgtttgtaggatgggatgttgtatctacagaagctatcgctttagccgaaggtgtcataaacggtacaaccaagctttggagctaa

SEQ ID NO: 184127 - DNA, 1287 bp, Klebsiella oxytoca
atgttaaaaaatatctatcgcaaggaagcgattgagtacaaaaaaatccactggaaaggaaaggcattattattagcaggcattccagcgtggctagtcactcttctggcatttatttttcttattgccattgtgctttcactcatattttgcacctttacccagcgtattgatgtacgcggagaggtcattacgctcccccactccgttaacgtctttgccccacagcagggttttgttgtgaatctgcatgtaaaggtgggagacattgtcaaaaaaggccaaccgctttatgaacttgacgtttcacgtaatacgatcggtggcaacgttagcgcggctcagattgaagttatcaatgaaaaaattgctaacgcagaagatattataagcaaactgacgcgtaataaggctgaaacgctcgctgctcttgaaaaacagattaagactaccagcgcctcgttaacggaaaccaaccgtatgctggctaatactcaggtaggcttaaacaaaatgcataccaacctggccagctatgataaatacttaaaggatggtctgataactaaagatcagtataactatcagcactcgctatattttcaacagcaaagcgcctatcaatccctggtgactcaaaagatgcagctggaatctcagctcacgcaaaccagcagcgataaaatcaccaaagcagcagactttgataatcagatttcaagccagcataaccaaatcaatgattataaaaatcagctggtagaatcgaacgctaacggtaatctgattattaaagcaacgaccaacggtaagattgaatcgctggccgtgactaaagggcagatggtagagaacggcagcagcctggcgcagatcaaacctaccggtgatattgagtattatctcatcctctggttacccaataataccatcccctacgtgaaacccggggacaccattaatattcgctatgatgctttccctgccgataaatttggccaatttccaggtaaggttctttctatttcctcggtaccggcgtcacgtcaggagatggcagaatataccaatgtcagcaacggaactaatcagcaggaattagcgctctataaagcaattataaaaatcaaggacaagacctttagctacaatggaaaaacgctcacgctctctaacggtctgaaggctcaggcggtagttttccttgaagaacgcccgctttacatgtggatgtttactcctttctataagatgacgcaaagcgtgagtggcccgatcgatgaataa

SEQ ID NO: 184128 - DNA, 1437 bp, Klebsiella oxytoca
atgttaaacaacattcgtatcgaagaagatctgttgggcaccagggaagttccagctgacgcttactacggcgtccatactctgagagcgattgaaaacttctacatcagcaacaacaaaatcagcgacattcctgaatttgtccgcggaatggtgatggtgaagaaggccgctgcgcaggctaacaaagagctgcaaactatccctaaaagcatcgccaacgccattattgccgcctgcgatgaggtgttgaataacggcaagtgcatggaccagttcccggttgatgtgttccagggcggggcaggcacctccgttaacatgaacaccaacgaagtcctcgcgaacatcggccttgagctgatgggccatcagaaaggcgaatatcagtatctcaaccccaacgaccacgttaacaaatgtcagtccactaacgatgcttacccgaccggtttccgcatcgcggtctacgcctccattctcaaactgatcgatgccatcaaccagcttggcgaaggtttccagcaaaaggccgttgagttccaggacattctgaaaatgggtcgtacccagctgcaggacgcggtgccgatgaccctggggcaggagttccacgcgtttaacgttctgcttaacgaagagaccaaatgcattctgcgcaccgctgagctgctgctggaggtaaacctcggcgcgaccgctatcggcacccgcctgaacactccggatggttatcagcagctggcagttcaaaaactggcggaagtcagcaacctgccggttgtgccagccgaagacctgatcgaagccacctccgactgcggcgcctacgtgatggtccacagttccctgaagcggctggcggttaaactgtccaaaatctgtaacgacctgcgcctgctctcttccggcccgcgcgccggcctgaacgaaattaacctgcccgaactgcaggcgggctcctctatcatgccagccaaggtaaacccggtggtccctgaggtcgtcaatcaggtgtgcttcaaagtgattggtaacgatacaaccgtcaccatggcttccgaagcggggcagctgcagctgaacgtgatggagccggtgattggccaggcgatgtttgaatctatccatattctgactaacgcctgctacaacctgctggaaaaatgcgtgagcggcatcaccgccaacaaagcggtatgcgaaagctacgtctacaactccattggcatcgtcacctacctcaacccgtatattggccaccacaatggcgatatcgtcggcaagatttgcgccgaaacgggcaagagcgtcagagacgtggtgcttgagcgcgggctgctgaccgcagcggagctggacgatatcttctccgcgcaaaacctgatgcatccggcctataaagcgaagcggtatactgatgaaagcgaacagtaa

SEQ ID NO: 184129 - DNA, 180 bp, Klebsiella oxytoca
atgatcatgaagcaaccggactggcattctgccgacattatcgcggcgctgaaaaagcaggggacgtcgctgtccgccgtttcccgtaaatcagggctgacgccttctacactggcaaatgtgctaataaggcactggcccaaaggggaacggttgatcgctgaggtgttgggcgtataa

SEQ ID NO: 184130 - DNA, 4041 bp, Klebsiella oxytoca
atgaattcaaccttctatcttgaacgtacttttacacacggtgacaggacgtacacagaatcagagttgctggccgcctcaaaatacatagttgtattagcagaacccggtggtggaaaaacggagctaatgaaaagtctcgctctgaaactgaacacttctgtctcaaatgccagcgtttttgcttatgtgggagccgataaagaaaatagcccgctggtcattgacgccgttgatgaagtcgccaggatcgatcaatcaggtatccataacctccttgcacgcgccagaacatcaaagccgactcgcgtcatcatgtcgagcaggtcaagcgaatggggactggcttctaccggtatttttgagagatttcttggtgtctcccctatgattgtgaggctgagagaattcgatcaaaacgaacaacacgcaatctttaagcaccatgcaccagaagaagacttctttgcattccagaccgaagtagcacggtttagcttagacatgttgttaccaaaccctcagtttctgaaaatgttcaccgatgcctatttagaaagtgacaggcgatttgctgacaaacgttcaatctttgctttagcagtcgaacgactggctaaggaagtcaatccaggtatcccgaaagcctctgtatctcttccagttgcacagaagatttcattttctgccgaggtttatgccaaacttctgttgtcgggcgcagagggagtcagcaccatcgacgtgactgcaagccggatgtatcccatgctgccagcgttgtttagtggcagtacagactgttacgacatattgtcaacgcagcttttcaaacccggcgataaggaagaccagcaccgtccggtccacaagatcgtcgctgaatattgtgcagcggattatctcattaaacgaatagccgatcctgtggatgttctcactttaccaaagtgcttgcctgttattgcaccgaacggtattgccagggatgaactgagaggtctgctcggatggatggcggcattaggtaacaggtcggtacagggatccattattgagcttgacgcctatgcggtacttgcaaacggcgatccatcacagcttgaacgctcatcgaaacgacaacttcttcatcgactcaaagaaattgaagccgcagacccttactttcgtcggagcgatttctggcgccggttcagcgcagctggttttttcacacaagacgttgttgaagaaataaagcctcttttaacgatgggcaatgatggtcatttacgtgatttaattttagaacttctgacagactcaccggtaaatagtcagttagtgcctgaattgagccagcttacgttaaaccccaacgagtctgaacatattcgtacattagcaagcagatgcttactcaatgtcaaagaatacgatttcattggcgctttagccattttgatttttgaagccagtaatatttcactcaatattgcagccaaagtcatcgaagtcacagggcccgaaaaattcgactaccgatatctctctggattcttccgcgtctgtgcgaacctctatcccgatcacaaagcacaatttgaaagagtggtaggcactcgttattttattaagaagctaatctcctgtttttcacagcatacccttgaacttcttctggacgaattaacctataatcttcattgccactgtggaaaaaaatcctatgagtgtgattgtcgcaatggaataagcaagatcgtcggttcaatgctcgatcgttattttgaactggctcaagcgccatttgaccctgtaagaatttggcaatggacaggtaatctcaactttcatcgtcattgccaacccgatcaaagcaaatcagtacaggtgcttcgggaaaatgaaacgcttcgtcaggggatcatttcctatgtatttgggcctttaacggatcgtaacgagatatttaacataagagtatggaaattcgacggaaacttgcattcacattcaggccttcatttatggaggaatgactataaatttatcctcaatctggcgtttaaaacagataacgttgacctgtgggcgagttttcttgtcaaccatcaacgttacaaaaacaaggaagagcaaggccctgatgatttgcgggcacaaatgcgtcagcatgccctttccaaacctgcatttatgcgtgaatggtcccgattcaataatgccatgaaattatccgaacaggagcatcaggtttggagattcggacatagccgaagtatgaaacgccatgaccgaaagcaacgggagatcaacgccagaaacataaaattcgttaatgaaaacagagatattgtagaacatggtcgtcactggggttgtctggtgcgttttgcagaacttgtgctcatgcatccggaaagaattgaattagaatttggtgatgagaaactggtgcggactgcgttaagaaattgtctggattttattattcccttggttcccacacttcccgaactggcggccctgcaatgtgaatctaagtacaggcaatctgaaacaattttatatgcagcttgtctggagattctacgtgcagaaggcaatcttgaatgcgtcaatattgcgttgcttacagcattaagaactaacattcacatgggatacaactcagtttctacggaagaacgtaatgccctacaagcagaagttgaccggcttatttttcctgacagcgaaagtgctgaaaaatatctacgacaatacgttgaaccccaactcgctcaaccgtgccctcaccctgaaatatggatgttaagtggagaagaggtctttagtcattcacgcgcgaaactttccattgaatggcttcgtcgttttaccgatttatcccttgactcagtggacatacttttcgaagttgcagctcaatacagcgatcgtgaggatttaaaagggatgattgcagagcgttgcttagatatgatgtcaggctgggctgatccgacagataatgaggatattgaacgcaagcgaatattctggatggtacgtgagttctactttctggagaatattacggatacttattggggttggctaaaatctgacaaagataatttactgcatttttatgagcgttccgggcgcatgagccgaagtgagcaccgtgcctggccggaacttacctcacttaaggttgaagccatcttagatgcttttattgaacactggccgcatgttgatctgcctgatagctgggatagtgatagccctaaagaagagaaagcctaccgctttttgactgatttgatttggtcaattaactctgacacttccgatgatgcaataccggtgctggaccgtcttctcaatgatccacgtttcaccagtctgcataaggagttacaaagcatatatgccgctcaaatcagaaaaaaagcactcagggattttgaaccaccgacgccagatgagatagttcaacgccttgattgtgattcagccgttactattgaaggcctgcgccagttagttcttcaggagcttaatgatttccagaacgcaattgatggcggtgaatttaactcggcagatcgcttctatgagaaaaatgaacgcctcgatgaggtaaagtccacagagattattgcggagcgcctgagtttaagacttcagcctcagggcatcactataactccagagcatcagttgaaagggcaaaacaggagtgatttcacggcatctaaattaattggcggaagaagacgactgctggttacggaagtaaaaggccagtggcacagagagttatattcggctgcttcagcccaactctatgaccgttattctattcaccctgatgccgaacagcagggtatctttcttgtcatatggtttggagaaagcgaaaccgttgcgggccgcaaaacccacggaattaaaaccgctcaggagcttaaaattggtattgaggcagtattaccggctgatctccgtggtttaattgatgttttcgttttagatgtttcacggaaccgtgaccacccacgctag

SEQ ID NO: 184131 - DNA, 351 bp, Klebsiella oxytoca
atgtactcgctcaaccaattagttgccactgaccataagcggcaatggattctgttggacacagaaacctgcttaccgttgttgtatccactcatatatcacattgatcatttggcttttcgttcactatccacgctgtctgcttcgctacaggccgttaagttcttttatgaattctggttgcagaagcacggcgccacgttttgctatagcttccattcatctggccacaacccgtgcattgccattgaggaaatggctgcattttttcactatctggaaaatggtcgcgtaagccaatcaaatttactgacattcacgccaatccctacttcccatagtcttaggtag

SEQ ID NO: 184132 - DNA, 984 bp, Klebsiella oxytoca
atggaacttacaaccagcggaaaacttatactggaaaaagctgaatcaactctggacttctatattaataaggcacgtcttgattccgttgcagatttgattaaatccgcacgggtatgtgataccgccaatgacccaggagcacctccgcaaaaaagccttaacgatctacttaataatgttgttgaattacctggttcaacatcaattgttgcagtacctgcttcgctgaccgatcctcagactggggcagtaaataaagaaatgctgaaaatgttaaaacaggttcgaacgcttgaatcatacatatcagtattaacagcttattgtctttataatgaacatccttccccctatgacatctctaaacctgccgaagcttcatcatttacacaggcgacagcaaaatggcgaaatcatgttataactggtggggctgtgagggcgatggcaaaatatcttccagtatcacaaattacagcgcaatcattttctaaagaggtaaccagcgccactttacatcttggttttctgactacactttttggtggattcaatctaccagccaaagcaattagacagttagactccattctaaccggtgtggtagatcaaatgaaaaaggtggagttgtcatttgaaaaacaaacgaccaccttagatcattttatcagttattattatttcgatgttatcgaaggtactggcggtgattcaggtattccagcgatgtatgattgcaaaatcagactgatgtacctgcatgtggatcagcaaagctggagagcatctgtagggaaatcttccgttaaccacttcggctttcatatgaattattatgacatggatactgttatgggggatctctcagacgatgttgaggcaatcaattcagcgattaagcaattaactagtaaaacggacgagcaaatttctgctattatgtctccgaaaacaattgaagcagatccaaaaaaatcctga

SEQ ID NO: 184133 - DNA, 273 bp, Klebsiella oxytoca
atgccgatcataacaccaattccccgtgacgaacgacgcctgatgcagaaagcaatccataaaacgcacgataaaaattatgcccgcaggctgacggccatgctgatgctgcatcggggcgaccgtgtcagcgatgttgccagaacgctctgctgttcccgttcctccgtcggacgctggattaactggttcacgctgtcgggtgttgcaggactgaaatcattacctgccggacgaacccgtcgctggccttttgagcatatctgcacgtaa

SEQ ID NO: 184134 - DNA, 420 bp, Klebsiella oxytoca
atggcggtaatccacaaagcactggacgaatgcagcgcagagcatccggtcttttatgaagatgaagtggatatccatcttaatcccaaaatcggtgcggactggcagctgcgcggacaacaaaaacgcgtagtgacgccggggcagaatgaaaaatattatctggccggagcgctgcacagcgggacaggtaaagtcagcaatgtgggtggcaacagcaaaagttcggcgctgttcatcagcctgctgaaacggcttaaagcgacgtaccgtcgggcgaaaaccatcacgctgatcgtggacaactacattatccacaaaagccgggaaacacagcgctggctgaaggagaacccgaagttcagggtcatttatcagccggtttactcgccacgggtgaatcatgtggaacggctatag

SEQ ID NO: 184135 - DNA, 1476 bp, Klebsiella oxytoca
atgaatacccaatataattcaagctatatcttttcgattacgttagtcgccacgttaggaggactattatttggctacgataccgcagtcatctccggtacggtagaatccttaaacactgtttttgtggctccgcaaaacctgagtgaatctgccgccaactcattgctgggcttctgcgttgccagcgccttgattggctgcatcattggaggagcgcttggcggctattgtagtaaccgttttggccgccgggattcgctaaaaattgccgcgcttctgttttttatctccggtatcggttcggcatggcctgaattaggttttaccccgataaatcctgataacgcggtgccagtttatttagccggatatgtaccagaattcgttatttaccgcattattggaggcattggcgtaggtttagcatcaatgctttcaccgatgtatattgcagaactggcgccggcaagcatacgaggaaaactggtttcctttaaccagttcgcgattatttttgggcagctattggtttactgcgttaactatttcattgcaaaatcaggtgatgctagctggctgaataccaatggttggcgatatatgtttgcctcagaatgcattcccgcactgctgtttttagggctactgtataccgtaccggaaagcccgcgctggctgatggcgcagggcaaacaggaacaggcggagggtattctgcgcaaaattatgggcagcaagctcgccgtccaggcaatgcaggagatcaatctgtcactggaaaatggccgtaaaacgggcggtcgtctgctgatgtttggcgcaggcgtcattactatcggcgttatgctgtctatattccagcagtttgtcggcatctacgtcgtgctctactacgctccggaagtcttcaaaacgctgggagccagcactgatgtcgccctgctgcagaccattatcgtgggcgttatcaacctgactttcaccgttctggccatcatgacggttgataaatttggccgcaagccgctgcaaattattggcgcgctcgggatggcgcttggcatgttcagccttggcaccgccttttatactcaagcatccggtttggtggcgctgctgtcgatgctgctttacgtcgccgcatttgccatgtcctggggcccggtttgctgggtgctgctggcagaaatcttccctaacgcgattcgcggcaaagctctcgccattgcggttgccgcgcagtggctggcgaactactttgtctcctggaccttcccgatgatggataaaaactcctggctggttgcccattttcacaacggtttttcctactggatttacggttgtatgggaattctggcggcgatgtttatgtggaaatttgtgccggaaacgaaaggcaagacgctggaagaactcgaagagctgtgggcacccgcagaagagaaaacgcttcaggcctctatcagataa

SEQ ID NO: 184136 - DNA, 1542 bp, Klebsiella oxytoca
atgcgtcttgaagtcttttgtgaagaccgtcttggtctgactcgtgaattgctcgatttactggtgctgcgcggtatcgacctgcggggtatcgacattgaccctattggccgaatttatctcaatttcgccgagctggagttcgctagcttcagcagtctgatggcggaaattcgtcgtatcgccggcgtcaccgacgtgcgcaccgtggcgtggatgccgtcagaacgtgaacatctggcgctcagcgcgctgctggtggcgatgccggagcctgtgctctctctcgacaccaaaggaaaagtcgaactggctaacccggccagctgccagctgtttggccagagccaggagaagctgcgcagccatccggtcgcacagctgattaccgattttaacgtccagcgctggctggaaaatagtccgcaggagtcccacgccgagcacgtggtggttaacgggcagaacttcctgctggagatcaccccggtttatctcgaaggcgaacacggcgagaaggtgctgaccggcgcggtagcgatgctgcgttcaacggtccgtatggggcgccagctgcaaacgatgaccattaaggacaccagcgccttcagccagatcctcgccgtaggcccgaaaatgcgccacgtcgtcgagcaggctcgcaagctggctatgctcagcgcgccgctgctgatcgtcggcgataccggtactggtaaagatttgctcgcccacgcctgccacctcgccagcccgcgagcggggaaaccttacctggccctgaactgcggctccattccggaggacgcggtggagagcgagctgtttggcgacgctatccagggcaaaaaggggttcttcgagcaggctaacggcggttcggttctgctggatgaaattggcgaaatgtcgtcgcgaatgcagactaagctgctgcgcttcctcaacgatggaaccttccgccgggtcggggaagatcatgaagtccacgtagatgtacgggtgatctgcgcgacgcagaaaaacctggtggagctggtgcaaaaagggctgttccgcgaggatctctattatcgtcttaacgtgctgacgctctatctaccgccgctgcgcgattgtccgcaggacatcatgccgctgaccgaactgtttgtggcgcgtttcgccgatgagcagggtatcccgcggccgaaactttctgccgatttaaacagcgtattgacgcgctatagctggccgggcaacgtgcgccagctcaaaaacgcgatttaccgtgccctgactcagctggacggttttgaactgcgccctcaggatatcctgctgccggatcacgacgtctcgtcattagcggttggcgaagaagcgatggaaggctcgctggatgatatcacgcgccgtttcgagcgctcggtgcttacccagctttatcgtagcttccccagcacgcgtaaactggccaggcggcttggcgtctcgcataccgccatcgccaataaacttcgcgagtacggcctgagccagaaaaaaggcgacgagtaa

SEQ ID NO: 184137 - DNA, 1974 bp, Klebsiella oxytoca
atgaattgctgggaggttttagggttagcgccgggagcggaaacccgcgaaattaagcgtcgttttgcgcaactggtaaagattaaccgtccggaggatgacgccccggcgtatcagcggctgcgccacgcctatgaggaggcgctctcctgggagccgaccaatgatgttctgcctgcgcagcatgacgtggtggagcatcaaccggcgacatcagagcacggagcaccggcacctattggcgttgcgccatcgcgtattccgttaccccgcgcctcgcgtccgcagccagaacccgtctctcctggctccacgctaagctggcgaagcgtgcttgacgagctgcttatggcgaacgaaagcaagcctcaggaggctgaaaagcagctggccgatgctgtcgccaggcttgcctggtcagatctgaaatcccgcttactgtttgaggaaaatctggcgttaacgttgagccgggtgtttcgtcctttgctgatgttggcagcggcagaaaagtttaagtggaatttgacttccggaggcaattttcagaccgcctgcagcgtcattaatgagaaatgcgcgctctggcggctgcttgccgcggaaatcggaccgctgttttttgccgatatgacggcgatcgaggaaatcgaaagcggcgatcggcttaaggcgctttatcagaactatgcgcaggatgcggagaacagaccgtggtttgatgcggtggtcttaacccacatcgctcaatacgacctctcttccgcgctgctgggcctggtgattgagcagattgaatggtcatttaaagcgcagaaaacgctccgcagctggtcgcttagcgaacgcttttatgcgttagagacgattcacccggtgggatataaaaaactttgcgctgctctcggctgcatcgacggtgtttaccatacttcgaaaaaggtggtgagctatatcaaagcggcagagctgaagcacgccgtgtcccgctacaatcttggtcttctctatgaactgggagaagatgtagagcaagacgctatccgcgcattcttctggtacgcctgcgcggcaaaacagggcgatgcggacgcgcagtatgcgttgggactgtgctatcgaaacggaagtggcaccgttcaggatgaccagcaggctctcgtctggctacaaaaaagtgctgaacaggggaaggctattgcccggtatgaactcgggcgcctctactatgatgctgcttctccgcatttgcgtgacggcgcgctggctcttcattggctgggcaaagcggcgcagcaggggctggcgttcgcgcaaaatagtctgggcactctctattacgaaggccgcatggtagataaaaactattcgctggctctggaatggtttagtcaggcagcccgccaggggaatacgctggcgcaatataacctcgggcaattatacagcaacaatgaaaccggcttagccgattacccaaaagcattatactggttaactcaggcagcaaatcagaattatggcgatgcgcaattcaaactcggattcctctattttgccggagaggatatcccgcagaatatgccggaggctatacgctggctgacctgtgcatcccgacatcattatgttgatgcttttaatctattgggatccatctacctcggcggccatggcggggtaccggtggactatagtcagtctctgttctggtacgagaaagcggcgaagcgtggacataccagcgcccagaatttagtggcctttatgtatgccaatggcgttggaacggaagagaatgcgattatcgcctgggcctggatcctgatatccggcggcaatgatcccagaataaagcaggagcaaattcgccgcaaaatgtccggacgcgatctggcggaagcagaggagattgctcgtcaatataggcaaaaatatcggctgaatacgcctgaatttgaggatgacgattga

SEQ ID NO: 184138 - DNA, 1701 bp, Klebsiella oxytoca
atgataataggaatagatttaggaacgacaaatagcctggccgccgtatggcaggagggtaaagccgttttaattcccaatgcgctggggaaatttcttacgccaagcgtggtgagcattgacgatgacggcatggtgctggtgggggaggcggcccgcgatcttcagctgacacgtcccgccagctgtgcggctaactttaaacgcattatgggcacttctcagaccatgatgctgggaaaacaggcgtggcgcgcggaagagctctcttcactggtgctgcgccagttaaaagaagacgccgagaatttccttggcgaaccggtgacggaggcggtgattagcgttcccgcctggtttagcgacgtgcagcgtaaagcgaccaaaatcgccgccggtatggccgggctgaccatcagccgtctgatcaacgaacccaccgctgcggcgttggcttatgggctgcacaaccaggaagatgaacatcagttcctggtttttgatcttggcggcggcacgtttgatgtctcaatcctcgaactgttcgacaacattatggaagtccgcgccagcgccggagataactttctcggcggcgaagatatcgtggatattctgatcgaggcgtttcgccttcagcaacagttcccgcagcagatcgaatggcgggaacccacgctgcagcggcagctacgggtggaagccgaaagggttaagcgggtgctgagtctgcgtgaaaccgcaattttcagcgcggaaatcgagggtgaatgctatcagtgggagattaccgaagcgtattttcagctgctgctgggatcttttttcgcccgcattcgcgcgcctctcgaaatggcgattcgcgatgcgcggcttgatattgcgcagctggatcaggtggtcctggtcggcggaaccacgcgtatgccgctgatccgtaaactggtgacgcagctctttgggcgcctgccagcgatgcatttgaatccggatgaagtgattgcccagggcgcggcaattcaggctgcgctcaggatgcacaagcgtgaacttgaggatgtggtcgtcacggatgtttgtccgtataccctgggcgtagatgtctcaagatcgctgggccatacccgggagtcgggttattttgcgccgattattgaacgcaaccgcagcatcccctgcagccggatgcgggatttttataccatcagggatgatcagacccacgtcgatttcaaaatctaccagggcgagagccggatggtggaggacaatatcttccttgccgaaatgtctattgccgtgccgccaaaaccggcgggagaagtcaaaatagaagtgcgttttacctacgatatcaatggactgctcgaagttgatattcacgtgccctcaaccggcaaccgcagtagcctgctaatagaacagcatcctggcacgttgacggaagagcagatccagcaatcgcgggcaaaactccgtgcgctgaaaatccatcctcgcgatgagcaggcaaatctggcgctgatggcgcggctcgatcacctctatcagttgagcctcggcgagacacgcgaatggatcggcgaatgttcgctgcggttccgctccctgctggaaagccaggagcgcgatcggattgcccgttttcgcgaacaggttgatccgctccttgacggcattgacgcggagcgactgctatga

SEQ ID NO: 184139 - DNA, 318 bp, Klebsiella oxytoca
atgaattcacgccgatttaccccagaatttaaacgcgagtgcgctgagctggttctcgaccacggttactcatttcgacaggcctgcgaagcttccgatgtcggtgttaccgccatgcgacgctgggtcagacaactcgagattgagcgtggagggctggttttatccggccaggggctcccctccccggcagcaccgctcacgccagaacagcagtatattcgccagcttgaggaacgggttcagcgacttgagagggacaaggagatattaaaaaaggctacagctttgctgatgtcggacgccaacaagccctga

SEQ ID NO: 184140 - DNA, 813 bp, Klebsiella oxytoca
gtgctgggtgtttgccggagtcttgtttactaccatcgcaaacgccgaaaacaaccggatacgacacgaattaccctacagcgaagagcagccgaattacaccgtctgggtcggggttctgccggtgcaaggacattgtctttactgtttcgtcgtgaaggtgaaaacgttggtcgttacaaggccagacgactgatgaaagaagccggtctggtgagcaggcaacccggaaagcatcgttaccgccagtgcaaccggcagtcccatctgacggataatcatctgagtcgcaattttaggacaggggcaccagataacgtatggtgcggagatattacctttatcaggacgcgcgagggttggctttatctggcggtggtactggatttatatgcgcggaaagttgtgggctgggcgttctcatcagtacccgacagccagctaacaaagaaggcgctcacaatggcctggaagaaccggggccgcccaaagggggtaacgttccactctgatcagggatcacagtatgccagcgtgtcttaccgggaaatggcgaaactgtatgggctcaaactcagcatgagtcgcaaaggaaactgctgggataatgctgttgcggaaaggctgttccgcagtctaaaaaccgagtggttgttgcgtgaaggctaccggaacagaagtgaagcagcgaaggatgtggttcagtacctgagtggatattacaaccgggtaagaccacataaacacaacggtgggttaacacccacagagatggaaagacaaagaacctctggctgtgtccaaattaagtag

SEQ ID NO: 184141 - DNA, 402 bp, Klebsiella oxytoca
atgcgcgtccagagcctcctgattgcgccaggattcgcgcatatagaacgtatccggcgcatcgcgcagctgaaacagggcgtaatcaagattgcccggctcctgacgcgtgggcaacaggagcgcccgcagggcctggcgcagcgcgtcgttgtagccggtttcgccgtcagcaccgcgataaatgaaatcgcctcgccgctcatcttaaaagccctccagcacgattttgcccaccgaacgcccggtttccagctgcgcgtgcgctttttgcagattggcggcggtgatggcgccgtagtgctcgccgagggtggtcttaatggttttatcgtcaatcagcgccgccacgcgggtcagcagctgatgctgggcgatcatgtccggcgttgcgaacattga

SEQ ID NO: 184142 - DNA, 1173 bp, Klebsiella oxytoca
atgcttacaactatcatttaccgtagtcatgcccatagtagcatttcaagaacctcaatcatggaaatgattgagctcgcaaatgcacataatatcaaaagtgatgttactggaattttgatttttaatgggattcactttctgcaattactggaaggacctcaggcccaagttaacgaaatttacagtagaatctgtagtgatactcgtcactttaatattgttgaactcttaaatgacgttgcacctttcaggcgatttggtaatgcgggcatggaattaattgatattgatttacatagccatgaagactgcctgagggcaattctgaacagagggactacacaacaccaactgctttataatgatagagcattgcgtttttttcggacattcatagagtccatacaacaagaaaaatactataaattgccgtccactactgaatggctgtttaccagggaacctttaatccctgaaagtccttatattgctagttccttcattataaatccagtggtagatcctctcgcgagaaaggtccattcgttccagttcagcaatcccaagacaactggtttgtatagaatggacttgttacatcatgatcttgaatcaaagcgtgttgctcttcttgaagctggtagtttccttcattctgaacaaagggtttctataagtctattaccattgactataatcaagattagtgatgccccttgtatgctgcttaagtatattgaacaaagcgatctcattcctgaacaaattatcatcgaattcttagaaaaagatttgttcgccaatattgatgactttttatatgcggtgcgaatacttaaaagcgctggtataagcgttgctattaatgactttgggtctggacatgcaggcttactcctcctaacaaaattccagcctgaaaaaattaaaattcatggtgagctaataagaaatatccacagggatggtgcgaaacaagctgtagttcaaagcataatcagttgctgtgatacgctcgagataagaatatgcgctactgatatcgagaaagctgaagaatggatgtggctggagtcagccggtatcgcttacttccaggggccccttttttcaggctactcagataatggcttgccatttgtaagttggccggaccctgcggagatttag

SEQ ID NO: 184143 - DNA, 1188 bp, Klebsiella oxytoca
gtggtcgtcctttccaataatgatggttgtgtgattgcccgtagcgcagaagccaagccgtttgtcaaaatgggtgagccgtacttcaaacaaaaggatctgtttcgccggcacggcattatcgcgtttagtagcaactatgagctctatgccgatatgtccaatcgtgtgatgacgacactggaggagctatctccacgatgcgaaatttacagcatcgatgaagctttttgcgacctgacaggagttcgtaactgccgcgacctaaccgactttggccgggaaattcgtgagacagttctacgaaggacgcacctcactgtaggcgttggcatagcccagactaaaactctggctaagctggcaaatcacgcagcgaaacagtggcagcggcagaccggaggtgtggttgatttgtcgaacctggagcggcagagaaagctaatggcgatcttaccagttgatgaggtatggggcgttgggcgccgtatcagtaaaaagctggaagccatggggattaaaactgtgctgcagctggctgatactgatatcaggtttatccgtaagcattttaatgtggtactggagcgaacagtgcgggaactgcgcggcgagccatgcctcggtctggaggaattcgcgccggtaaaacaggaaatcgtgtgcagccgttcgttcggcggtcgtatcacggaataccatgagatgaggcaggcgatatgcagctatgcgtcgcgcgcagcggagaaactccgtggcgagcatcagtattgccggttcatctcagcgttcgttaaaaccagtcccttcgcactgaacgagccatattacggtaatagtgcatcggtaaaactgctaacgccaactcaggatagccgcgatatcatcgaagcggcaacgaaatgcctcgatgcaatctggaaagatgggcatcgttatcagaaagcaggggtaatgctgggcgatttctacagtcagggcgttgcacagctgaatctgttcgatgacaacgcaccgcggcagaacagcgaaaagttaatggaagttctcgaccaccttaacgcaaaggacggaagggggacgctctattttgcagggcagggaatgcagaccgcatggcagatgaagcgagaaatgctatcaccccgctatacaacgagatacagcgacctgctgaaggtcaagtga

SEQ ID NO: 184144 - DNA, 420 bp, Klebsiella oxytoca
atgcagttttacacgcccgttgagttacgtaagatcatcctgattccgttgttcagtgaccttgtgcaatgtggttttccgagtccagcgcaggattatgttgagcaacgtattgacctgaacgagttgttagttaaccaccccagcgcgacgtattttgtcaaagctgccggcgatagcatgaaggacgccgggatcggggagggagatttactggtcgtggatagctcacgaaccgcagtccatggcgatatcgtgattgccgctgtgaacggggagtttaccgttaagaagctgcagctgcatccgcgggttcagcttaacccaatgaatcctgcatattcgccgatagtcgtaggaagcgaggatactctcgacgtgttcggggtcgttactttcatcatcaaatcggctggctga

SEQ ID NO: 184145 - DNA, 9795 bp, Klebsiella oxytoca
atggcaaataacataatcaaagggcgcaaaggtggcagctcaagccagcgcacgccgacagaacagccggatgatttacagtccgtagcaaaagccaaaattctcatcgcgctgggcgagggtgaatttgcaggtgagttaacgggcaaggatatttatctcgatggtaccccgctattaaatgccgacgggtcagagaacttttccggcgtggcctgggaatttcgtcccggaacacaggcccaaaaatatattcagggtattccgggcactgaaaatgaaatcagcgtcggaacagaaatatccagtgaaaccgcctggagccatacgtttaccaatacccagctttccgccgttcgcgtccgcctgaaatggccatccctgatgaaacaggaagacgacggggacgtagtgggaaatacagttaaatacgccattgatttacagaccgatggcggtgcctggcagaccgtgctggaaacggcggtgaccgggaaaaccacgtccggctatgagcgcagccaccgcatcgacctgccgcaggcagggagtacctggactttgcgactgcggaaagtctcgccggacgccaacagcgtcaaaatcggcgatgtgatgacgctgcagagctacacagaggtaatcgacgcgaagctgcgctatccgcataccgcgctgctctatatcgagttcgactccagccagtttaatggttccatcccgcaaatttcctgtgagccacgcgggcgcgtgatccgcgttccggataactataatccagaaacccgtgagtataccggcacctggacaggtggctttaagtgggcatggacggataacccggcatggatttattacgatatcgttgtttcagaccggtttggcctcggcaaccgcctgaccagcgccaatatttctaaatggacgttgtaccagatcgcacagtactgcgatcagctggttccggatggtaagggcggcgacggcatggagcctcgctatctctgtaacgtttacgtgcaggaacgcaatgatgcctacaccgtgctgcgtgactttgcggctattttccggggaatgacctgctggagcggtgagcagattgttgtgcaggcggatatgccgcgcgatgttgatttcaactatacgcgggcgaatatcattggtaaaccgcgctattcgagcagcaccagcaaggctcgctacaccaacgcgctcgtctcctggtccgacccggcgaacgcgtatgctgatgcgatggaaccggcgttcgtcccggagctggtttcccgctacagctttaaccagctcgaagtgacggccattgggtgtacccggcagagcgaagcccacaggaaagggctgtggggcattctgaccaacaacaaagaccgaatggttgagattgatgtggggctggacggtaaaatcccgcagccgggctacatcattggactggctgatgaacttctggccggacgcgtgaacggcgggcgtatcagcgcagttaatggacgggtgattacccttgaccgggatactgatgcaaaagctggtgaccggctgcagctgaacctgccgtcaggcatatctcaggcccggacgatccagtcagttaacggtcgccgacaggtcacggttacgacggcgtacagtgagacgccggaggtggaatgtgtctgggtgattgaatctgacgatctgtatgttcagcagtaccgcgttatcggggtcaaggacaacaacaacgccacgtatacaatcaccggcgtggcccacgacccggataaattcccgcgtatcgataccggcgcgatcatcgaccagcgcccgataagcgttatccctccagggagtcagcagccgccggaaagcatcgttatcagctcgtattctgtggtgaatcagggcatcagcgtcgaaacgatgcaggtgcactggaatgcggtgaaagatgcgatttcgtatgaagcgcagtggcgacgtaatgacggtaactggattaacgtgccgcgcagctcgaccacctcgttcgaggtcagcggcatttacgccggtcgttatctggcccgtgtccgggcgatcaacgctgcagaggtctccagcggctgggcatattcagaagagaaaacgctgaccggaaaaatcggtttgccgtcggcaccgctggcgctgaccaccacttccctgctgcatggcgtgcagctgaactgggcgttcccggaggggagtggcgatacgcagaaaaccgagctgcagtacagtcctaatcccaacggcaacggggcgatggcgctgtctgatgtggcgtatccgggtaaaacgtatcagcagttgggcctgcagattgcggcgatgttctggtaccgcgcgcggatcgttgaccgtatcggcaatgaaagtccgtggacggcctgggtgcaggggatggccagcgacgatatcggtgagtattacgataagctgactgatgcgatcaaggacacggacgcctggcaggaagtccagcgggatattgaggagactcataaggagctgctggacaccgccgatgctattcgtgaagaagtcacgcagcaggttgacgggcagatagagtccgtcaacaagacgataacggagaatatcaacagcgtaaatcagacgctcagtgacaatatcacggcagtcaacaagagcatcaccgatgccgtgagcgagattaatgcctccgttgaccagcagatcgctgacgttaacaaaaccctgaccgagggggatgctgcgttaaaatcccagctgcaggcggttgaaaacagtctgaaacagtccatcgcccaggcgaatacaggctgggacaaagcggtaaaacaggaaactgccgaccgcattgcggacgtcaacgcgaaggcggcgcaggcggcagaccagctgctgaatgaaaaaaacgagcgcgtggccgccattaataatctgcagacgattattcaggacggcgacgagtcactggcccgtcagatttctgaaatttccgccggtagcgggcagcagtttgattcgttcagtatctggtacttcgataaagacaatgaggggtggaccgaggacgatgccggtcaggtgccgatgcaaatcacggacgacggctggctgaaagcactgaacagcaccgcctcctgccgttcgcccaacgggcaaactattccggcttcctcctatcgcaccgtcatgctgcgtattaaacgcgtgggtaatccggcatggaaagggcggctttactggattggtacagaggaaaccggctggagtgatgtccgctcggtgaatatcgcggagcaggagtttgacggcgatggtatcagcgtggtggccatctccgatgtgaactggaatgcatccggtacggtccgccgctttcgcctggatctggctcaggggcagaatgccgacaaccatttcctgatccactggatatcggtcgggcgtccggcaccggcggccagtactgcggcgctgcgtaatgaggagatggcgcggacgcaggcagatgaagcggaagcgctgaagcgctccacgctggcggcacagataaggggaacgacggaaagtaacagcctggcggatctgcgttccggcctgctgtatcaggagatgagtgcccgtatcactgctgataaagcagaggtgacagcccgggaatcgctgcagacgcagttcaacgagaataaatcctcggtcgcggaggagctgagttccctgtcgaccgcacaaagcgcacaggccagcaaaatcagcgggctggaaaccagtctgggtaaaaaagccgatgcaaccgcgctgcagtccctcacgcaaaaggttgaacagcagggcaccacgttaaccagccaggggaattcgctgacctcgctgtctaaccgcgtcggtaaaacagagtcgggcgtggccgcaaacagcaacgccatcacgggcctgcagtccagcgtcagccagcaggataaaacgctgaccagccagggcagcgcgatcgctaaactgcagaacgacctgacgacaaccaattcaaacgtcagtacaaaggccgatgcgagcgcggtcacggcgttaaccaaccgggtatccgcgacggaaggcaacctgaccacacagtctggccagctgacgatgctgaaaaacaccctggctgaagggagcctgattagtaacggcggcatggatgtggatctgtcgttctgggagaactccggtaccggctcggcattcacgtatgatgcaggtgaaaaagcgctgagaacgacaaccggctctgttcgggttgccaacgtgacgcgtatccccgctgaggccgggctgacgcttaccgtctcatttgagtacaaaacatcggaaacgatgaacagcgtatcgtctgataccgttggtgtgataactgatttgggcaatcctgtcgcctggctatcctcagaatccccgtggctgagtggcgtgacgaccagctggcagacgaaaaccgtggagctgaccattccggcagactttaccgggaattatgtctatctgcggtttgccgccgggggctgggcaccgtcaaacagtgcgcgtctgtatatccgtaaagtcgacgttttttcgtcgaccggggtgtcgaagaaggcaaatgcctctgccgtgactgacctgaccagtcgcgttgactcagcggaagggaagctggccagccatagccaggcaatcacaaagctgcagaatgacctgaccaccacgaactcgaatgtgagtaaaaaggcggatcagagcgcgctgacgtcactgaccgggcgagtggagaagacggaaagtggtctgactgcagcgaacagcaatatcacttccctcaacagctcaattagcgccgcaaaagcagccggggatgactatatacctaacccggcatttgatccttcttacgaccgcatggggtatgacgtcgtatcatccggcgctgctggcgtgcccggggattgcccgtttgcgtacgtggttcgtctggcaggccgcgatcatgtcccaaaaataaacaacattgctgtcacaccgggtgatgtcttcgagatgtcggccctggtagcctgcggcgccggtcaggccgattttaatctctatatcgccagcggcacctctgcgacagaaggggttaaagcgaggctttctggcggtaatacgaaaaccacggcggcctggaagcgcgcaacatggcgctttacggtgccgtccgacacgaatttcctgcgccccttcctgcaggttaaccagagttcaccctttggtacggtctggtatgcagcagactggcatctgcgcaacgtcaccgcagcgaaccgcgcacagaaaaccgccgatgccaccgcgtcagcagtggataccctgaccacgaaagtcacccagcagggcgatacgttgtccagcatcgggagccggacgacggcgctggaaaacgggctgaagacgacaaacagcaccgtcagccagaaggcggacgcgagcgctgttcagaccctgcagaacacggtgacgcagcagggcaaagacattacggcggcgaacagcgcgataacgaagctgaccagcgacctgtcgacgacgaatgccaatgtcaacaaaaaggcggatgcgagtgcgctgcagacgctgcaaaacaccgtggcggagcagggcaaaacgctgacaagccagggcagcagcctgacgcagctgagtaacagcctcaatgaagctgttgctgatgcggatgcctcccgggcgatacccggcaacctgatttccaacgggtcattcgagcgcggccaggctgcgtttactggctggcagtcagcgacgtcagtcataacggcattgtcaccgtacaacggcacccgaatcctcaaggtggtgccgggcagtaacgtggtctcgctgcttcagaagatttcgttcataaaggatcgcacctacaaaataggtgtgttcacgcgtgtttcaggtggcacgacaatgccgtcaggcgctgccggaaataacaagctgcgtattggtgaatccggcggaccactgaaagaggtgcagttcaatcccgcgacgctgccgacaggctctgtctggcaggaaatttctggcacatggaaggcgacgaaaacggcagtccttgacgtctccattatggtactgctggcgacgggtgagcagtattttgatgatttctatcttattgacgtgactgatgagaccagtattgcggccagcgccactgccatcagtaatctgaccaaccgggtaacgagcgcggaagggaagctggagagtcagagcagcagcatcacgaaactcacgaacgatctggccacgacgaatgccacagttaacaaaaaggcggacgcgagtgcgctgcagtcgctgcagaacaccgtgacagaacagggcaaaaccctgagcagccagggcagcagcatcaccagcctgcagaacgggctgacgaccgcgaaccagaacatcgtgaagaaggccgatgcgtcagccgtcacctcgttaagtaaccgggttaccgaagccgaagggaaactgacaagccagagtaacagcatcacgcaacttcaggcatcgctgatatccggcagtctgatagctaacggggggatggaatcggacctttcgctatgggtggattccggcaccggctccgcgtttacgtatgatgccggggaaaaggcgctgagaacgacgacaggctccattcgtgtagccaaccagacccgcattccggttgagccagatacgaaattaaccgttacgtttgaatttaaatcctcagaggcgatgtcgaatatatcctctgactccgttggggttatttctgacctgaataaccccaccagctgggtggtatccagtacatcatggttaaaagggataacgaccagctggcagacgaaaaccgtggagctgaccattccagcagattttactgataatttcgtctatctgcggtttgcagcgggcggctgggcgccttccaccagtgcacgactttttatccgtcatgtagttgtgttttcatcaaatggcgtggcgggtaaagccgacgccagtgtcgtgaatgatttatcgtcaaaggttactgagcagggcaagacgctggccagccagagccaggcgatcacaaagctgcagaatgacctgtcgggcaccaacgcgaacgtgacgaagaaagccgacgccactgccttaaacgcgttatctaatcgggtaacgcagacggaaaaggatatcagcagccaggctgacagcattaccagcctgaacagctcgctgaatattaatgcccgtaaaggctcaaacccgtggctggacggaacgtttgaatcctacgacgcaaaccacaacctgggtgggtcagcgcgagtggtcaccggggtcagttactcgggcggcaaatgtatgcgcgtttcgcgcgcacagaacacgacaggcaacagcgatgatttaatcggctcacgccttgccattcgcgatacggcagtattcagggttgaattctgggcgatgatgccttccggagaaaacccgtccagcggctgggtcactgtcgtcggtctcaacgtccagaatgatgcgggtgcgaactcatggctgggggcagcgaatgtcagcgaatcagcgctggccggtcgtgacaaatgggttaaattttccggctatgcaaaagccacagcgaaaggcgcgacgcgcgcagtggtctggatctccacgcgcggagcgaacggcagcaatacgccaggctataacctgtatatcgacgacctggttatcaccgatgtcaccgatgcttacaatgcgcagggcacagcagacgcggcggcctctgcggttgactccctgaccacgaaagtcacccagcagggcgatacgttgtccagcatcgggagccggacgacggcgctggaaaacgggctgaagacgacaaacagcacagtcagccaaaaggcggacgcgagtgccgttcagaccctgcagaacacggtgacgcagcagggtaaagacattacggcggcgaacagcgcgataacgaagctgaccagcgacctgtcgacgacgaatgccagtgtcaacaaaaaggcggatgcgagtgcgctgcagtcgctgcagaacaccgtgacagaacagggcaaaaccctgagcagccagggcagcagcgttacgtccctgaataacagcattgtggccacccagcaggatgcggacgcggcaaaatcaatgcccggcaacatgctggcgaacaactcgttcgaacgcggttttgacggctggagtaactccggctggagcacgctggcagcgcagaacccgaagtccggcaaatacatcattcaggccacgaagacatccagcggctcaacggcctgtgaccaggtggtgaagctgacgggtggccagacgtaccgcgtgggtgcctgggtgcgcaggtctgccgatatggccatcagcaatgccagcaataccaaaatcagcatccgcaatagctcagggccgctgaaagatattacgatcccggccagcgtcggtactgcatggacttatatcagcggcgactataagccgacggcagacgcagagctgatcatctctctgcgctccagcctgtctgctggttatctgtatctggacgatgcattctgcatcgatgtcagcgatgaggtggccaataccgtcaacgctgcagccatcagttcgctgacaacgcgcgtgaccagcgcagaggggaaaattacctcgcaggggcagcagctcaccagcctgcagaacagcctcggaaataaagcggatgccagcgcggtcagttcgctgacgacgcgggtcacgaaggctgaagataaaatcgaatcaacagccagcagcctgaccagcctgaacagtaccgtcggtacgttatcctcgaccgtacaggcccagggtcagacgctggcggatacaaacggcaaggtcaactcgatgtactccatcaaagttgaaacaaataacgggaagaaggtaggcgccgggatcgtgctgggcagcgatggttccacaagcgacatgatcctctatgccgaccgtttctcgctgtttaaccgcaacagcaagactgctgtgccggtgatgattgctgaaggaaacgagctgtacattgataccgcccggattaagaacggttcgatccagaacgccaagattggcgatattcagtcaaacaactacgttgggggcagtgagggctggcgaatcactaaatcgggagccagcgaatttaataatgttgtcgtgcgtggggaagttcatgcaaacagcggaaagttcacgggtcatattgaagcaaccagtggtacgttcaagggcaagctggaggcgcaggaatttatcggggatattgctattgcccgtcgctacgatgatatggcatttcgtcgtaacaacagggtgcgccgtaatatttactatcagaatcgtggttatggaatgaccgttgttctttgctgtacgttgctaatggagtcgccgggtattgatagaaaatatggctacacggtggatgttgtgtttaatgtaggagggcagcaggtcactcgaaaataccaaatgatgggtgataacggatttacagggaccattgcacaggaatttcgatttgcagctaacctcaacgcggacaataacaaagtgagttgctttgttgaggcccatggaaatgacgccaattttgactatagctgcagggtggagaacatcacagcaatggcattccggaccagtagtagcagcttcagctaa

SEQ ID NO: 184146 - DNA, 600 bp, Klebsiella oxytoca
atgcaagaaaccatgacacgaatagagctttctggcgttttgggaaaaacctttggcaggctccactatcgtttaattagcacaattcatgaagcaagcgtggcgctagcagcgaccattcctgggttcgaaaaattcatgattaacagtaaggaacagggactgacttttgcagttttcaggggcaaaaagaatattggtaaggatgatttgggatttcctgctacaggagaagtcatccgcatcgttcctatagttattggtagtaaaaaggccgggattcttcaaacgattcttggcgcagtgctggtcgttgtgggcgcagtaatgacgtatgtttcgggcgggacggcttctccactggctgcaagccttatgaccagcggcgcagccatgatgctgggcggcgtcgtccagatgctttcccctcagcccggaggtctagcccgcagagaatcccctgagaataaagccagctatgcctttggcggtgtaacaaataccgcctcacagggttatcccgttggtttgctttatggtcagcggcgaattggcggcgcgattatttccgccggaatttatgtcgaagaccagcaatag

SEQ ID NO: 184147 - DNA, 756 bp, Klebsiella oxytoca
atgagtctgaatgcaaattaccagaaactggagccgggtgatgaaattcggttgttcgaaatagacggccgcgcttttaatatgggcgaggtcttgtatttccacggttataacgttccacattcagcagaggaaatcatcgccgccggtggggatgaagcagcattacccgcgaaaagtatctggtggcagggtatcgaatataaagcctggccgtgcgagctggaagggattgaatccagcacttcggggagtgatgcgcaaccgacgctgcgtgtaggcaatatcgacgggtcaattacagcgctatgtctgtattacgacgacatggcgcaggcgcgggtcacgatacacgagacccaaaagcagtatctcgatgcgcaaaacttcccggagggaaacgcgtccgcagatcccacgcaggaaaagcgtcggctgtattttatcgatgccaaaaatcttgaaaccgacgaagaggtggagttcaccctatcaagcccgctggacctgcaggggctaatgattcctacccggcaataccactcgatttgcacctggtgtattcgcaaccagtaccgcagcggcgatggttgtgattatgccgggacaaaatatttcgataagaacaacaaaccggtcgatgacccttcgaaggacgtctgcaatgggacgctctcggcgtgcaaattgcgctttggtgaaaacaacgagctaccgttcgggggattccctggcacgtcgttgataaggagctga

SEQ ID NO: 184148 - DNA, 339 bp, Klebsiella oxytoca
atggccatcgagatattcacctggagtccccgggtaaaccctgcgcaaaccgtgaagtttcgcaccagaaaggcggaatttggtgacgggtatacgcaggtttcaggggacggattaaatacccggtcacaagaatgggagttgagttttgtcggtactgaggagtatatccgaccgataaaacagttcctggaccggcatgcaggtacaaagtcgtttcagtggactccgccgcttgaagatgcggggctattccgttgtgaacaatataagcccgtgccgatgggcggcgggaattattcactttcagccacttttattcagggatttaaaccatga

SEQ ID NO: 184149 - DNA, 345 bp, Klebsiella oxytoca
atgaaagatgacgttaaatcccgccttctggcccctgacagtgatgcagttcctgtccaattgtttggcagcgaattccatatcaggcgtcttaccgcctttgagatgtcagagtttgaagataaagcatcacagctgaccggtcccgataatacgcgagggctgatgctggaagctgcagggctggtcctgagcgctctggtcgacgaaaatggccttcccctgcagaacctgccttctccgctggaactgatgaaatcacgctcctatgcatcgataaccgaggcgatgagcaaggtccagcgttttagctacggtacgctggaggaagcacaaaaaaactaa

SEQ ID NO: 184150 - DNA, 459 bp, Klebsiella oxytoca
atggctgataagagttcgcctgaatatgcgatgttgcctgccggcaccatcgtaaaatacggggaacccggcgctgcagcatcggctctgaagccgctggttaactgtaaagcgctgggcgcaatggggcagactggaggttttgtcgactgcactacgctgcttgataagcagaaacaatccatcagtgatctgcctgacgggcctgaaaagtcgctgggttttattgatgatccgagcaatacggattttgccgctctgcttaacgcagcggaagcccgagaaactatccagctgtatgttgaactaccgaacaagcggacggcgacgatgttgctggcgctgtccggctggcagatgaacgaaatcaccgctccggcgagtgaggtcattcagatcaccgtgcagggaaagcagaacaaaatcacctggggcactgccaacagcagcggggcataa

SEQ ID NO: 184151 - DNA, 405 bp, Klebsiella oxytoca
atgatccgaatggaagtgaaagggctggatgagctggaacggcagttaaccgctttgggggaaaaggtcgcgacgaaggtgttacgggatgccggtcgtgaggcgttaaaggttgtccaggaggatatgaagcagcatgctggctttgacaaggaaagtcccggccctcatatgcgcgacagtgtaaaaatcagctcaaggaagggatcagctaagtaccgcagtaccgttgtcacactccgggtcggaccgagtaaaaagcatcatatgaaagcacttgcgcaggagtttggcaccgttaaacaggtggctcaaccattcatccgaccggcgctggatcacaacgtccagaaggttctacgcatcctggcggtcgaaatccgcaacggcattcaaaacaggtag

SEQ ID NO: 184152 - DNA, 390 bp, Klebsiella oxytoca
atgatcgagttggcgattaaaaccgcgctggagcgcattaccggcatgaatgcttatccgcttttactgccggatacggtccaggaaggggtgacctttcagcgtatctctgacccggaaatgtactcgggaacattgcggacggggatcgtgtctgcccgtatccaggtgaatctgtaccgtgttgatgattacacctcattgctgcagctggataaaaaaatctggtcggaatggaagtcaatcgttcacggccggctggagggtatcccggttcagtatgtggagcgtggtggtatccaacaggataaaacgacgctgacgaaccgcagcatccagtaccgcctgattcgtgatttcatcattcactacgtggaggactcatcatga

SEQ ID NO: 184153 - DNA, 345 bp, Klebsiella oxytoca
atgggtagccttcatgctggcgagctcaataaacgcatcatcctgcaacgtcaggaaaaaagccgcggtcctcttggtgaaattatttccgggagtatcgctaatgttgccaccgttcgggcaaaagcggagctgaaatcaaaccggaaaataaggacgctggatcaacagcaagttgccgagacctggctgttcactctgcgaacccggcctgatgttcagattgactggcttataaggtggaatgatgcggttttcaccgtcgtctctgttgatcgcagccatcctgaccgggtggaaataaaagcagagagggatacgagacatgatcgagttggcgattaa

SEQ ID NO: 184154 - DNA, 336 bp, Klebsiella oxytoca
atgccagtgatccacactgaaatagcgatggagcatctgcgggtggatgacgaactggagaagacgatggttgagggctatctgtcagctgctgaagatgcggccatggagtttttagatcgtcgtttttatgcggatgagcaggcgcttgtagctgcagtagaagacggaagcgctggagaacgccccatggttatcagaccttctgtacagagtgccgtcttgctgatcctcggtgggctttatgcacatcgtggtgacgattctgctggtggtgcaataccaaagcaggcgcgctggttactggagcctttccgcacaggcatgggtgcctga

SEQ ID NO: 184155 - DNA, 255 bp, Klebsiella oxytoca
atgaaaacgactaagaaagcagtgagtgcggaagccatagtctcttcagaagcgacagcagaatcggcaccgggaatggtctcagtccagccccttcgccgttttatggatggcgatgtattccgtacaccacaggatgaggcatttaccgtttcacgtcagcgggctgcggatctgaaggcgaatgatctggtggctctggtgggggatgctccggataacaaaatgagcccacaacctgatacgaaggggtaa

SEQ ID NO: 184156 - DNA, 1215 bp, Klebsiella oxytoca
atgtatcagaaaaaatcggctgaagaccagccgcaaaccatcggcgaaatttcggctcagctctctgccgttatggaccaggtcaaaaattttggcgaagacgtgaagcgaaaaatggagacgggcgagacggtctctcaggagcttaagcaacgaacagatgaaagtctcagtcagctcagcgagctgaaagagcgcctgaccgaactggagcaaaaaggtgcccgccgccaggacgataccccgacgcaaaggaaatcactcggtcagttggtggttgaaagcgaagagtataaaggtatggacagctcggcccgcaaaagtattcgtgtgaagctggagcagaaagacatcatgaacgtgccggcaacaaccggaacgggtgtcagtgcaactaacagcctggtcgtctctgatcgtgttcagggcattattgccccgccggaacgcactctaaccattcgtaatctgcttatcccgggcaataccgcatccaacggtattgaatttgttcaggagacggggtttacgaataatgcagacactgttccggaaggtgccctgaaacccaaatctgacatcaggtttgacctgaaaaatgcaccagttcgcaccatcgcccaccacttcaaagcatcgcgtcagatcctggacgacgcccccgggctggccagctatatcgatgggcgtgcgcaatatggccttcgctttaaagaagagttgcagcttctgagtggtgatggtaccggcgcgaatattctcggtattttgccgcaggcaagtgaatttgcgcctgcactcactttgtccaatgccacgccgattgatcgtctgcgtctggctgttttgcaggccgttctggcggaatatccggcgtctggttttgtgctgaacccgattgactgggctggcattgaactgaccaaagataacgaaggtcgttacattattgctcagccggtcaatggcggtgttccacgtatctggggtctccctgttgtggaaacgcaggccatggtgcagaacaacttcctgacgggggccttcaatatgggggcgcaaatctttgaccgtatggatatcgaagttctgctatccaccgagaacgaagacgactttgttaaaaacatggtcaccatccgtgcggaagagcgtctggcactggctgtgtatcgcccggaggcgtttgtcaccggtactgtgacagcgccataa

SEQ ID NO: 184157 - DNA, 708 bp, Klebsiella oxytoca
atgtaccggaaaaacgcagccatgaaagtaaaggcattcgattttgatattaaggccgtcagcgatgatggccttttttctgggtacggttccgtcttcgatgtggtggacagctacaacgaagtggttgcaccgggcgctttccttgaaagtattgaggaaacccgggcaaagggccgaacctttccggtgctctggcagcaccggacaggtgagccgatagggaactgggatatctcgaccctgaaagaagacaagcatggtctgtttggcgaaggggcactgtggcttgatgacgcagcttacgcaaaaaccgcctggcggggcatgaaaacccgggcaattactggcctttccattggctattacgtccgggagtcaaattacgatgagaaaacccggatccgcacattaacaaggctcgatctggtcgaaatttccatcgtcactgtaccagccaacgatgacgcccgcattgacgtcattaagtcgaagttgtcccacggcgatcttccttcactacctgaatttgaggggctcctgcgtgaggcaggcttctctaaaacgcagtccacggcgatcgcctgtcgcggcctgtcatacctgcttgaccggagtgagtccgggggcgaagacggcgaaaccaaatcggctattgcggcgatgagccagcaactgtgtcagttttctctccctaaaattttctaa

SEQ ID NO: 184158 - DNA, 1320 bp, Klebsiella oxytoca
atgaataaagagaagaaacccggtcggataaaaagtgccgtccgccggtggctcggtatgccgatatcactgacggacggagaattctggtcagcctgggctggcggtgaatcggcggcgggcaaaaccgtcaccgttgataaggcgcttcagctgtctgctgtctggtcatgtgtcaggctgttatcggaaaccatcgccacgctgccggttggcttttatgaaaaaacatccgacgggcgtcagagtgcaaatgaacatccgctctatgagcttctgcataatcagcccaatgctgatatgacggcggtggaattctgggaaatgataatggccagcctgttgttgtggggaaatgcttatgccgagattgaccgtaccggaaagcgtattacggcgctggtaccactacggcctgagcgtatgaaggtggaacgaagtcgcgagggtgagcccatctatacctatcgggatggagcaggcggcggaacccggaatattaaagaacagaacatgatgcatatccgcgcattcagtacgaatggcgtgatgggtctctcgccagtgagttatgcccgccagaccctggggatggcaatggcaacggatgaagccagcgcgaaggtatttaaaaacggtatgcgcccaagcggcatcctttctatggagcaagtccttaagaaagagcaaagaaacgaggtgcgggacagcctgactgaacaattcgctggatcgatgaataccgggaaaatgatggtgctggaagctggaatgaagtttcttcctgtggctatgaatccggaggatgcccagatgctccagacccgggcttttaatattgaggatatctgccgttggttcagggtctggccggggctgattggtcataacgcccaggggcagacgatgtgggggagtggggtggagcagatgttgattggctttctgactttctctcttcgcccctggttgacccgcatcgagcaggccatccgtaaaaatcttctggcgccaggtgaacgcaatcggtacttcgctgagttctcaattgaagggctgcttcgtgcggacagtgccgctcgtgctgcgttttattcaacgatgactcagaacgggctgatgtcccgtaatgaagcccgacagaaagaaaatctgccacccagacctggtgccgatcaacttaccgttcaatccaacctgctgccaatagatctgctggggaaatctggcgacggtgaatctgccaaaaacgcactgcgggaatggcttggcattaaatcagaggagacgccggaatgtaccggaaaaacgcagccatga

SEQ ID NO: 184159 - DNA, 1737 bp, Klebsiella oxytoca
atggcgaaacccccgaagaggacacgctcgacaagttcttcggttgatccggccacgcagtacgcgctggacgtgacctccggaaaagagttggcggggccggacattcgtaatgcctgcaagcgtcatcttaaggatctggattcctgccatgcgcgtgggctcagttgggacgctgaggcggcactgcgttcaattgattattttgccaaagtgttgaagcttaatggtggtgattttgaaggtgccccttttgttcttcttccctggcagtgcttcattgttggctccatttttggctggaaaaattcgaaaggatatcgacgctttcgcatggtttatgtggagtccgggaaaggttccggcaaatcaccgctttctgcagggatcggtctttactgcctgacagcggataaagagccgcgtgctgaagtttatgccgcggcgacgaagaaggaccaggcgatggttcttttccgtgatgcggtagcgatggtcgatcaatcgccggcgctttccgcgcgcatccagaaatcaggcggtgcgggaaaagagtggaatctggcatttctgcaggcaggctccttctttcgtccaatcagttctgatgatggtcagtcgggacctcgtccccactgtgcgctcattgatgaggtccatgagcacaaaagtaaccaggtcgtggaaatgatgcgagccggtactaaggggcgtcggcaggctcttattttcatgataaccaacagcggccacgataaaaccagcgtctgctttgactaccatgagtacgggcgaaaggtcgctgaaggctcgattgaagatgatagcttcttctcctttatctgttctctggatgagggagatgatcctttcaaggatgaaacctgctggaaaaaagctaacccatcgttgggacatacctttgacgaaaactatcttcgggagcaggtcactcaggcccggggcatgccatcgaaagagagcattgttcgccggcttaatttttgccagtgggtcgatgccgataatccatggatgagcagcgacgtctggatgggatgcgaagaagctttcgacattgacgaactggaaggtgaggagtgttacggcggtctggacctttctggttctcgtgatttgaccgcgctggcgctatttttccctaagcagcggaaactgctggtggagttctggacaccaaaagagacgttgctcgatcgggcaaaaaccgaccgggtaccttatgacgcctgggctcgtgatggccatattcacaccacgccgggaaaggcagtgaaatatggttttgtcgctcaacgaatagccgatctttcacagcaatttcacatcattgcgattgcctttgaccagtaccgtattaagtaccttgaacctgagctggaggaggcatcagtttctgtcccgcttattcctcacgcgcagggctattacaaggcaaaagactccgggttgtggatgccacattccattgaactcttcgaggagttgcttgatgacagcatcgtcattatcaaaaccaacccctgtctgcgctggaacgctgcttcagcggtgactgaggcagaccagaaagaaaatcgcatttttgccaagaagaagagtacgggccgtatcgatggtgtggtagccagcgctatggcgatcggcgctgctgaaggttacgaggacgactctggcgatatcgatgattttttcagtaatccaatcatagtgtga

SEQ ID NO: 184160 - DNA, 465 bp, Klebsiella oxytoca
atggccggacgacgcccgaaaccgacacacctcaaagtggttaccggcaatccgggcaaacgaaaactcaacgataaggaacccacgccagcgaaagaaatcccgagtcctccggcccatcttactgactggggaaaagtagcctggggacggttgactgttcttcttgacgggatgggggttctcaccgtcgcggatacgctggcgcttgaacgtctctgcgatatctatgccgacatcctgcaactgcgtgacacgattgcggtggaaggcagaacctataccgtccagaccgatggcggttttttgattaaggctaatccggcggtttcaatgctggctgatgccgaccgtcgttttaaaagctacctggtagaattcggtctgacgccggcggcaaggacgaaggtgaaagttaatggcgaaacccccgaagaggacacgctcgacaagttcttcggttga

SEQ ID NO: 184161 - DNA, 342 bp, Klebsiella oxytoca
atgaataataggccccgtatatataacaacaaatgggataaggcgcgtttgtcattcctgcgtaagcatccgctgtgtgtgatgtgtcatgaacagggcagaacaactgccgctacagtcgttgaccacattattcctcacaagcttaaagatgcgctgatttcttgcgacctaaggttaatcgctgtagctcaaaagcttttctgggacagaaaaaactggcagggactctgcaaatctcatcatgactcaacgaaacagcgaatggagaagcgtggcaccgtcattggttgcgatgaaagcggtgtgccgcttgatccgaattcccactggttcaaatga

SEQ ID NO: 184162 - DNA, 435 bp, Klebsiella oxytoca
atgttcagtcgtgatgatttaactatttcaatgtactacgcatcatccactgatgctgaatcaggtaacaagctggccacaatgactatcgaagtgcgcgatacaactccgattgctgatctggccctgatgacacagctgcagtgtgtgaccgataaggcgaaaaagaaaacttactcggtaggcaagcaaagtatcgccaacggttccgatcctcttctggtggccattgaaggccactggcggactggtacggaggcgctggtcaaagagctgattgcagaggtgatggatttcatcgccggcagcgtaggacaggaaagtacctgggttggacagtacgggcttaaggtatttgagaatgcaccgttggcagaacgtctcccggagaatgtgctgcgggcggatggtattgcggagtcaacggcatcctga

SEQ ID NO: 184163 - DNA, 297 bp, Klebsiella oxytoca
atgaagaatttaaaaattgaatacgttgatggccaactcgttaccgttgatgttgaggggatttcgatgctcaatgcaggactatcgggcctgaacttcagccattttctggggaaagaaccgcatctcaagtttgaggtaggtggtgaaattcccgagggactggttcccgttcaaccgcaaccgcaagagccacagcaagcgcaagcgttcgaaggcgagcacctgccagccgaaagcgcaccgcgccatcagcgtaaccgcaataaaaatcgcaaccgtaaccggagccattaa

SEQ ID NO: 184164 - DNA, 168 bp, Klebsiella oxytoca
atgagcctaacattggacgggcgccttttttctcaagaatttcatgcaacacctttagttgataatgggcgtcatttcaaagcaattcttggaatggagtttctgcaacactgcacattcacgcttgactacaaaaataataaatttgagttattatttaacagttaa

SEQ ID NO: 184165 - DNA, 186 bp, Klebsiella oxytoca
atgaccttaatccagcacattaaaatgcagggagatgcgatatgtaacaaggaggcagaaattatagctcttaggatggttaatattcaggggcagcggcaagtaccatgtgataacaagccgcagttgggggaagggagctcggaaactagagttgtatttctgccagtatggcttaactgttaa

SEQ ID NO: 184166 - DNA, 261 bp, Klebsiella oxytoca
atgaatacgttaactggcttcatagtttttttaattatcgctctggtatttggatacttatgccatattacggcggagcgaaaactttcaaaggcaagggctgagctcaaagcggcggaggaaagggggaaaccatactcagaagaagttgttagttatatgatgggacagccaggtataattgcaatcttctttgcattcatcagtttcctttcatttattgcgtcaatgttcaatctggtctactggtttttcccataa

SEQ ID NO: 184167 - DNA, 276 bp, Klebsiella oxytoca
atgggcattgaaatgattattggtctggcaactgcgttgctggccgttatcgctggcgcatttgggttaggccatgcccgcgggaattgcaaggcggaaaccaaagccgaacagcagcgaaccgaagataatgccgctgcccgcgtcgccgtggcggaacggaaagaagaagccaccagagaggccagcaatgtacagcagactgttagccatatgcctgatgacgatgttgatcgcgagttgcgcgaaagatttacccgccccagtggtggttga

SEQ ID NO: 184168 - DNA, 630 bp, Klebsiella oxytoca
atgaacaaatcacaattccagaaggcggccggcatcagcgccgggttagctgcgcgttggtttccgcatattgatgctgtgatgaaagaattcggcatcacaactccactcgaccagtcgatgtttattgcccagatgggacacgagtccggaggctttacccgactggtggaaaatctgaactatgcagcagatagccttgtgcctacgttcggtaaacaccgtatcaccgctcagcaggccgccgcactcggcagaacggcaacacaaccagctaatcagcgagcaatcgcgaatctggtgtatgggggcgagtggggcaaaaagaatctcggtaatcaggttgctggtgatggctggaaatatcgaggtcgaggcctgaaacaagttacgggcttgagcaactatcgcagttgcggacaggcgctgaagcttgaccttgttacccagcctgagctgctggagcgagatggttacgcagcacgttcggccgcatggttttatgtctcccacggttgcctgcttcattccggtgatgttgagcgcgtaaccctgcttattaacggtggccgcaacggtctggataaacgccgtgcgctctttaacctggctaaatcagtactggtgtga

SEQ ID NO: 184169 - DNA, 315 bp, Klebsiella oxytoca
gtgagaaacgtaaaagtaaaatgctctcaaggcggaatgccaatatataacgcgatggaaaagatttccgataagatcaggagtcaataccccgatgtgactggtagaccgacttacatcaatgcaaacgaaaaggttgagttccactatacttcgcttgacgggaagactgatttaaatcatttggcaaatctcttaacagaagagctatccaaggacagtctaattgttgaaagtggcgtcaaagttatccgtgacgataaacacccgtcagcttacggccatggtgtgattgtcgtatcattggtgaaataa

SEQ ID NO: 184170 - DNA, 756 bp, Klebsiella oxytoca
atgatgcccggtgcagtaccatgcggaataacgtctgagaccctgacgattaccgatgtcatggccgcgttaggcctggcaacatcaaaatcagcgataggtatcgagctttaccttgcaaaagccggtgttctggaacctgacaacataattgccttcattggcgaactcgccattcaacgcgccggcaggaaccgacccctgcaggcgatggaggaacagcagcgcacggagttcttgcgtgtaatggctggttacgtgttccgggattattcgcttagcgctgccagtctggtcacatgtagcagttgcgctggatctggttttattgacgccgaggtgttcaccaacaaagtgtcttatccggacggaaagcctccgaaatgggtaaaagtaactaaggggatctcgccatcggactgggaagaagttaaggccgttcgtgagcaagtaaaagtgatatgcaaagcgtgtaatgggaaagggcgactcaaaaacgaatgtcggtgccggggccgcggagaggtactggataagaaaaaatcagagcttcagggacttccggtttttaagcaatgcccccgctgcactggccgcggctatcccagattaaaagacacggaggtattcaaggctctaggtgtgaccgaaactacctggcgaagaaacttcaaattgttctttgagcgtctggtggagtattgccacgtcgaggaatccttcgcagaaaagatgcttgagaaggtaacgagatga

SEQ ID NO: 184171 - DNA, 477 bp, Klebsiella oxytoca
atgccaccgggaacgacccgcgatagcggacgatgttcaaccgtaaccagcgctggcggatacattcagttgtcttcatgttcatgcttttaccagcccttcttttttccatatggccagtgttctgagcacaccttctgcatgcatcaggcgcagttcgtcataggtgtaatcggttgttttcttccggccgtcgatcaagtcgtggcaacagttgcaggcgatagccgcctgagtatcgtcaggcttgtatcctgtgccgcaggtgccagcgagccggtaatgtgccagcacactggtttccgggttgccgttgcagtacccgggaatccggatggtgcattcgcgaccacgcgccgctttgcaaaggttagccataatcacctccacatccggttgcgccaccgagaatcagggcgtggtgggttcttttcctccaccagttgcgcactgacggtccaggtgattaagtcctga

SEQ ID NO: 184172 - DNA, 207 bp, Klebsiella oxytoca
atgcttatgaaatattcatggtttcaccatagcgactgcaccacgcagcaggctgaagagctgatggcgaaatatcgccagcggggtgtgagggttgagcgcagcctgaatcaggacttaatcacctggaccgtcagtgcgcaactggtggaggaaaagaacccaccacgccctgattctcggtggcgcaaccggatgtggaggtga

SEQ ID NO: 184173 - DNA, 600 bp, Klebsiella oxytoca
atggcgcaacaattacacctgataaaacagtctcaaggtatcctgatccctgccacgcaggagaccagcgattttctgcaatcaaaatgtaagctcggtgccgttcttgaagccgactataagcttgtccgcaacccggcgtttcatcgtcgttactttgctttactcaaccttggctttgaatactgggagccgaccggcggtgcgatctcgtctaatgagcgcaggctggtttgtggctatgcgaaattcctggctgcatacggaggtaatgagtcggcattgcttaatgctgccgagcaatacctcgaccgcatagctgagaagcgtgccggcagcatcagtatttgtaaatccttcgacgcttaccgggcatgggtcattgtcgaagctggacactatgacgccatacagctgccggacggcacgctaaaaaaacaccctcgcagcatttctttcgccagcatggacgaatgcgaatttcatgaactgtataaagcatcgctggatgttctctggcggtggatcctttcgcgttcgttcaaaagccagcaggaagtagagaacgccgcaaaccagcttttgagctttgcggggtga

SEQ ID NO: 184174 - DNA, 234 bp, Klebsiella oxytoca
atgagaatcgaagtaaccatcgacaaagctaaaaaactgcctaccggtgctgaaccagcgttagaggccgaattcctgcggcgattaaatcaaaaatatgatgactgcaaattatctattcgtcgcgctggtgctgatgggctcagtgttttcggcggcatagatggcgataaagaaactattgcagaaattctccaggaaacatgggaaagcgccgacgactggttttattga

SEQ ID NO: 184175 - DNA, 294 bp, Klebsiella oxytoca
atggctaatgattcacgaggaaatgaagtgatcttcaatcgtgcatatctaaacttatgctttaaaaacaagaaattaagcccgttggttatagtggggaaaattaaagaacacaatattgttgaatgtttttcttttggtcttaagggtacgatagatattgagtcaaagtgtttgtttttgcgctataagtatccatggccagattttgaaattgaactggttaaaaataaaggcggtgattacgagttcatgctttttcataatgattttcttaaaggtagtaaggtttaa

SEQ ID NO: 184176 - DNA, 579 bp, Klebsiella oxytoca
atgattaatgaacgcttgacgcacgaagagttagagcttctttaccaggcaatgaaaacacactctgaagttttggctgaatccgcttcagaggcagaggttattgaatgctgccagatagtaagagcgctgcgagagctacaggagcgccgcaaggccgacttcgagcaggtggcgttcacagatgaacgaaaccttcatcatattgctatgggccgagaaacctctctgatttggggtaagcagaactcagaggcgggagatgttccgctctatcgccacgcgcagccagcgccggtagtgcagatggtcgctgaggaatcgcgctgcggcaccaaagccacgtcagccctggattcattgccaaaaaacgccgagtcgcgcagcggcaactctctggctaacgataccaacgttgttaaacggttgaccattactctgcctgatacgagctcaaaagcattctggagcggtaccggaaaaacggaaacattccatccggtgacttatcgcctatgggtgaaagaagccatagagcgatactgcgccatcgctcggattgatgtggaggtgaagtag

SEQ ID NO: 184177 - DNA, 267 bp, Klebsiella oxytoca
atggctaacaaatcacgtgaacaaaaacaggcctgcgtccaggtgattatcgagctaacccgcaagaaagggcgcctgacggtgaaagaagcttgtgcagaactaggcatgtgccgggataccgcaggtcgatatttccaggcagcagtcagaaccggaaaggtcatccgctacgggcggcttggattgttccgggaccagcgggcgaccatagattttgaccttcagagattcagtcgtcggaaggatacgggagcatgcaaatga

SEQ ID NO: 184178 - DNA, 261 bp, Klebsiella oxytoca
atggggtggggtgattacgttcgtaaccaggttgaaaaaatacttctgagcgaggggttttctgttccggtggctcaggggggggcaaggcatgcggaggacttatacaaccgaatgtcacaggcaactaaaaaaggggcgattttcgatgatgctctcaggcatggccgcttatgggcggagaagcagaccagcgcgactgaacgccgtgcagctaaacgtgcggtgcgaaaaggtagcaaacaggctgggttgttctga

SEQ ID NO: 184179 - DNA, 231 bp, Klebsiella oxytoca
atgaacaaagagacgcaacaaaaaatcagtatggcagcatctcgtgcctgtatcggaaagcactttggcatcagcggtcaggctgttggtaagtggatttacgagaatggcgtgcctcaaaaacgcatcgtcccgctatgccgttttcttaactgggaagtaacgcctcatgaaattgatcctgaggcgtacccaaacccaactgacggcctgccgaaacaggaaggctga

SEQ ID NO: 184180 - DNA, 135 bp, Klebsiella oxytoca
atgatactctcgctctttaaccaacttcctgagtccgagaagttgcgtcttatccttcacaccaaaggtgttcttcacgatattgaattgcttaagaacgacgtttacgacctcataaacaatcaaaaaaaatag

SEQ ID NO: 184181 - DNA, 663 bp, Klebsiella oxytoca
atggtgtgcgccattctcgacggtaggaagaagcagacgcggcgcccggtaaagtttccagttttagataaaaaccttgggtgcgagttgtctggcaatgaactggccggggagctgtcggcaggcaactatctgaacagcgcatttggtaaaccaagcgatcgagtttgggtgcgcgagacgtggggagtcgtcagtcacgaacttgatgaggatggtcgaatccaaccatggacgccaaaccgaccggctacagccattcacgaaatgccgtttggcaatggctattactctggccacgccatttatgcagctgatggtgattttacctggggtgatgacgatggttatgaagatggacgttcgtgctggaagccatccattcatatgccgaaagcagcaagccgcattctactggaaatcaccgacgtgcgcgttgagcgtcttaactcaatacacgatgtcgatgctatgcgagaaggaatacagaatctgacgacatgttcacacgctgatttcggcattcctggcgtcgtaaatgcgcagcatcctgtacgagcgtttcaactgctatgggaatcaatctacggcactgaaagctggaaggcgaatccatgggtttgggttatcgagttcaagcgcgttgaaggcggtgcagcatga

SEQ ID NO: 184182 - DNA, 228 bp, Klebsiella oxytoca
atgagcgcggaaatcatcgatcaggccaacgagctggcagatcgcaggctggagctgaccatccagaacatgcggatcaaccatgcggcggtttcggctactcactgctctgattgcggggaagagataccagaaaagcgccgggaagcggttgcgggttgtcagcgctgcgctgattgccaagaagaagaggaattgcgcggtaagcaccagaaggggtacaagtag

SEQ ID NO: 184183 - DNA, 243 bp, Klebsiella oxytoca
atgcagaacacaaacatcactattcagccggccatcattaaccgtgaaacggtgcaggccatgctgggaggaatttcacggaccactttctggaggaagcgccgcgactgggagcagagcggaacccccttccctgcaccagccccaggcacgaacccggggaaaggtggagagcagtatcgctattgtgacgtaatgcgcttctttgcctctcaggggctcgttgagtccacgcatgattga

SEQ ID NO: 184184 - DNA, 1194 bp, Klebsiella oxytoca
atgcttactgatgccaaattacgcaagatgaatggcaagccgatcccgaaacggattgagctttcagacgccaatgggttgtctgttcgtgtaacccctaacggcgtcattgttttccagtaccggtataaaattgacggccgcccccggagaatgaccatcggtcagtatgaccaggtttcattgaaagaggccagagaacaggtatctgaattccgcaaactggtcgctgtgggtaaagacccgataaccgcgcgcgatatggccgttgaagcgaacattaaagccgccactgtagaggactgcataaaggcctggctgggaagtgcatcagcaagcagattggttaagcgcgatcagtgggagagggctttatatcgccatgtggtgccctatgtcgggagtatgcttgtcgatgagatggctatttctcactggcagccagtgtttaagcgaatgagagataacgacgccgagacatatgccggagaagtcctttcacgcatgaaaacgattttctcatactgcatccgaattgaactgataaagagaaacccggtcaccgacctgcgtgttattgatgttggcaaaccggcaaagaaaggtaagcgcaatctcagcgacaaagaaataggcgcgttctggcatgcggttgaggcgtcaactattactcatcagaacaaactgcttcttaagttacttctgctaaccggctgccgcggcgtagagctcagactggcgaaaaaggcggattttgatttagatgcaagggtgtggcgcgtgcctgatgaacactccaaaaccagggagccattcgagcgagggttatcagtgaaggcggtagaaattctgcgggaggcattttccctgtatgaggatttcagtcaggtattcccgccagcagctaagaaagaagaccgaccgatggcggcaagcgtgatcctaaatcttgccattcagcttcgtgaagatatgaccatcgatcactggtcgatacatgacttacgtcgcactgctaaaaccaaaatggcagagcttggcgttatgccacacgtatctgaaaaagtgcttggccataaacttagtggcgtccttgccatttatgaccagcacagttatctgcgtgaacagcaagaagcgctcgatctccttgctgcccatattcaatcatgcgtggactcaacgagcccctga

SEQ ID NO: 184185 - DNA, 852 bp, Klebsiella oxytoca
gtgataaaaaagtcatataacctttgggatttaaggctagttgtgaaaaaaatcagtccttccgatgtgaaatatataaaactaggccccggtggaaaatgggaagccgaatgtattgatactggtatcataaaatttggctaccacgagacaccaaatcaactctgtatagatggtaaatgggctgaggttcatgaaatatggaaaatcatcaggggaagtaaaacgggtacagctactagtgaccttaaccagataaaagtgttttatactgctcaggaagatactgtctttatcaccttctacggtggttttctttattggtgcagaccaacaggcgacgtcactgttcttcaggatggcagcagaattcgtcagactattgatggatggcacaatcgtagcatcaacgggacaattttcactattagttcaataaatggtgagttgaatgcaacccatggattcagaggcactatctgtaatgttaaaaaagccgaatatgttatccgaaaaattaatgatgaatattcgcctgaaattattgagtttgatctcgccgaaactagctatctgaattcaattcgtcaactttgtaagctattgacatggcaagacttcgagttgctagtagaccttatattttctcaaagtggatggcgacgagtcggtagtctgggcaaaacgcaaaaaacgattgaccttgtattggaactaccgacaactcgcgaaaatgcattggttcaagttaagtccatagcagacaatgctacgttggatgaatatgtaaaaagattccatgaatgtgatgcctacgacagaatttttttgtctggcatagtggtccgctga

SEQ ID NO: 184186 - DNA, 1287 bp, Klebsiella oxytoca
atgtccgctcaacaatttgaaaaattagtcaatttatatcgtgggctcggtagacctgccatgactgattctcaatttgttttcaagggaaaacttagcgataaccttacgcagctaaaagagctatgggatgaacataatccaatgctctcagattttgaaatattatttagtgatttaaatgccgggacttatttcggtgatatcttccccatcaatattgatcatgatacagatgtaacactgaaggtctctttaccgggtggggattttcaatttgtagattcacttgatgtctttttatcatttgataacaaattaaacatggggttagatgtcgagaatgtatatcttgttcaagaagattatatttttggagaaaatactgacaacctaacaattaaaaatacattaatactttctcattttataaatgaactcagcaaattagcaaactatattgatcgaattgatgacaatggccgccttaagattgtatttattgataccggaagttctaaaaaaacacctccaattgtatttgagccaaagatatcgatagataatgcttcttaccctgccgtagatttatcagtctttaataatatcaataatcatgagaatgataatgctcatgttcaagaaaaacaatcaatgtttagagtttcagtaatcgaagtgctacgagaagtagatggggaggaagacaattttaataaattaattaaacattgggagctcctgaaagagacatattacggtaattttgaatgctatttgacgaacttttcatttctgaaacaaaaaaaagaagctgccgaaaattacatgtcagtatcaagtaaaatatcaaatactctatcctctatttcagggaaacttttcggccttcccatttccataggtgttgctcttgctatattaaaatcatcagaaaaatttgaaagtattctcacattaattggtgtcgcaatcacatcactgttaatattatttaccattcaagatcagagaaaggtcctttattctataagggcgtccatagatgctttgtttagccatacaaaatcggctaaatctggtgaactgtcagaacttatagcctcccataaaagagatcttttttctcaggctgataaacttaactcagttatggttatctttttaattttatcagtcacaccattcatcctctcattattagtttatttatcgaaatttgaaccaaccattgttattaaattcgatgagtatatatcaatattcatgaagcaattactatcttaa

SEQ ID NO: 184187 - DNA, 1086 bp, Klebsiella oxytoca
atggcatttcagttaaggcattgtgttatacacgaactagtaaaagaaagtggaaaacagcgcgttgaggctattattaagcaggttctacctacagatgacaaatatgtgcaggaattagtaaaatctctgaatgacttaattggaaaaaaagaaaaccaagcagcaagaggtacttttgacattgaggatcctacttacagggtacctaatgctttccaagactattacagcggtaaggcagagcctgattcatttcatacattttcaactgtgtgtatgaacgagcttactcggcaagcaaaagacccttcgagagttgccgcatccggtggagcaatagtatttgctcattacacaagtggcacctcaaacttcatgcttattacaatggttaagcaaaaggaagctttacggctagatgaaaatttaaagcccgtcgggatcgttcaaatagatatggccaagatacatcaggctgcaagggtaaattttgatagatattatcaatatgaaacattaccggaagaagaaaaacctacgtatctcgctttcgtcagtcctaaaataaatcaagatgcttcggggtattttgtagcagccttaggatgttcagatagtgttccctctgctaaagccactgatggcgcacttaatggggttaaacaatacttcgaagcgaataaagaattaactgcgtataaaaatcaagcatatgatgctgtactcaattatttaacattaaaagaagatggtaaattagcatctcttaccgaaatcgaccatgcagttagaagtacagttcctgcagataagtatgaacatatggataactttataacctatcttaatagtgaggaaattggactaccgttagagttttctattaacagagctgtgctcggtagacgtgcgaaagtaaaagctaagtcaaatgggtgggagttaaactttgaaagacgattttttggtactgctccaggatcagtaatccagtataatcgtgcagataaaaaactgataatatcgaagctagacgaaaatatcatacaaaaattagaagctgttcttaaagagagagggtaa

SEQ ID NO: 184188 - DNA, 267 bp, Klebsiella oxytoca
atgtgcctttggctcgatttccctgccttattcatggatagtgattttctgctgcccaaatttaagtgccgttctgtctgcaccaaacagaatcacttccataccaaggtcgtcgcgatagaaatcgacacaagcctgccgagcgcgggtagtcagaacatgatggtcaagatgagaaatcatgatgataagcccattcatttattattgaagactgtctggatatcccaggtgtgcagaaaaatgcatctttactaccgaatgtga

SEQ ID NO: 184189 - DNA, 1224 bp, Klebsiella oxytoca
atgaataaaaattactctatgagctgcctgttcttcctgtttttctttatcggctggggctgctgctacccctatctttcgctgtggctgaccgaaaccatcggtatcagctataccgacgttggtctggtttattcgtttaccgccatcatcgcggtttgcgtgcagccgctgttcggttttatctccgacaagctggtctaccgtaaacacctgatgtggatgctggccatcatcatcacgctgtttgccccttggtggatctacgttttcgctccgctgctgaagtacaacgttattctcggcgcgctggcgggcggggtgtatatcgggatggcctacggcgcgggctgcggtatctgtgaagcttatattgataaagtcagccgcgcctccggcttcgagtttggccgcgcgcgcatgtttggcggtattggagcagccatcggcacttttgccgccggcaagctctacggtatcgatcagaacatgattttctggctggccagcgccgctggcgcctgcctgctgctgatagtctggaaaaccaaggtggatacctccggcacagccggtcaacagcaaatgaaaaccacccccgtcacctttcacgacgcggtggcgctgctgaagctgaaaaagttctggtttttctccatctatacgatcggtgtcggcgcggtctatgaaacctacgaccagcagtttgccatctactacagccacttctttgagagcaaagcgcgcggcgcggaagtcttcggctatctgaccaccgggcagatcttcctcgatgcggtagtcatgttcttcgccccgtggttcgtcaataaaatcggtccgaaaaacgccctgctgtactgcggcatgatcatgagcctgcgcatcatcggctcggcctgggcaattggcccggtttccatcagcctgatcaaactgctgcacggcttcgagagttcggtgctgctggtggccgcgctgaaatatatcgccgccaacttcaatccactgctttccgccaccgtttatctgattggcttccagttcgccaagagctttagctctattttcctctccaccggaattggccatatgtaccagagcatgggtttcaccaccagttacatcgtgctgggcggcatcgccctgtgcttcaccctgctctcctttatcacattggataaggcgcgatttttcgccctgcagaccgcaaccacacactaa

SEQ ID NO: 184190 - DNA, 2010 bp, Klebsiella oxytoca
atgtctgatttatattacggtgtcgcttattacgacgaatatatgccggaggatcgccttgcgcaggacatcgcgttgatgcgagagacaggcatcaacgtggtgcgcatcgcagaatctacctggagtacgctggagccgcaggaaggcgaatatcatttctaccacatcgaccgcgtgctgaacgccatgcaccaggcggggatcgcggtgattatcggtacgccgacctacgcggtaccggcatggttggtggcgaagcaccctgatattctggtgaccaccgccgaaggccagcaaaagtacggcccgcggcagattatggacatcgtgaaccccacttttcgccgctatgcagagaacattctccgcacattgatggcccatgtgcagaatcatccggcgattatcggctggcagttggataacgaaaccaagcactacgacaacgtcgggcgctatatgcaggaaggctttgtgcgcagcttgcaggaaaaatatcccagcctcgatcggttgaaccgcgacttcggcctcgactactggagcaaccgcgtcgacagctgggatgacttcccgccggtagaaaacaccatcaatgccagcctcgcctgcgcgttctcgcgctatcagcgccagcaggtcactgagtatctggcgtggcaggcagagatcgtgcgcgagtacgcgcaaccgcaccagttcgtcacccacaactttgatttcgaatggcgcggctattcgtttggcgtccagccgcgcgtggaccactttgctgcggccaaagcgctggatattgctggggtcgatatttatcaccccagccagaagcatttaaccggacgagaaattgccttcggcggcgccattacccgcgggctaaaaggcggcaataactacttcgtgctggaaacccaggcgcaaggctttgcccagtggacgccattcccctgccagttgcggctccaggcctttagccacgtggcgtcgggcgcggcgatggtctcgtactggcactggcactctatccacaattcatttgaaacctactggaaggggctgctgagccatgacttttcccgcaacgcgacctggcaggaagcgaccaccatcggcgctgatttcgcccgactgtcgcctcagctagcggggctgcgcgtggaaaacgacgtggcgctgctgattaacaatgaagccatggatgcgctcaatcagttccgccccggcgacgcgcagggcaacgtctataacgatattttccgccgcttccacgacgcgctgtatgaccacaatatcgcaatggatatcatcaacgacgtcaccgaggtgacgtcgcgctataaaacactaatcgtacccggcctgtacgccgccgatgatggtctgctcacgcggattaaccgctacgttgagcaaggaggacgggcgctgattggctttaagtcaggcttcagcgatgaaaatgtgaaggtgcgcagcagcgtgcagccgggtattctgcacagcgcatgtggcgtcacctacagtcagttcaccctgccggaggacgtgaccgttgccgcctgtacttcgaccctggactgccgcgaacacaacgccgccgagctgtggatggagctgctaacgcctgcgccgggcacccgcatgctgctgcgctatcagcatccggcctggagcgagtatgcggcggcgaccgaagcggactacggcaaaggccgggcgctgtacgttggcttcctgccgcacaaggcgctgattagccagctgtttgacaccctgaccgacgggctggaactccgttcgcgctcgtcagcctaccgctatccgttaattaccaggaccctgcgtaaccgcgacggcaaacgcattcacttcctgtttaactacagcggcgatagtcaagagatgctcgccgaaaccagcggcacagagctgttaagcggtagaacggtgacgctcggcgagccattgcgtctcaaaggctgggaatttagtatcattgaaagttaa

SEQ ID NO: 184191 - DNA, 873 bp, Klebsiella oxytoca
atggagttagatatcaatgcgtttttgcacttctcaccattgataaaaaccttcaccttcaacgcctgggtcgtcgctggctttacgcctattactcgcggttcaaagctcgactactacatcaaccgcccgcaggggatgaagggttatatcatcaacctgaccctgcgcggccaggcgcgcgcgaaggcgggagaaggggcgctgctgtttggcgaaaacgaactgctgctgtttccgcctggcgtgccacaccactacgggcgcgatgagcacagcgaacattgggaccacctgtggatctactttattccacgtccttactgggtcgactggctgaagtgggaccacactacccatagtattggcaaaaccacggtcaacgatccccagcagcaggaggcgctacgcgatcttttttatgaggttatccatcaccacaacgataccgccccgctcgccgaagcgctggcgatgaacgcgcttgagaggctcattttgagctgcttccagctacagccgatcagcaaccggcatgcccacgacccgcgcatcaacgccatctgtgattacctgaacgaaaatattgcccaagagatgaaaattgaggcgctggcagcgatggttttcctgtcgccttccagactggcgcacctgtttaagaatgagttagggcagaccatctacgcctggcgcgagatgcagcgggtgagtcgggcaaagtggctactgcagaccaccacgctgccgctgaataaagtagcgctgtcggtcggctatagcgacccggtctacttcacgaaggtgttccgcaaacacaacggcattccgccgggggagtaccgcaagcgctatgcggcgatgaagggctaa

SEQ ID NO: 184192 - DNA, 342 bp, Klebsiella oxytoca
atgggtgttgaattgcacataacgagagccgaattttgggcagataatgaggatgcgcagataaccgctgatgaatggcttaactacataaataacgataatgaattaagcagatatattataaacggcgattataacgccttgtggttagggcactctttgtacgaagaaccatggcttgactggagcgcaggtaatatttataccacatggcccgatacatacctgtacagaaaaatgttacggatcgcaagacaccttaatgcccaagtaatggatgatgatggtacgatttacagtgacgaatcgcagtgggagtatgatccgtcaactaacgcttaa

SEQ ID NO: 184193 - DNA, 165 bp, Klebsiella oxytoca
atggctgccataaaaccattcacacctttagacgaaaaatttccgtttgaccgccaactcggtattgcggccgcacctctcgtgctaatcaacttattacggtcatcgatcccgccgacaaagcgggctttctggacgctttccgggcggctgcagaagtcataa

SEQ ID NO: 184194 - DNA, 894 bp, Klebsiella oxytoca
atgaatgacgtcattatcatcggcggcagctttgcaggcctcgccgccgccctgcagcttggtcgtgcccgtcgcacggtcaccgttctcgataccggccttcagcgcaaccgcttcgctagccgctcgcacggtgtactcggccacgatgacaagccaccgtccgacatcctggctgcggcgcggcagcaactcgcacgctaccctgctatcaggatggttaatgcccgcgcggacagcatctccggtaccatcgacaatttctccatcctcactggcgatggtgaaaccctgagtgcgcgccgcctgatcctcagctatggcgttgttgaccagatgcctgatattcctggctttgctgaaggctgggggacaaccgtcatcccatgcccctattgcgacggcttcgaagttgctgaccagcactggggcctcgtctggtctggcccgcagtcgatgaatcaggtcaggctcttccatgactggaccgacaggttaacggtcttcagcaatggtcacgacatcccccccgacatacgggccgatctggcggcccgccaggtacctctcgttgatggccggatcaccgaaatcgcacgccacgggagccatagagccaccatcaggctcgataccggccccgatgtcgcagtcgatatcctgttcgcgcatccgcgtaccagtccgtccgcaagccttcatgatgcactgggcctcgccacgatcaatacgccaaccggcatcgccctcaggaccgacgagcgccgcgaaaccagcatgcccggtatctacgccgccggtgaccttgccaaccccggaataccctcggtcaccacggcaacatggcagggcgtgatggcaggtattttcgctcagcagtcgatgctcgtctga

SEQ ID NO: 184195 - DNA, 660 bp, Klebsiella oxytoca
gtgactaataaaaacagccagacccggcgaggccggcccgtcaacgaagcgcttggccagataatcatcgacgccgcgtccgaactctttgtggaattaggatttcaggcgacgacactggacaaaatcgcccagcgagcaaagatatccaaactcagcatctatcggcacttcgataacaaggaggcgctgttcagtgcggccatcgtggctggctgccatcagttgtttgcaccacaggcacttcttgaaggcgtcgatggttcggttgaagatcaactgatggcggtgggatcattactgcttcgcacgctgttgagatcagacgtcagtagtgtcgaagccatggtcatggctgataagacgaatcaaaagtcgctaagcaaactccattacgaagccggacccgctcatgtcatcgcccaaatcgaggtcctcctgcgtcagttgcacgcgaagcagcttctgaacgttccagatcctcttcagtccgctcgcttgtttgccgcgcttttcaaaggctccgaccttctgatgatcgcgcgctttgatgagaccagagcagaggatgacaacgaaatcgaatcttattgtcggtcagccgtcactatgttcatcgctgcgcacggtggcatcctgggtacgctatcgcggatgtga

SEQ ID NO: 184196 - DNA, 492 bp, Klebsiella oxytoca
atgatgacgcgaattggcattcttggaataaatgatctgactgaaatctttctgtctgaattattccgccttgaccctcacgcttatgtttttctttcatccggagatcatgagcgcgcaaacctgctggcaaggaagtttccctgctggattcaggatgatgttcaggcggtaattaacgaagcagataccattatcattacgacaggaacattttcctctaaaaacccgcaggaaaaactcgagtaccgaaaatcacaattagtcttttttttggaagcatggccatcaataagcagtcaggtaatttcaccccagacggataaaaaaataaactttacaaccagacacgtggcgttggctaacatttcaccattcattcatttaacagaagtgcagattgatgattatctttttattcttaaggtcctgttagtggcaatgaaacccgtgcatacgcttgatgtcaatttcagatcgtcatctgaatga

SEQ ID NO: 184197 - DNA, 1467 bp, Klebsiella oxytoca
atgttttccctaaatacacttgcactcattgtaggtgccctcactctggcaggctgtaccgttggaccagattaccatctccctgcgactccgcttggggagcgttatcaggctcaatcggccttacagcaacgcagcacttccctgcctgccagtttatctgtctggtgggagggtttcagagaccccctgttgagcaggctcatttcagatgcacttgagcaaaatctcgaccttgcacagtcttccgccagaatggctcaggcccgggccgggctgggagccgcaacagcggcactgttaccgtccgggagtgtcagtgggcaagcggctcgcgcctatcagtcggttgaaacaccattgggtcaggtggtcaattcaacgccggattataatcgctacggcaattcctatgaaaccgatctcaatgcaggctgggagatagacctgttcggtggcctgcggcgcagccgacaggcggcccaggccgattatcaggcttctgaggctggtatcgcggcgacacgtcttgctgtcgccgcgcagactgcggatatctatatcaccctgcgtggattacagacccgtctggatattgcgaataaacaggtcatcacagaacagcaacttctggaaaaaattcagcgtttatacaccaaagggctggctcctcaatatcaggtccgccaggctgaaggcgcgctggcacaggtgcagtcaacagtacctgatctgaaaaacgggcttgatgccgccatgcatgcgctggacgttatgctcggtaccccgccagggagccacagggctcaactctctttgccgggtgctattccgcagacacccgaaatcaccgtaatgggtacgcctgcagatctgcttcgccgtaggcccgatattattgtcgccgagcgtcatctggccgcatcaagcgcccgtatcggtgtggctgtcagcgagtattatccaaagttttcccttaacgcgctgcttggcagcgcaacggcagtgtcaggcgataatcttttcactgccggtgccagccagtcgtcgggtgtgctgggattacgctggcggctttttgactttggtcgtattaacgcccagatagaacaggctaaaggccaggaagcagaagcgcttgccgcttatcgtctgtcagtgttacgcgcaaccgaagatgttgagaatgccttctcggcactggtcaatcgccagacacaggcagccacactgacccgcggtgaaaccgccctgtccagtgcccgacagtcttcttttatcgcttttcagcaaggaacagccagcctgattgacgtgctgcacaacgatgaaacgcttctccaggcttccgatgccagagcgcaggcgcagacagaatcggcccgtgcagcagtggcgacattcagggcgctgggcggtgggtggcaaacgtcattacctgacgaaatagcaaataaacccggttaa

SEQ ID NO: 184198 - DNA, 615 bp, Klebsiella oxytoca
atgactaaacaaatgaatgaaactccttccaggggaccttccgagcataatgtccgcgatcaggtcgttgacgcagccactgagcatttcggtcactttggctacgaaaaaacaactgtctcagacctcgccaaagcaattggtttttcaaaggcttatatctataagtttttcgattccaaacaggctatcggagaagtgatctgtgctaaccggctggcaatcataagggacattgtcaacgcagcgattgtggatgcgcccacagcctcagagaaaataaggcggttattcagggcattgtcagaatccggctgcgatttattttttcatgaccgtaagttgcacgacatcgcggccgttgctgtgcgtgataaatggccctcagcacaagctcatgagcagctcctgcggcagcttattgagcagatcattgttgaagggcgacaggctggtgagttcgaaagaaaaacgccactggacgagacggcggatgcgatttttatggtcatgcgtccctatattagcccggttctgctgcagtataatctggaaaccgcccaggcagcggcggtgttgctgccatcactgattctgagaagtttgtcaccctga

SEQ ID NO: 184199 - DNA, 1110 bp, Klebsiella oxytoca
atgctcgggcttaaacctgtcacctttgctgtctgcctgttgccgtttgcccttgtggcctgcggtgatgcttccgataacagcgatccacgcagtctgccacctctggtcaggtctgccgcagcgatcaatgcaaccgacttttcccgcgcttttacgggggtggttgttgcacgaattcagagcgaccttggtttcagggttcagggcaaaatcctggaacgtctcgttgataccggccaggccgtaaaacgtggccagccgttaatgcgtctggacccggttgatctgagcctgcaggctcaggctcaacagcaggctgtcgccgcagcaaaagcgcgtgcccgccagacagcggatgacgaatcgcgttatcgcggtctggtcaccgcaggtgctgtatcggcatccgcttacgatcagattaaggctgccgcagacacggccagggctgacctcagtgccgcccaggcgcaggcgaatgtggcgcaaaacgccatgagctacgcggtcctggtggccgatgctgacggcgtggtcatggaaactctggccgaaccaggtcaggtggtcagtgccggacaaccggttatccggcttgcgagggctggacagcgcgaagcggtcgtccagttgcctgagacgctgcgcccggtagttggaagtgcggcacaggcctcactgtacggcagcgatacacaatctgtttccgcgacactgcggttactctctgatgcagccgacccgctaacgcgcacgtttgaggcaaggtacgtgctcaacggtcccatgtctggcgcccctctgggatccactgtcaccatccatattgcgcagagcagatcatcccagccgttgctgcaggtgcctttagctgccgtgtttgacgcgggtaaaggcccgggggtctggcgcatttcaggcaatcccgccagagtgacatggctgcccgtgcaggtcgtcagcctcggggatgatgcggcaagcgtgaccggcagccttaagcccggcgaacaggtcgtggcgctgggggctcatctgctccatgacggtgagactgtccggctggcgaagcagagcgatgtcagtgtcgccgggagtcgtccatga

SEQ ID NO: 184200 - DNA, 3111 bp, Klebsiella oxytoca
atgagccgcgggcgcttcaatctttccgcgctcgcggtgcgcgagcgttccatcacactgtttctcattctgctgattacggttgccggtattctctcgttccttggactggggcgcgcagaagatccgccttttacggtcaagcagatgaccatcatttctgcctggccaggcgcgacggctcaggaaatgcaggatcaggtagccgaaccgctggagaaacgtcttcaggagctcaagtggtatgaccgtacagagacctacacgcgtcccggtctggcttttactatgctctcattgctggacagtactcccccctcagaggtccaggaagaattctatcaggcacgcaaaaaactcagcgatgaggccaaaaacctgccggcaggagtatcaggaccgatggtcaacgatgagttctcggatgtcacgtttgcgctatttgcgctgaaggcaaaaggagagccacagcggctactggtgcgcgatgctgagtcattacgccagcgcttattgcatgttcccggggtgaaaaaggtcaatattatcggtgagcaggccgagcggatttttgtctcattttcccatgaccgtctggcaaccctgggggtttctgcgcaggatatctttgctgccctgaacaaccagaacatgctgacacctgccggctcgatagacactcgtggaccacaggtttttatccgtctggatggggcgtttgacaagctggagaacattcgtgaaacgccggttgtggtgcagggaaggacgctgaagctttccgatgtggcaacggtcgagcgcggctacgaagatccggcgacctttatggtgcgtaaccagggagaacctgcacttctgctgggtatcgtgatgcgtgagggctggaacggtctggagctgggtaaagcgctggataaggaagccgccagtatcaatgcgggcatgccactaggcatgacattcgcgaaagtcaccgatcagtcagttaacatcagttccgccgtagacgagttcatgatcaagttttttgtggcgctgctggtcgtgatggtggtctgctttctcagtatgggctggcgcgtcggtgttgtggttgccgctgcggtacctttaacattggctgccgtttttgtggtgatggaagccacgggcaagaattttgaccgaataaccctgggatcgctcatcctggcgctggggctactggtggatgatgccatcattgccatcgaaatgatggtggtgaaaatggaggagggatacgaccggatcaaagcctcggcctatgcctggagtcacaccgctgcaccaatgctggctggtacgctggttacggccgtcggctttatgcccaacggttttgctcaatccacagcgggtgaatacaccagcaatatgttctggattgtgggaattgccttaatcgcctcttgggtggtggcggtggtgtttacaccgtatctcggggtgaaaatgctgccagacatcaaaatagttgaagggggacatgatgctatctacaacacccgccgctacaaccgttttcgtcagttgctgacgcgggtaatcgcgcgaaaatggctggtcgcaggttctgttatcgcggtttttaccgtcgcccttctcggcatggcactggtgaaaaaacagtttttcccgacgtctgaccggcctgaggtcctcgtggaagtgcagatgccgtatggcacttccattgaacaaaccagcgccgccgtgacgaaaattgaggactggctgaagcgccaaaaagaggcaaaaattgtgacctcttatatcgggcaagggtcaccccgattttatctcgccatggcgccggaactgcccgacccctcttttgcgaaaattgttatcctggcggacagtcaggaatcccgtgaggtgctcaagttccgtcttcgccaggctgcggctgatggactggctcctgaggcgcgggttcgcgtgacccagctggtgtttggcccctattcaccgtatccggttgccttccgtgtgacagggcctgatccgactgtattacgggacattgcagataaggtgaaaacgctgatgcaggctagcccgttaatgagaacggtcaacacggactggggctcacgcgtgccgacactgcatttcaccctgaatcaggatcgcctgcaggcagtggggctgacatcaaacgcagtggctcagcagcttcagttcctgctttcgggcgttcctgtcacccaggtgcgtgaagatatccgttcggtgcaggtcatgggacgcgttgccggtgatatcaggcttgatccggcgaaaatagcgggtttcactctggtcggctccgcagggcagcgtattccgctatcgcaggttggtgaagtcgaagtgcgcatggaagacccggtcctgcgacgtcgtgaccgtatgccaaccattactgtgcggggcgatatcgccgaatccctgcagccgccggatgtctccactgcgattatgaagctgctgcagcccatcatcacaacgcttccggatggataccgtattgaggaggctggctctattgaggagtcaggaaaagccaccctggcgatggtaccgttattccctgtcatgattgccatgacactgctgatcattatccttcaggtgcgttcaatggcagcgatggtaatggtgtttatgaccgcacctctgggactggtaggcgtggtgccaaccttgctgctcttcaaccagccctttggcatcaatgcgctggttggtctgattgccctgtcagggattttgatgcgtaacacgctgatcctcatcggccagatccatcataacgagcaggaagggcttgaacccttccatgcggtcattgaggcaacggtacagcgctcccggcctgtactgcttacggcgatggcggccattctggcctttatccctttaacacattcggtgttctggggaacccttgcctacacactgataggtgggacactgggggggaccatcattacgctggtattcctgccagccatgtatgccatctggttccggataaagagcccgacttcaacctcgtcagcggaaaatccatccatttctgaaggattaaaaaatgtctga

SEQ ID NO: 184201 - DNA, 810 bp, Klebsiella oxytoca
atgtctgaacataaagtcgttctgattaccggcgtttcgtcaggtattggcagggcggcagccctggcttttaaagccagaggttgtcaggtatatggtaccgtcagggatatcaatagcgcttccccgttgaatggtgttgcgctgacagaaattgatatacgcgatgaacattcggtgcaacaggcaattgaaagagtgatagtcaaagccggacgtattgacgttctggttaacagcgcgggtgtgtccctgattggtgcagtggaggaaacatcagtggaggaggctacccggctgtttgataccaattttttcggggcattacgtacgacaagggccgtactgccacacatgcgaaatcagaaaagcgggcgtatcgtgaatgtcagctccgtgctgggctttctgcctgcgccctttatgggcatttacgctgcctcaaaacatgctctggaagggatgtctgaaaccctggatcacgagctacgtggaatcggcgttcgcgctacgctggttgaaccttcttttacaagaacaaaacttgatatgaactccgctgaaacagcagaaaagatcgccttttatgagaatgcgcgaggccagaccctggggaccatactgaaacaagtcagtactgcttctttacccgaaagcgttgcaggagtaattgttaatgcagcattagggccatggaaaatgcgacacacaccgggtggtgaagccacgctgcttgccagactacgtcgttttgcacctgccagtatggttagtaagggattgagaaaagcctttggaatgaaagattag

SEQ ID NO: 184202 - DNA, 441 bp, Klebsiella oxytoca
atggatacccacaaccctgagtttgctgagcaggcagcaattactgcctcggtagtccctgacgagttacgtatcggcttctggccaaagcgctttggatctatcccacaatggataacccttgagccccaaatatttggctggatggatcgtctatgcgctgattacagcggcggcgtctggagcttttacatactcagcaacggcggcgcatttatggctccggagcccgacggtgagaagtggacgttgttcaacccgatgaatggaaacgatgcggagatgagcggagaggctgccggtatagcggcctgcctgatggcatacagccaccacgcttgtcgcaccgaatgtgacgcgatgactgagcactattatcgcttacgtgactacgcgctaaaccatccggaatgcagcgccattatgtatctaatcgactga

SEQ ID NO: 184203 - DNA, 2694 bp, Klebsiella oxytoca
atgaaaagatcaattcttggactattaatattttccatactcaatgttgcaaatgcacgtaccgagaaaattcctccaggatttgaaattatcgtactcggacaacaggaatacctggacgtctacctcgcgggacgtaatctgggtaaatattttgccaccgttagccttgataccgttaagttcgatcaaccgcaaaaaatcatcgccgccatgggccttgacaacgatcctgcgcgtcttaaagcgattacagcaaaactcagccagccccttgagcgccacggcgaactggcatgcagcgtcattaaccacagcacgggttgcggctacctgaccaccaaagatgtcgcgctgatttataacgacgaacaaaactccgtctctttgtttcttaataaagactggtatcccgaaagcgggaaggagacgctctatcgccccccaacccaggacgataacgtggttaatgcctttgtccaccagcaagatattaacgtctccattcaggatgactacaaatcggcctggttgcagggtaccggcgcgctgggcgttacggacaacagttacatcggcgcttactggagcctgaacggtaacgaaagcgatggcgaaaccgaaacggacgctgacgtcagcgaactctactatcgctacgaccttctgcagagattttatgttcagggcgggcgaatggacagccggagcctgtacaatctcaacggtggtaactttaatttctcattcttaccgttggatacctttgacggtatccgcgcaggttctacgctaagctacttaaaccaggagcaagccagtcaggggacgcccgtcaccatactgctttcccgcagctcgcgcgtggatgcttaccgcgacaatcaactgctcggttcattttatctgaacggcggcaatcagaagctggatacatcctccttcccctctggaagttatacgttacagctaaagatttatgaaagtaaccagctggcgcgtactgaagtcgtgccatttaccaaaaccggcgacatgacggatggccatattcaatggtttattcaggccggtaagctggccgagagcaccagcacatcagaaaacgacaacaatgatggcgcgacgtctgcgcaagcggggatccgtatccccgtcactccccatattgaactgacgggcggcgtcgcctctgtcgataacaacttctcggcggagattaacagtcacgtcatcccggctctcggcgactttggcgatctggatttacagaacggctttttctataacgaccagggcggccgcggcaatatgcagcagttaaactggcatattccacaatggccagcccttaacgtgtaccggaaggataccagcggaggtcaatgttccggcgatagcgatgccaaagactacgatctcaactgctttgaaagcgtcaacgtcggcctgacgcagaacgcatgggactggaatatctccctaaactggaaccgtacccgtaatcacgcgaactatcatactcgctgggataacagcgaagattttgcgaataactatttcagccaggccgatggcaatagcacatctgacagcgtgcagctgagcgctacgcgttccttcagtctgacaaactggattgtaaataccagccttggcgtcttctcccgcaacgacagctccagcagcggtaatgataacggcgcttatctgatgtttacgtttagcgaaacgccgcgccaggacaataacgcccgcagccgatccactacaatcggcgttgactatcgaaccagcaaggatagtagcgatcggacatcgtggaatctgtcacgtacctggtatgatgataatgtgaatcatcgggaagcgggcttcagcctgagcggaattaacaccgatacgctggacagcggaatcaacggacgcctcgacagtttgtacggcaacttcagcgcttatttgtccgacagttacagtattgaggaccatacccacacaaccgcctttaccggtagctacagctcgaccctggcggtcagtcgccatggcgtacagatcggtcgctcggggaacggcgatccttccgctgcggttctggttgcggtgaaaaaagtgaatgacgaagacgccgatgagctatccgtcgatgcttcagcaaacggtagccgggccagcctgacggggcaggagtccgtattgttcccctatacgggttatgaatcgggctacctcgaggtcaacgacagttcgcgtaaaaatcagtccggcaccaccaacctgttaacaggctccgggagacaggatttgatgctacttcccgggaagctgcgatatcgcgaggtctccgccagctttagctacaactacatcggccgtttagtgttccccgacacggttaaacgcttcccggttatcgggctaaacagcacgatgctactcctctcggaagatggcggattcacgctggagatgccgggatcgtcgcgggacctgtatgttcttgcggggtcgacattcctgaagtgcccgctaaatgtggttaagaagcgcgccagcattcgctatgccggaaataccgtctgcaagatcgtcagctacgatcggctgccgtctcaggttcaggttcaggcgcagctaaaacaatcgctacgtaagcaggcactggaaactgcgcaaagggagacagaatga

SEQ ID NO: 184204 - DNA, 2790 bp, Klebsiella oxytoca
atgatggcattgatgggggatgcgatgcgtaaaacggaactattggcttttctgcaaaatcagaccgatttttttgatccggataacctgagcgaggtcttcaccgccggctacctggcccggcgttttgccatgcaaagaaataccgccagccactatctgaatcagctggtggcccaggatgtgctggtaaagattaatacccgtccggtctattttctgcataaggccgccttctgccagcagtttttccccctttcccgcagcgagtacaccagcatggcggagctgctcgcggagagcgatcgacagccggagcaggcggatcatttttcattgcttaccggccatgacggtagcctgcgcaagccgatcgaacagatgaaaaccgcgctgttttatcccaacggtggcctgccgctactgatcgtcggcgacagcggaaccggcaaaagctatatggcggagctgatgcatgagtttgccatcgcccagggactgctgccgcccgatgcgccctttgtcagcttcaactgcgcccagtatgccagcaacccggagctgctggccgccaacctgtttggctacgtgaaaggcgcgtttaccggcgcgcagggcgataaagccggggcgtttgaagcggcaaacggcggcgtgctgtttctcgatgaagtccaccgcctggatgcgcagggacaggagaagctcttcacctggctggatcgcaaagagatctatcgggtgggagaaacggcgcaggggatgccgatatccctgcggctggtgtttgccactaccgaagatattcacagcacgtttctgaccacctttattcgtcgtatcccgatcctcgttagcctgcctgatttacagacccgcagccgccacgagaaagaagcgctcacgctgcagtttttctggcaggaggcgcgcacgctcgccgcccggctgcagctgacgccccggcttttgcaggtgctgacgcactacgtatatcgcggtaacgtcggtgagctaaaaaacgtgattaagtacgccgttgcgtcagcctgggccagggctccgggcagcgagaagctgaacgtcacgctgcacgatctgccggaaaatatcatggccgcgacgccggcgcttagtgaaccgatgggccatgaagagccgctgcttatcgaaccgcagaccagcctggtctggctgctgcgcgcgcgcgacccggttcaggggctgatttatgatactcagtgccgcgttctcgcgctgtatgaggcggtgctgagcaaaaaaaggctctgggaagaagcgcaaaaaagcatgggcgaggagattgaaaccctcttcgatcggctgatatttgatcatcacgatacccagagttcgcatatgctgctgctgataacgcatcaggtgcgggaggaattttatcgccttgaaaagcgcttcaatatccagtttaacggcaactgtatttatgctctaagccactacctgattcatcgttcccgccaggcgcagtcgacgatgagcaacgagaaaagccgccagctggaggatttcctggcgcaaaaatatccgttgctgtatcgcttttgtgaagagatcctcgccgcgctggcgctgaagctggacattgaaccccgacgtattgacctgttgttactggtgctgtggttacagaaaaatggcgccattagccagcagcaggtgacccgggcaattatcctcgcccacggttacgccaccgccagcagtatcgctaacgtggcgaaccggttgctgaaaagccagctgtttgagtcattcgatatgccgcttgatgtcacgccggaggctattgctaaccaggtgatggcctatattgagagtcacgcgctggcctccggactggtcatcctggtcgatatgggttcgctgaacgccattcatagccattttaaccgtcggctgacgacgccgatggcgataattaataacgtctcgaccgggatggcgatgtacgtcggcgagcgaattttgcagggcgacatgctggaagatatcgtccgggagatccgcggtgacctcgcgatcgagcatcagctctattacccgcaagcggacaaaccgcgggcgattcttacgacctgcgccaccggcctgggagcggcggcgaatctgtcggcgctgttaaaagccagcatccctgaagcgctggggatcgatattgtggcatgcgatgtggagacgctcgccgatcccgcgcggcggcagccgatgctgagccgctatgaggtgctggcgatcgtcggaaccctggacccgcagcttgccgatctgccgtggatttcgctggattcgttaatctccggcgaagggagccgcccgctgatgcgcatcttcggcgagctggccaccgctgagcaggtcagcgaaatcaataacctgatcctgaagaatttctcgctgcgccgggtgatcgagtcggtgacgatcctcgataccggtaaagtgatcaatcaggttgagcagtttttactgcgctatgagcatctggccggctgcgatgtgcctaacgatcgcaaggtagcgctgtatgtgcatatcagctgtctgatagagcgcctgatccgcaacgcctcgccatcccattattccggaaggcagtgtccgcagagcgagctggcgacgctccgcgaggcttttagtgtcatagagagtggatatagtgtcaaaatccccgccgtagagctgtactacattcacgatattctgacgcgggaaactgaatttattcaggaagatcaagagttttaa

SEQ ID NO: 184205 - DNA, 171 bp, Klebsiella oxytoca
atgatgcgggaaatccgccaaccattggcgcttaatttattttttgcggttcagagcacaaaaaaaacggcgtccaaatccgcggacgccgcacaacaaaccgactacagccgcctcagggcctcgcgcatccccgcgctcaaaatcatttccagataccgcgtgacctga

SEQ ID NO: 184206 - DNA, 1398 bp, Klebsiella oxytoca
atgttcggtcttgatgcattccacctggcgcggatccagttcgctttcaccgtgtcatttcatattatcttccccgccatcaccatcgggttagccagctacctggcggtactggaaggcttatggttaaaaaccaaaaacccgacctggcgctcgctgtaccacttctggtcaaaaatcttcgccgttaacttcggcatgggggtcgtctccggcctggtgatggcctaccagttcggtaccaactggagcggattctcggaattcgccgggagcattaccggcccgctgctgacctatgaggttctgaccgccttcttccttgaggccggattcctcggcgtgatgctgttcggctggaaccgtgtcggacctggcctgcactttttcgccacctgtatggtcgcgctggggacgattatctccaccttctggatccttgcatctaatagctggatgcaaacgccgcagggatttgagatcgtcaatggtcaggtggtgccggtggactggctggcggtgatttttaacccgtctttcccttaccgcctgctgcatatgtcggtggcggctttcctcagcagcgcgctgttcatcggcgcgtcggcagcctggcacctgctgcgagggaacaatacccccgccgtccgcgcgatgttctccatggcgctgtggatgacgctgattgtcgcccccattcaggcgctgattggcgatatgcacgggctcaatacgttgaaacaccagccggccaaaatcgccgccattgaagggcactgggagaacgcgcccggagagcccaccccgctgctgctgttcggctggccggatatgcaacaggagcgtacccgctatggcctggagatcccggctctcggcagcctgattctcacccacagcctggataagcaggtgccggcgctgaaggagttcgccccggaagatcgccctgactccaccatcgtattctggtccttccgcctgatggccgggctcggcatgctgatgatcctgctgggcgcgctggccttgtggctacgctatcgcggccgcctctatcacagcaggccctttttacgctttgcgctatggatgggaccttcgggacttatcgcgattctggcgggctgggtgaccaccgaagtgggccgccagccgtgggtcgtctatggcgttcagcgcaccgctgatgccgtctccgctcacggcgacctgcatatgtcgatcagtctgctgacttttatcgttgtctacggttcggtgttcggcgtcggctacagctatatgctacgcctgattcgcaaaggtccgcagaccgcgcagccgccggcctccggtacgccagcgcgtccactctccgccgctacgggccatgaacagcagaaggagttccgctaa

SEQ ID NO: 184207 - DNA, 360 bp, Klebsiella oxytoca
atgaagaagatattagttattctagcattatctgcaccactaattgcaagcgctaatcaatgggacattacgtgtgcaggtgttaagcttaatgtaattaatggtaagaatggtgcctatgtgaagaaaggtacagatatttttcccatagtaggtggaatcaacaatgaaggatactcaaccaatatctatgctaagtatctcgatgttaaaactgcgaatgataatatcgttcctgttgatgcaaatgacagcattatcttaaatgttcaaggagttgatgggcaatcaacatttagattgattgatggtcgtggtaatcactcgtgttctctaaatatttttaaggctggagaataa

SEQ ID NO: 184208 - DNA, 510 bp, Klebsiella oxytoca
atggaacagattgaaagaagtaaaagatatcttaagcgaatggagaaaatctactcagggatattttcttcttcgggtcatgataagcaagactacgatgacgatgtggtttcttttttcatccattgttatcacataagagattggattatcgaacttaacacattgaatattaaatcaggtcaggtggatatattcatcaataaacaccaaccgttgaagatttgcgccgatttagctaatggttctaaacactgtaagttaaagcgttcattgcggactggccgccaacctcacattgcagctaaacaaaaacaaacaactacttggtattcgggaacaggtggcggagaagtaatgacatgcaaatatactattttatgtgatgggcaattatacgatgccttacatttagccagagaatgtattcaactttgggactcttatacttctgagcttaacgccttaaaaaaactagaggttaataatgactctgctaatacactataa

SEQ ID NO: 184209 - DNA, 396 bp, Klebsiella oxytoca
atgggctgggagcttcacatagtaagaacagaatgttggtttgatagcgcaagtgatccaataagccgtgaagaatggctccagcttgttaatgacgatgaagaactatccatacataacaagaacggtgatacttatgctatatggagctgtcagagtgaacatgatgagccttggcttgactggagcgatggaagaatttcaacaaagcatcctgacgaagccctttactgtaagatgttgcaagtagctgagaagctaaatgctatagtcattgatgatgatgatcataaatatttattaccaagtgatcttatgaatccatcatgggcgaaattatcacctacggataggaaacaatcattatggggcaggttaatttcaaagcttaaatga

SEQ ID NO: 184210 - DNA, 291 bp, Klebsiella oxytoca
atgaagatagaacttattacgacaaaacagtttattgatcaagccgaatgctatttcaggagctatatgaacggactgcggaggaatgcaccagaggacttttattattttctcaacaataaatataatatgaacgacattatggaaagtatcattaaaaaaacgagatatcatttttatgatgacacagaagaaggtaaaaggaatcggatttacggagaagtaagccacagtaaggtaaagcaacaccttcgtcggctttggattgcctataagtgtgtataccgctaa

SEQ ID NO: 184211 - DNA, 219 bp, Klebsiella oxytoca
atggttaaaagagaaataaaagcaaagacaacgtttatccgtttgccagaagtaataaaacgtaccggatttggtaaaacgtggatttacgagctgattaaggccgggcgttttccatctcaggtgaaaacagggataagagcagtggcattcattgaaagtgagattgatgaatggattgaagctactatccagaactcacgccagaacgctgcataa

SEQ ID NO: 184212 - DNA, 876 bp, Klebsiella oxytoca
atgacaaaaagaatgcctgtcgcggagatagtggaagcattaagcaaatggtttgatgttagccgctatgatgcgctgaaaaacctcactctggaacaaatttatgcggaactggaaaggcgcatgtttgcctacaaagccagacagcaatgggaaacactggatgataagcatcgtaatgccgttattcaccatgatgcgatgatccactctggcagggtcttgatggaggataaatggatctctgatagccacatgctggctcatagctatgccgtcaggccaatgacaagggattcactgtttaactatggacgggcaatgtatcgactggagaatacacctccagaagaaaatgtttcagtgagttcggattacatatctgaatacctgaaacagggagggctgaaccctgcgaacaagatgctgattgaaattgacttggaagaagccagcagtgacgatctggctgaacacctgaaagtgcttatcagtcagtggcagaagcacctgaaagtgcctaaaccaccggaaaaagatttccgttttggtcataaaacattccagaagatactcgattacaagattatccctctgatggacctcatcgcttgggaacagctcaacaatcagaaaatcaaataccctgtgttggctggtatcctacaccctgatatgcgttatgccagaggtagcgagcaaatcaaagacactgattatccgcttgcccacggttttttaaacaatgacaattatttcaagtcattgaatgattttttcataaaaaataatctggtgaaaaactcgcctattcttgatgtcatcgcaatgaatgacaaaccagaaacaaaaaagaaaacaagggacatccactaa

SEQ ID NO: 184213 - DNA, 885 bp, Klebsiella oxytoca
atggaatatctaaacgaaaaacaacttttaaaaagaatccagaagtcagaccctttttcgttagtattaggtgctgcattgacttcagaggtcgatggaaaagggatacctggtgttgatcgagcgtctgattttgtccttgattacattaaagagaaaaatgacgaagatgattattacgagtatataggttcaaaaacttcacaagaaaaatatcagcattccatgaaatacatctcagatacttttggtcagaacgcagttaacgatataataactaaagtcgttcgctcaaatattgatgaatctagtggtaaaagctacattcctccagcagttaaagggctcgccaaaattatcgaagctggaaagatattaactattttaacaactaactttgacacattaatagaggaggagttagataatttaggcatcgaacataattcaattagtatcgtttccgattcttccatacctagaaacagtaataatttacctactattgttcaccttcacggtaaatggaatgaaggcgatacaatgcatactgaaagccagcttagaaacaacagaaataaaatacaaaattctattaggggaattctatctagagataatgtctttatcatggcctatggtggttgggaagatagttttacacgaacccttgctaatattgtccatgacaatgactctaattatgagatatcttggtgtttctatgaccaaagagaagagtttttagacaaaaataataatgaactatttttaaaactttctgcagcaacggacagaggaagggttaagtattttaaggggattaactgtcatactatatttaacagtgtagaattggaattagcaaaaaaaaaacaacaataa

SEQ ID NO: 184214 - DNA, 315 bp, Klebsiella oxytoca
atgctgaattcgctcgagatataccaggcgttgaatgaattggggtactggcttgaggctggaaaattcgagccaagctatgcgtccgagcatgcgcttgggaacggaaagtatctgtacgtcaaacgcagtccggacggcgaggttagaaagagcccattggttcttgctccagaaactcttgtcttaaaggcggaaattgatcgcatcgagggtatccactgcctttgggaaaaagtaaaaagcaccagttacttcctttatcgggccattgaacgcttccatcctaacggtgatgctgggcgacagtactga

SEQ ID NO: 184215 - DNA, 3249 bp, Klebsiella oxytoca
atgagcatggacagcaccaaagagctgatcttccagaatgagatgattgctcagatggaagcaaaaggctggatttgcggcaaaaccgatggctacgatcgcgaacgtgcgctgtactcgcaggatgcgctgacctttgtgcagaccacgcagccgcaggaatgggagaagtttgccaaaatttaccctaccgataccgagcgtcatttcctcgatgcgctggtggcgcagctgaaaaaagcggatatcaacgccaccgatgttttgtcccgcacttacggcacgctcggcgtactgcgacatggtatcaaaagccataatgcgcgtttttcgctgtgtcagtttaagccggaacataacctcaatccggaaaccctgacgcgctacaaacagaatatctgccgtatcgtgccggagctggtttacagcccgcatgcgtcgaaagccgcatttgaagaaacgggtgtgaaggcgaagaagtggcgtatcgatctggtgttgttcgtcaatggcctgccgatcgcaaccctggaactgaagtctgaatttaagcagacggtacaaaacggcatcacgcaatataagaaaacgcgtttgccaaaagatcctggcaccaataaacctgagccgctactgacctttaaacgcggcgcgctggtgcactttgccgtcagccagtacgaagtgtttatggcgaccaaacttgagggtgataaaaccttcttcctgccgtttaacaaaggcacccatgacggcggtgcgggaaacgacatcccggaagatgcaaatgactacgccaccagctacctgtggaacgaggtgctgctgccggacaacctgctgaaaattctcgccagttttgtgcatctgcaaatcgtagaaaaagaagatgccattggcctgaagtacaaaagcgagagcctgattttcccgcgctatcaccagtgggatgtggtgaacaaactgatcaccgccgccacggtggaagggactggcaataaatacctgattcagcacagtgcggggtcgggcaaatcgaactctatcgcctggacggcacatcagctttcccgcctgtacgatgagaatggcgaaaagcagttccactcggtgattgtggtgacggaccgcaccgtgcttgacgatcagctgcaggacaccatctatcagttcgaacatcaggatggcgtggtcgggcgtatcaataacaaagaaggcgacggctcaaaatcggagaagctggccagcgcgctggaaaactcgcagccgatcattatcgttaccattcagaccttcccgtttgtcctgaaggcgattgaaaacagcgtcagcctcaagcagcgcaaatacgcggtgattgccgatgaagcgcactcctcgcagagcggttctacggcacgtcagctgaaggaagtgctgatgaccgaagaggcggatgacgatgtggagatgtcttcagaagatattctggatgctaccgtcgctgcgcgtaaaggcagcaataacctcaactattacgccttcaccgccacgccgaaagccaaaaccctggagctgtttggtcgtcgtcctaatccgcaggaaccagcgtcgaaaaccaataagccggaagcgttccacgtttactccatgcggcaggccatcgaagagggctttattcttgatgtgctgaagaactacaccaactacaaggtggtgtacaagctgctgcaaaagctggacgatcctgaccgggaagtggacagcaaaaaagccaaaatcaaactgaatcagtgggtttcgctacacgatcataatgtgtcgcagaaagtgaaggtgattgttgagcacttccgtaagcatgtgatgcacttactggccggccaggcgaaagcgatagtggtgaccagttcgcgtaaagcggcggtgcgttacaagctggcgtttgataaatacatcgccgagcacaagtacgacaagataagcgcaatggtggcgttctccggggaagtggaattccatgaggatgaccacaacagccttgcactgcttaaccagaagttcaccgaaatcaatatgaaccctggcctgaaaggccgggatatgcgtaaagcctttgataccgacgattaccaggtgatgctggtggccaacaaattccagactggttttgaccagcccaagctgtgcgccatgtatgtggataaaaagctgggcggcgtggagtgtgtgcagaccctgtctcgcctgaatcgtacctatccagggaaggcgcagtctggcacgtttgtgctcgatttctacaacgagcccgacgagattctgggtgctttccagccgtactaccagacagcggaactgacggatgtcagcgatccgcagctcgtctttgaactgtttgaaaagctgcgtaccagcggtattttcctgtggaacgaggtagagcagttctgcgaggcgttcttcagcaaaaacaaatccaacgcggccattagtaatatatgcaaacctgcagtggagcgctggaagcatcgttatacctcagcgattgatgcgtatgtgctggctaaagagatgtttgaacgcaccaaaaagacaggcgatgttgtgctgatcaccaatgcggaaaacacctttaaagattgcgagaaagaaaaaagtaagctggatatcttcaagaaagatctcggtagctttgtccgtttctacgagtttatgtcgcaaatcgtcgattacgacgacaagaatctggaaaagctgagtctatttgctcgtcacctgcgtccgttgctgcatgagcagcgcatcgaagaagatgagattgatttaagcaacgtcgagatgagccattaccgtctgtcgaagcttcacgagcagcatctgaagctgcaggaagatgcggcggaatacaaaataaaaccgggtaatgatgttggtacggcgaagccgaaggacaagaaagaagagtttctgtcgaatattctggcgcgtcttaatgagctgttcgtcaccgataatctcaccgataaagacatgattaattatgccttcgcggtgcgcgacaagctgtcagaaaaccaggcggtgatgacccagattgcaaacaatactcgtgaacaggcgatgttgggcgatttcccgaaagccattgatgatgccgtgatggacagcaacgatgcccagcaggagatgatggtgcaatacctctctaaccctgaactggcgaaaggctttgcccgcgtggtgtttgatatgctgaaaggggcttaa

SEQ ID NO: 184216 - DNA, 1401 bp, Klebsiella oxytoca
atggctaagtataaggcgtatccggaatataaggattctggggttgagtggttgaagtctacacctgctcattggtcgagtgcgccaataaaatatcttgcattagctactaattctctttttcttgatggcgactggattgaaagtaaggatatctccgatgatggtgtgcgctatattactactggtaatgtaggcgaggggttatacaaagaacaaggttcaggatttataaccgaaaatacttttagtaagcttaattgcactgaggtttttgaaggggatatattgatatccaggttaaataatccaatcggaagggcatgcttggtgcctagtcttggttataaaactgtaacgtcagttgataatgtgatatttcgtacagataaatattataataggaagtatttagtacaccttttttcaagtaaagactacttccagcatactggtaacttggctcgcggtaccactatgcaaagaattagtcgtggactccttggtaatattagaatccccgtaccaacgcgctcagaacaagctgctattgccgctttcctcgatcacgaaaccgcaaaaatcgacaacctgatcgaaaagcagttgcaactgattgaactgctgaaagaaaaacgtcaggcagtgattagccatgctgtcaccaaagggctaaaccctgatgtgccgatgaaagattctggtgttgagtggttaggagaagtgccggagcattggaccgtaactaggctgggtaaccatgctataaaaatagggagcggcaaaactccaagaggtggttcagaaatataccttgatgagggagtactcttcttaagaagtcaaaatatctacgatgatggacttagagtaggaccttcagagtgcgtttttatcgatattaaaacacataatgaaatgaaaggaactcgtgttcttgaaggtgatatattacttaatattaccggtggttcgattggccgtagttgtatagttcccatgccatttgttgaagctaatgtgaatcagcatgtatgcatactgcgtttcactgaaaatattcgtgagtttatttcatatgctatgaaatcgtcctccactaaggaacagattgaagcatgtcaggtcggtgggaacagggagggactcaatttcgagcagacttcaaaaattaatatatgtttaccaccagaagaagagattggtgcagttttagggtacctaaaaattaggttgccgcaattagatactcttgaaaaaaatgcggcaaatattattttgcttctccaggaacgtcgcacagccctgatctccgccgccgtcaccggaaaaattgacgtccgcgattgggttgccccggacacgcaggatgttgaggagccacaggaggccacagcatga

SEQ ID NO: 184217 - DNA, 2361 bp, Klebsiella oxytoca
atgactaacacgaacttttctcaaacggctgcgtttatctggtcggtggccgatctgctgcgcggtgattttaaacagtctcagtacgggcgtgtgatcctgccctttacactgctgcgccgtcttgagtgcgtgttggcggagaccaaagatgcggtggtggcgaaatatgatgagttaaaaaccagctcactgccggaagatgccaaagagaagtttctgctgcgcgccagcacactttccttcttcaacacctcgaagatggatctgggcaagatggggcagaacgacatcaaagccaacctggagaactacgtccagtcgttctcacccgatgcgcgtgaaatcttcgaacacttcaaattcagtgagttcgtcggcctgctggaagacgccaacctgctatttaaagtggtgaaaaaattcgccaccaccgatctcagtccgaaagcgatttccaactatgaaatgggcctggtgtttgaagaacttatccgccgtttcgcggagagctctaacgagaccgccggtgaacactttaccccacgcgatatcgtgcgtctgactacttcgttggtgtttatggaagatgatgaagccctgacgcagcccggtatcatccgcaccatttacgatccgacggccgggaccggcggcttcctctcttcaggcatggaatatgtgcacgagctgaaccctaacgcggtcatgcgtgcctttggccaggagctgaacccggaatcctacgctatctgtaaagccgatatgctgatcaaaggtcaggatgtcagccgtattaagctgggcaacactctctctaacgaccagttgccgctggaccagttcgactacatgctctctaacccgccgtttggcgtggactggaaaaaaattgagggcgagattaacgacgaacatacgcagaaaggttttaacggtcgctttggcccgggcctgccgcgtgtatccgacggctcgctgctgttccttatgcacctgatcagcaaaatgcgcgacaaccacaatgtggatggctccgtgagcaacggcgggcgtatcgggattatccttaacggttccccactgtttaccggtggcgcaggcagcggtgagagcgaaatccgtcgctacattctggaagccgacttactggaaggcattgtcgcgctaccaacggacatgttctacaacaccggcattgccacctacgtctggatcctctccaacaagaaagcgcctgagcgtaaaggaaaagtacagctgattgatggcaccaacctgtgcggcaaaatgcgtaaatcgctgggttccaagcgtaacctgatgggcgaagacgatatcaagctgatcacgcagaccttcggtgaatttgaggtggtggatgtcacaactctggaagaactgggtctggaaaaagccgccgagcaaaagtctaaccgtggtcgccagcctgctaccgccaaaaccgaagcgccgaaaacctttgccagcaaaatctttaacagtaccgactttggctatcgccgcctgaccattgaacgcccactgcgtttatctgctcaggtgacggatgaggcgattgcgactctgcgctttgcgccaaagccgtttaacgcgccaatggaacgtctgtatgaagagttcgcagcccaatggcaggaagagacctatggtgatttctccgaactggaagccgatgcgcgcgccatcatcaaagccgaatttgccgagctgaaagagaaacagattaaagatctgctcgacagcaaactgtggctggcgcagcgcgccttgatggaaaaagcgcagcagattcagacggctctgggtacgcaggcgggtggcaaaacgcgggtgagcaatgacttcaaccagttccagttaaccctgaaaggggccatcaaagcggctggcgttaagctggacgcgaaagagaacaagcagtttatcgacgccatcaccaccaaaaatccggatgccgagccggtggtgaagaaggtgctgaaagaagccgctcagccgctgtacggtgcgtttgaatacaaaggcaaggttgttgagttcgaacaagacggcgagctgcgtgataacgaaaacgtgccgctgaacccggcagtgtctaccagcgacctgatcgaaaactacttcaaagcggaagtgttgccgcacgtgaatgacgcctggatcaacgccgataaacgcgatgcgaaagatggtgaagttgggattgtcggttatgagattccgtttaaccgccatttctatgtctatcagccgccgcgcccgttagaagagattgatgccgatctggatgcggtcagcgccgagattatgaagctgctgcaggaggtacattcctga

SEQ ID NO: 184218 - DNA, 2190 bp, Klebsiella oxytoca
atgtcctggcttaattccctcttagtggcgcttacgtctgtggaacctcattgggttcccgtcaccgttatcgtccttgttagctttgccgtcatctgctttattttcttttatttatcaagagccatcaaaattgttaatggcctaaaaaaatatacaaaattaatcagcagcgttgaaaacagtgcaccagaggcccagcttgagcatcttaagagcctgtttcagcggcctgagctcaggcatgcgtggaatgagttcaaagaatcgttacacccgcagcgcgaactggagaacggggaagagaaaatcgtccgcattagagctactgcaccaagtgccagctttttctcggagcaacaactggtcgatattccgctgaacaccgaattcttcaaacacttacctggaatcctgaccggtgtagggattattggtaccttctatggcctgatgattggtctcaatcacttcgatcccagcacaccagagcaggtctccagcagcgtcaataatctgttgcacgatgtgttgtacgccttcctgggttcggcatttgctattttcgcctccattattgtcacctggctggaaaagctatccatcgccaagtgctacaaatatctggaaaaattcacagctgccctggactccctttatgacagtggtgttggtgaggagtaccttgcctcgctggtgaaatccagtaatgaaagcgcgactcaggctcgccatctgaaagagagtctggtcaccgatttacgcgatatgttgctgcaactggcagataaccagaaagtagaaaacgaacggttagcagccacgcttagcactacctatcgtgaatcagggcaacaatttgccgagcaagtcagtggcgcgattgaaaacagcctgaagtcgccgctagataaaattgccggtgcagtgcagaccgccagcggcgatcaaagcggcatggtacaaaacatgctgcaggatgtgctgactgcgtttatggcgaaactcgacaccacctttggtcagcagtttacaaacctcaacgacatgatggggcaaaccgttggcgtgattcagacaatgcaaactggatttgctgcgttgttacaggacatgcgtcaggtgagtgatgattcccgccagggtagcgcgcagctcattgagcaactgttgtcagagatgaagtctggccagcaagctatgcaggctggtatgaatgacatgctcactagtcttcaggcatcggtggctaaaattggcgccgaaggtgagggggccggagagcgtatggctcgccaactggaaaaaatgttcgccgatagtgaggcacgagaaaaggcgcaggcagagcatatggctgcctttaccgaagccatccagagctcggtgcagcagggacaaagtgccacaatggaaaaaatggcaacttctgtcgaggcgctgggtgagcaattagggagcctctttgggcagatcgataaggggcagcaacagatttcagcaaatcagcaagcgaatcagcagtccctgcatgaacaaactcagcgagtgatgagtgaggcagacgatcagattaaacaactgattgaaacagttgccagtcaacaccagggcaccactgaaacccttcgcctgcttgccgaacaaaccaaccgacagattcaggatatgcaaaacggcgcggataaaatgcgtcaggctgccgaacgctttgaacatgcaggtgagcgggtgtcggaagcaaaccacctcaccgctgatgtgctgaataaagcgcaatcagcaggttcatctctctctcttgccaccagcgaactcgcgtctgttgttgctgattatcgtaacaatcgggaagctgttagcaaatctattgccatgctggagttgctcgccgcaaatacgcagtctgaacaaaccacgcgcagtcaatttatcgccgatcttaagcagcacggtgagcatttgcagagttataacagggaggctcagacctttatggaaaatgtcagtgacgtgctcgggaaaggatttgaagacttctctgaaggtgtttcacgcagcctggataaaacgctgggcaaactggacgtcgaaatggcgaaagcctctaatctactcgccagttctgtcgaacagctcggagaaagcgtcagcgagcttgacgatgtcctgtcacgcgtgcgtgcgtga

SEQ ID NO: 184219 - DNA, 741 bp, Klebsiella oxytoca
atgtttggaaacgcatttggcgttaaaaaacgccgtagcgatgaggcggagaaaccattctggatctcttatgccgatctgatgacggctatgatggtgttatttctggttgtcatggttgcgtcgttgagttccgtgacacagcgtattcaacgtgcggagcaaggtgaaaaaacaagggggcaggatatatccagattgtgtgagcgcctggaactgcatgcccgcaacgtgaacaaaactatcgttgtggattgccatgataaccgcatcagctttggtgaggccggacgcttcgatcacaaccgttttttcctgaacgctgaggggcaaaaagcactgcaggatgttgttccgcttgtgttggatgcagccgacagtgaagagggtaagaagtggttcaagcaaatcgttattgaagggtttaccgacactgatggctcatatctgtacaacctacatctctctctacaacgctctgaatgggtcatgtgtagcctgctcgatagccgcagcccactgcaaaaaagtatttccgcagaacaacagatccaaatccgtaaacttttccttgcagggggagtctccttcaataatgccaaggaaagcaaggaagccagtcgtcgcgttgagttacgtatgcagttcttcgggctcaaagataaacgagataaggctgatgaggtggatttcccccctgtggttaataaagaagtttgccagctggtaatgccccaatga

SEQ ID NO: 184220 - DNA, 1683 bp, Klebsiella oxytoca
atgacgcccgcactgaattctctttctcaacgcattgctgcgaagctctcttccattcaacgggatgacgattatctgcgtaatgatttccatacgttaacatccgcggccctggatatggaaagacggtttgataaagcagaaagaattccttcgccgccacaagaaatgcggctggaggctctgcgtcgcctccgccttgcggaagaactcactgagagagaatggcggatggtattttatagtcttgccgataacgatccgttatatcctgaccggccaatcttgctggaggatgatatatttttccctgaggtcgacaacgctatcaagacgcggcttgaatctaaggcgttgaaacgcaaggattggactgcactttgttcaagttattttgcttatcagcatgagtcgcccgagaaaaatccacactggtgcatactacgtggacatattgcccaaggttacttcgtggtgaaagccgctatacgacgcgaaaaatcatggatgaagacaattgagctttatcacgacatttttaccccgcaagctggaggcgttatttccaggcagttacttgcgggtgaaaacaattcgctctcgtcattagataaaatcgcgcaaatccccgatagcagctggctatggaagcggatcttcgcggtgcttttagcgcaactggacacacttgacgatcctcagtttctggaaaaaattagctggctgttaggtctggcttcacagtgggttcgctttcgtgatgacatcatgacggagactctgacccgctattactactctgtctatcgcgatcaagaacattcagcgttgaagcaagctgcgctggaattctgggataacccccagttgaaaagccagcagaataaatggcatcaatatgtctccgagccggttgctgcaatggtccggggatggttagcaaaacaggacctgacacatttcttcgagctgttgcgcggtaatggcgatgtcgatcaggcacgattgcactattggttgcgtttcgccaatcaaatgggattcactcgtatcgtcatgggacctgatgcctggcaagaccgtggaagtgactttgtgaaattccgcgaagaaaataaggggcgattgagctatttacgaggcggacgtagctttgataacgccatgattatgcaaatcaacgattatctattcgtcgaattttccgggacaggaaatgcgatgtacgcctatcgaataggccacgcgccatttaaccctgaatcacgtacgattgatatcaacattcatctaaaagatcaggggcgctgcgcgctcaggttgccccatgcacctcgtgctgaggggtataacaaagtccggataaccggctggatgctgaaatacgacgatgagctatgcaagttgggcgttcggtggatggcggaagaacccgtcaagtttgtcgataaaaaagcctcctctcccgcttctttgtctggcatcaaaatcattaatcctctgcgtgatacggcaattcaaagcctggttgaaggtgcttcatgtgtcgtcagcgataatcgacaaaaaggtggcgtactgtctgtactgctcaatacgcctgacgacaccatagaaagagagttgttacgactaggctttacgcctgtggcaaaagaaccgcatcgttactggatcaaataa

SEQ ID NO: 184221 - DNA, 3249 bp, Klebsiella oxytoca
atgctgaaacgcctcttaagtaaactgacgggaaatcgtcagcagatagagcacaatcttaagaatcagtatcaggttgaggaaaacggactcagttttccgctatcgctggttgatgattcgcagctttgggcactggcatcctggcttgagcaactggctgaagaagactatctgatatcactaacagaccggtggttattgagttgggatgccttgtacagtcttctggatgatgacgaacatgccagcagcctgcctcttatcggtgtaccagagatacttcctttacgcgcaagcctgagttcacgtggtgcattaagtgacagtgatcttcgcatctggattgcagaatgggccacacttcctgaacgtcaccctatccgtttcagccgtactggtgccatttttacttttgagaatcagcaatatctgttatccagggaaaactgggtactcatacaggcaacagaacgacttagtgcacagcaaagccaggttcccggcgaaaccactaaccaacttggatgggctgctatccgcaaatgtgcgaaacaagcctccgcaaaatttgatgattatttagaaaaaacgcatgtcgtcaagccgacgtcattgtcattacgtttgcgtaaagcaacggttgctgacactgcggttatcgaaattgaaccccattttgaggagcagcctgctaactggctgggtagttttgacaagaattcacaggttcatgatagctatcgcatcccaggagagaacggcgaacttagccatgtcatcattactcctgaagtgaaagaagtcctgaattccatacactcaatccctggccgtcgagtggcgggaagtgaagcgctttcgtttgttcgtaacccctattcatttttaggtgaagatgctgccgatgttctggcccccgaagaacatgaacaggcgttgtttgatgccaggattttctttcatcatttcaggttgataccccaacagagcgatgagaataagataatcgaagttacgctggtacttgaacctatttcacctgttccccagccagaggtcacttttgtgttctcagctccctgggagcttgaaaaatttatacagcaactcggtattagcgttgcagcgcagatgcctgctggatcctggcaaggttacgagctggagttaagccagttcactgaacaacagtggtacgattgccaggccctatttacacgctggcagcaagaaattgaaggagaagaatttagcgatgtgctggatattgcgaagtatggcgatcgggtgattggtattggtgaatttgaaaaaatttcctcgccctggctgaccaaggcacaaagtgaaaactggcttccagatgacatcgatttctcagtattttcgggcgaagtactgactggttggcaacccgaaaatcttcaccacttaggtgaattgcaggagagaattactcaggcagaatctgctggtgaaacgcatatcgccgcgccatggaatgatagccaattaccgctggatacagccaaaaccttcattaaaaactgggcaaaacagcagagcactgaaaatggatctcaagacaacgttgctgataaagctgtccgggctgtgctcaaaattgagcagaatattgaagaagctgcctacatcaaacagcgccgtgattcactcctcagtgcgcgcaacgcagaacctgaaattcccctgagtcttaaagagaatatccgactcaaagatcatcaacgcgaaggtgtggcctggctacagcaactcttccttcgttcaccagaggaaaccgctggctgtctgcttgctgatgatatgggcttggggaaaacgctgcaaattctgagtttcctggtatggtttattgaaaagtttccacaggaaccgccaagtctgattgttgcccctgtctctcttttagataactgggaacgtgagctggataatttcttctacaccgcgggtattcctgtgttgaaattgtacggtgagaccatcaaagtggtgaaataccccaaacaggctatacccgctcatctgcagtctcaggggattaaaaacctgcttaaacctggctggcaaggtgaggcgaaaatcatactgacgacttacgaaacgcttcgcgatcaagaattttctctggcacgccaaccgtggtccattatggtatgcgacgaggctcaaaaaataaaaaatccagctgcgttaatcactcatgctgccaacgcaatacaagcccggtttaaagtggcgtgcaccggtacacctgtcgagaatacacttgtagacctgtggagtttatttgattttgcgcagccagggttgttaggggcgctgaatgaatttggtaaacactatgttcgccctatcgaaaatgaggcaggccgcgatacggaacgactggaacgcttacgagcactgattgagccccagacattacgccgaactaaagaagaggttgcgcgtgatttaccacagaaaattgaagtggaaagttgcaagcagttgatgttgtctggagtgcaaaaacagctctacctttcgtctgttgcaaactggcaacagcaacaggcgctgagcgaaggcatgcagcaggctggaacaggtatgctggggttgctacaccgattgaagcttatttgcgcacaccctgcagttgtcaatccagagccgcgttttcgtgataactcacccaagcttaactggttgctgaaaatactcgcagaaataaaaagcactacgaaagataaagtcattatttttactgagcttcgagacttacagcgtgaacttcagcatgcgatccatcaaaagtttggtatccgccctgtcattattaacggtgataccagcactaaaagtaatagtcagaatagccgccagaggctgatcgatgatttccaggttcatcctggatttggggtgattattctctctacggttgcagtcggtttcggtgttaacgtacagaaagccaatcatgttattcatttcactcgttgctggaacccagccaaagaagatcaagcaacagatcgggcgtaccggattgggcaaattaaagatgtgtatgtttattatccgacggtgagggatcccgaaatcaccacatttgaagaaactctggatgaccttctgctgcggcggcgttcattagcaagagatatgctgtgtgcaactcctgacttgagtggcgctgattttgaggacattttgaaaggggcgttggactga

SEQ ID NO: 184222 - DNA, 1074 bp, Klebsiella oxytoca
ttgcattggttagttcgtctacgcctggcctggcgccaaatcaccactggatttccttcacgtgcgaggctggcagcgcgcgatgcgcttgctacggcactggcctgcctgctggcatggttactggcggtatggctgttaggacatgagcatcctacgtttgccatcgtcagcgccgtggtatgtcttgctccgggtgtacccagtcacctgaaacaggccagaaatctggttattggctgtacgttcggtatcgtgatgggggagttgatgtggcagctccccgatactcatccactggtgcggatgagcattggtatgttcttcgctattttgttgggcgccgccatcggcccggctccggtggtccccatccaggctggagtatcggtggctctggttcttgccatggggcctgaaagcgcgggcggtacacgtttagtggacgttctgctgggagcctctgtcggattattattcagccaggtgctctttacgtctaatccattcagcgacattgggcgttcaacctccgacttcctgcgtcagattggtaatggactggatcgaatgctacgagcctgtgaggtgcaaagcagtaagggagcagaggccgctttgagtcagctttcagaggctcaggccgctctggccgctcttcgcgccgctgtagctgaagcacaggtcagtaaacgctggtcactacggggtcggctaaacgccgggcggcttgccaccgtcacacagcgttacgaccgccatgcaatccgggtatacgcgacttcccttttattagcggaaagtctcagccgggccatgtcacacacccatactccaccaccaactgtcgtgatgacgtattgccagtggttgtcggatagctgcatggtactagcccgtcaatccgccgttgttgcgcttaaagaaagtgacccacaggcttgtatgggaacaccacctcagtccaccgctgaccagcgccatgaactaccgccagaatggctcacggtagaagataatgcacggcaactggagcatgccttacaggcactgctgggctcacgtgacgcatga

SEQ ID NO: 184223 - DNA, 375 bp, Klebsiella oxytoca
atgaagccgaccgcaggcccggttccggcgggtaaatactggattgttaatcgtcctgaaggtggactccgatcgcacgttaatgccggtgttcgggatcgttacaaccaggtcatgaatggtgcgacgttcaggcacaggcgggatgattggggaatcgacgatgacacatggaatgagggggttaaacgcggtaacttccgtttgcatcctggcgcgctatcaaaagggggtatcactctgctacatgcttcagattttgccatgttgcacaatgcgttactaaaaacaccgcaggtggatgttccttgtatgagtaaactcaaggcatacggcacaattgaggtgatcgccaatggcaaaacatgcccttag

SEQ ID NO: 184224 - DNA, 129 bp, Klebsiella oxytoca; identical to SEQ ID NO: 140005

SEQ ID NO: 184225 - DNA, 249 bp, Klebsiella oxytoca
atgtccccacagaccaatggcatttgtgagcggttccataaaacgatcctgaacgaattttatcaggtaacgttccgcaaaaagttatatggcactcttgaagcattacaatcggatcttgatgaatggctggttcattataataatgagcgaacccatcaggggaaaatgtgctgtgggcggacgccggtggaaacgttacttgatggaaagcgcatctgggctgagaaaaatttaagccagatgtaa

SEQ ID NO: 184226 - DNA, 822 bp, Klebsiella oxytoca
atggcatttaaaaaaggggttactttttatttcaccgatgaaggaaagtatgaggagtttttggaaaaccataaaaagtcaggcacaacaaaatcaaagtttgtattaaggcatttggaagataataagaatatattcgacaagctaaataaaaattgcgaattaatagctgggctctataattcgaatccatatgttcagtgcgtggatgcatttttttcttttcggcagccatttctcttgagtggagttactgaaccggaattaagaaaggggttgttgaataatattgatgaaaaaatcaaaattgattttgttgaacgcattctggaaaatatgaaatgttatcatggctcttatcatttaattaaaaccatgataaagataacgtacatgagagaaagaaatgatgattgtgattatattaatgcatcatgcttttgtcgctatggatttataaagattgatgaatttttgtggaagagatataacagtctttatgacttcacctcaataacgtaccaaaaattttattatattttttcggccccaaagaaaaccaaacaactcgcaatgattttagagtcagaagcttcaggtgatatgataggcggtttttttatttccgtttatccagaggggaagagttttcctaaggatctgtcgaaacgtggatttcaggaatatccagggagaccactagtatggttaaaagtttcaggggttaatggataccaaaacataaatagatttacttttgaggaacataagcgtgttgacaatggtaagtttagcctaatcaagaagtcacgaatgaaatga

SEQ ID NO: 184227 - DNA, 825 bp, Klebsiella oxytoca
atgaaactagtcagtcgttttggacgggtaaatcaggtacggcgcgaccgaccgttaacccgtgaagaattgatgcattacgtccccagtgtttttagtgagaataaacacgaatcccgcagtgaccgatatacctggataccgaccatcactattcttgataatctgcagcgggaaggttttgagccttttttcgcctgccagacccgcgtacgtgaccagagcagacgggagcacaccaaacacatgttgcgcctgcgtcgtgccggacaactcaccggccagcaggttcccgaaattatcctcctcaattcacacgatggctcatccagctatcagatgctgccggggttgtttcgtggtgtatgcaccaacgggctggtctgcgggcagtcattcggcgaagtgcgggtgccacataaaggggatgtggtggagaaagttattgaaggggcttatgaggtgctggggatatttgaccgggtggaggagaaacgtgatgccatgcagtccctgatgttaccgccaccagcgcaacaggcgatggcgagggccgctctccactatcgttttggtgaagaccaccagcccgtcactaccgctcagatactgacgccacgtcgttacgaagaccgcagtgatgacctctggacggtgtaccagcgggtgcaggagaacctgatgaagggagggctggcggggcgcactgcacaagggcgaagtaaccgtacccgtgctgtgaacggtatcgatggcgatgtgaaacttaatcgtgcgctgtgggtgatggcagagaatatgcttgacctgctgggacaggcataa

SEQ ID NO: 184228 - DNA, 927 bp, Klebsiella oxytoca
atgattttagttataacatctagctttgataaaacagttgattacatagtaaaaaaacataatattaacaatttttatagactaaacgttgataatttctctgaatatcaattttcttacactaaaaaaggattcagtattgttaacgataataataaattgcatgaaagtgaatgcagatcaatttattataggaaaccaacgcctgaaaatatcaccaataaaattgattcaaaatatcataatcattgcttccgggaagtattcgcttttgttgaaggaattgccgagtcgtttactggaaaatgtttatcaaaaccatcaatcataaaacgagcagataacaaagtattacaagcaaaaactgcaattaatgttggcttcacaattccagattttatattgacaaataatttcgattacttcaaaaacacattggcatttaatagtatagttaaacctctatcaagcggattgatagaacatcagaagacaaaggagtttgtccagacaaatatggttgatataaataaaagcacagaaacattaaagttttgtccggcttattttcagtcgtatacagaaaaagaatttgaggtaagatcaacctttataaatggtaaagatttcacggtaaaaataatatctaaaaataaaatcgactggagaaaaaacaataacgagatatcctattcaacaataaaaatgcctgattccataaaagaaaaatgtctgaaatatatgtcggtaatgaatatttcttttggctgttttgattttatagtttttgatagcaaatggtttttcttggagatgaatgctaatggtcaatgggcatggctagaaaatgaaacgcatattaatgtgtcaaatgagttagctgtctcttatacacatctgacgctgccgacgatactccttgtgtag

SEQ ID NO: 184229 - DNA, 252 bp, Klebsiella oxytoca
atgagtaaaaacgtaaaacagacttctgaaaatgtagcttctaccgctgcaaaaacgctgactgatcctaatgcctcagccatccagaaaagccttgctggttctgcgctttctcaacgtgggacgtcaaaccagaccagtggcaagatggaacataaggcttcctcagctcttgataacccacgctccagcgagttaacgaagcaacttgcagcctctgttttggcacaatcgaacaaagggcgtaagtga

SEQ ID NO: 184230 - DNA, 1275 bp, Klebsiella oxytoca
atgtcacttactgataccaaagtaaaaaatgccagaccatcggaaaaggccgtcaagctcactgacggatttggcctctacctgctggtgcatcccaacggttcgaaatactggcagttaggctatcgcttcgatggcaaacagaaggtgttttccattggggtttaccctgcggtttcacttgccgatgccagacaacgccgggacgaggctaagaggctgttagctcagggaatcgatcctaacgctaaaaaacaggctgatgaaaaagtccttcaggagaagcgggataaaacccgctcgttccgtgtcgtcgccaaaagctggtttgccaccaaaacaaaatggtcagaagattatgccgatacagtatggaaacggctggaaacctatgtcttcccggatataggcgacagcaacgtttcagatctggatacgggtgatctgcttgtccctgtcaaaaaagcggaaacacttggctaccttgaaattgccatgcggattaagcaatacatcaccgcgatcctgcgccatgccgtccagcaaaagcttatgcgtcataatcccgcctatgatatggaaggcgctgtccagaaatcagagacggaacaccgccctgcactggagctggaagagatcccgctactgcttgaacgtattgatgcctacaaagggcgtggactgactacactggcgattaaactcaatctgctgatcttcattcgttccagcgaacttcgtttcgcccgttggtcggaaatcgacttcaaaagtaagttatgggtcattcccgaacagcgggaagcgattgagaatgtcaaacattccactcgtggggctaaaatgaaacgccagcacttcgttcccctctgccaacaggctattaagatactgaaagagatccgccaatttacctatgaagaaggtaataacgcggggttaatttttaccggctgctatgactcattcaaacccatgagtgaaaacaccatcaacaaggcgctgcgtaagatgggctatgacaccacacaggacatctgcggtcatggtttccgcacactggcatgtagcgccttaattgagtctggtttatggtcagaagatgctgtagagcttcagatgagccacaaggaaaacaacagcgttcgcgctgcttatacccacaaggccaagcaccttgaccagcgaagattaatgcttcagtggtgggctgattttcttgatgagaatcgggatgggatggtcaggccgtttgagtttgctcagaaacaataa

SEQ ID NO: 184231 - DNA, 504 bp, Klebsiella oxytoca
atgctgcgcatctgtccgggctacccaaccgcagacggcggtgaaccgtggggactaccggcccgcagacggcagagtacctgtagcccgggcaaggcgcgtccagcgccgcccccggagcagagcgcagcgtggctgaatttcccggaggcgatgctacgcctctgtccgggctacccaaccgcagacggcggtgaaccgtggggactaccggcccgcagacggcagagtacctgtagcccgggcaaggcgcgtccagcgccgcccccggagcagagcgcagcgtggctgaatttcccggaggcgatgctacgcctctgtccgggctacccaaccgcagacggcggtgaaccgtggggactaccggcccgcagacggcggagtacctgtagcccgggcaaggcgcgtcaagcgccgcccccgggaccaaagtgcaccgtggctgaatttcccggaggcgatgctgcgcatctgtccgggttacccagtcgcagacggcggtga

SEQ ID NO: 184232 - DNA, 1776 bp, Klebsiella oxytoca
atgaaaaaaatcagtttaccgaaaattggcattcgcccggtgatcgatggacgccgcatgggggtacgcgagtcgctggaagagcaaaccatgaatatggcgaaggctaccgctgcgctgattacggaaaagctgcgccacgcctgcggcgcgcagatcgagtgcgtcatcgccgatagctgcattgcggggatggcagaatccgccgcctgcgaagagaaattcagcagccagaacgtcggcgtcaccatcaccgtcaccccctgctggtgctacggcagcgaaactatcgatatggacccgatgcggccaaaagctatctggggctttaacggcaccgagcgaccaggcgcggtttaccttgcggcagcgctggcagcccacagccagaagggcatcccggcgttctccatatacggccacgacgtacaggacgccgacgacacctccattccgtctgatgttgaagaaaaactgctgcgctttgcccgcgccggtttagcggtcgccagcatgaagggcaaaagctatctttccgtcggcggcgtatcgatgggaatcgccggttctatcgtcgatcacaacttcttcgagtcctggctcggtatgaaggtacaggcggtggatatgaccgaactgcgccgccgtatcgatcagaaaatctatgatgaaagcgagctggaaatggcgctggcgtgggcggataaaaccttccgctacggcgaagaccagaacgcgcagcagtataaacgtaatgccgagcagagccgcgcggtactcaaagagagcctgctgatggcgatgtgcattcgcgacatgatgcagggcaacaagaagctggcggaaaaaggactggtcgaagagtcgctgggctacaacgccattgccgcaggcttccagggccagcgtcactggaccgatcaataccctaacggcgacaccgccgaagcgctgcttaacagctcgttcgactggaatggcgtacgcgaacccttcgttgtcgccacggaaaacgacagcctcaacggcgtggcgatgctgatgggccatcagctgaccggtaccgcccaggtgtttgccgacgtgcgtacctactggtcgccggaagcggtagaacgcgtcaccggccagccgctcaccgggctggcggaacacggcattatccatctgatcaactccggatcggcggcgctggacggcgcctgcaaacagcgcgatgcggatggcaagccaaccatgaagccgcactgggaaatcagccagcaggaggccgacgcctgcctcgccgccaccgaatggtgcccggcgattcatgaatatttccgcggcggcggcttctcctcccgctttctgaccgaaggcggcgtgccctttaccatgactcgcgtgaatatcattaaaggccttggcccggttctgcaaatcgccgaaggctggagcgtggaactaccgaaagagatgcacgatcggctggatgcccgcaccaactccacctggcccaccacctggtttgcgccgcgcctgaccggtaagggcccgttctccgacgtctactcggtgatggcgaactggggcgctaaccacggcgtgctgaccatcggccacgttggcgccgactttatcactctggcgtctatgctgcggatcccggtatgcatgcataacgtagaagaggcgaaaatttaccgcccgtccagctgggctgcgcacgggatggatagcgaaggccaggattaccgcgcctgccagaactacggcccgctgtataaacgttaa

SEQ ID NO: 184233 - DNA, 1677 bp, Klebsiella oxytoca
ttggcttatttttttaaagacaatgcccacctatacactgctacgcagtgtgtggggtctaccgacggttgctgccgcaggctaaaagcaaaaccaaggtcaacgtcaacccaaagtttttcttacgaaaaactaacagcagcatttatatttgaggttatatttttaatggcgatttttcatctggattttaaaattgtgaaacgaagcgaagacatgacttccgttgcgaaggctgcctaccatgcccgtatacgtattatagatgatcgcattggacaggttttcgattttagccacaaaacggatcttcatggtcatatgatattagcacctgtttctgctccttctcatattatcgaaagctcatcagcactctggaatgaagttgaaagagtggaacgccagaacaacggacaaacagcccgttattttgatgtcgctattcctgtagaactcagcaatgatgacaagaaaaaattagttgctgaatactgccagaaaaattttgttgataagggaatgattgctgatatcgttttccacgatttagacagtaagaatccccatgcacatgttatgttgaccctaaaaactatcactgctgctggctttggcaaaaaagacagaagctggaatgataagaagatgatgctccagtggcgtgagtcgtgggctacgatgtcaaacagctaccttgagaccgcaggcagtgaagaacgtatcgatcaccgttctctcagatcgcaatgtgctgatgctcttaaccaagcagaagaagcattcagcactgaagaaaaagcattctggcttgccaaggcaacagaaaccaatcgccctgcaatgcagcgcgttcatcgcgctaaatggaatgacaaagagtctcaggaacagcgagcggctgaacaagctctacgcgatcagcaaatagaggaagcgaaaaaagtctataccacattcagtgagctaccattggaaatcatcgttgatgtcaaaagctttacaattacacatcttgctgaaccagaagagattgttcttccagactacccggtaacagtagaacagcaacctgttcttacaacatctgaaccatacagaaggccagcagtgaaatcttatcgtgatcccaataaaaccagtaaagttggtatggcaggagaaggaactcctgttctggttgctcctgaaccaaataaatccactaaactgaaaaccccatctcttcaaaacaccagagcgatgaaccgtgctcctacacgtaatagaaagcaagttaaaccgcgtcagaatggtatctttaggcgtttcacactactggtagtaggatatataagagagagatttgtgtgggccagaaggaaactcgataacatcgatgccgatcatgacaagcgtattgctgaaaattatgtgtttgatgaagtgttggagatccgtgttccacgctcagagtttgaaaaacgcattaaatttaacaatgatcaaacatcatcagcaacagagttctatagcaacatatcagataatgacgagacagttcgtttctcaagtcgtcctacacaagaacagccgaatgttgatagaaacatagatctcactccttcaatgtcaccgatgcaaaaacgtagaactacctctcattttcagccgtcaggatatcgcgaaaaaagataa

SEQ ID NO: 184234 - DNA, 342 bp, Klebsiella oxytoca
atgaatgaacaaatgacctatgttttaaacattgatacctatattttacagaatagctatgaaaagatcactgaactatttatgactaaacataaagaagcgataatagaacacttcggtttcgatatgaaaacttttcagttttactttgaacctgcactacatacgattggtgtttggcaaatggaagttgatgcgggcacctgcaacaatgaagaagatgaagtattgagattttttagtgaattgcgtccagacgatgctggtaaactggcagagtctattttgcagttcagtgatattttcatgagtggtgtggatataataataaatatttcttaa

SEQ ID NO: 184235 - DNA, 345 bp, Klebsiella oxytoca
atgaaaccatatattatgctctatagtgaaactttcgaactaaacacatcatcgctttttcctaaaaaaaactccaccgtaaaaacatttaccacagaaccggatgatgaagattatcttaacacttggacaatgcatacaagagtcatagagaaccaagatgaggattacagtttagcccccagaagtcatgatagaaaagaagaaatatctattgaaacaaagtcttccttggatacattcttcactgaatccattgaaaataatgataatgattttatagtatgtagaacatttgtaacgaatattgttgaatcaggtgatgacgatttctattttagctaa

SEQ ID NO: 184236 - DNA, 1035 bp, Klebsiella oxytoca
atgaaacgatttttatcttatttgtacaggaaaagaaaaagagttttttattttttagccaccatgattcttattaattttgttgccgcaaatcaaaaatactacgcttttaatttgttgtcagtatttatcatggtgttctggtcagttatccttccaacctatcgtagggtagaaaaaagttttgaacctatttcacgtgatgaaagagaaatctataatccacgcatacttggtagaaaaagatggatgaaattgcaacgcgatggtatttcatatggactgaaggatgttgaagatgccttaaaaggcttaacgttcgacattgagaggacgtcaaatcttggctatagatctttgagtgctaagatgcttgaggatttgattaaaaatgggaacaacgatcgtatagctaagaaacaaaatgctctgccttcaatagaagatctagaaagatttcttaatcgcgttgaaaacacaggtactaattctcatgaacgaagagcatcagaaataaaaaagaattcgctaatcgattctttaaaggatttatataacaatgaccaaattagagacattaagtatttaaattatttccttagtcaattaaattcagtaatacaagaaacgaaggagcaagagtcaaaaattgaaaagtttgtcgcagtttgtgataaatatctttcatccgcaggagattcaaagtctctaacttttgatcctcaaagtttagcggttatagttaaagatagttatactggagaccgcatctctctaaatgatctatcttcaggtgagaaacaagtaatttccttaatggctacaatttatcttaacgatagtagccctaaaataattttgatcgatgagccagagctttcattatctatagattggcagagaatgattttacccgatttgaatgcaggggaaaatgtcaggcaagtaattgcgataactcattccccatttatttttgacaatgagttagacccttatgcaaccgcaatgaaagttcgtaaaggtgattactga

SEQ ID NO: 184237 - DNA, 855 bp, Klebsiella oxytoca
atgagttctacactcttaaacctcatgaagaaagaagtatcttcgaggaatccattgaagcaagagattttactcaaatcatcaagatttaataaaatttttgtttttgaaggtattgacgactacccggtatacgatgaatggatgaagcgcaatgctatatatatagactctggacatttagtagctaaagggaaaaaacaaataatagagctttacgaacatgctataaaatctgatgatcaagaaatattagcgaactgttatttctttgtagatcatgattttgatacctttgaacataacgctgatgaaatagtaacactttcatgttattctattgaaaattatattattaactcgtactcaacaaaaagttatttaaaagatgagtttaagatggatattacacattctgatttactagatagcatcaaacaagattttgaatctgattttaatacattcaaaactttagcaaaagagctatgtaaacccctttttgtaaatcataatgtgaatggtaaagcaaaattttatgataaaatatcgaccgttataaatctcgaatacaaaaacattcgaattaaagaaagtaccaatttaattggctatgaagtaaacgaagaatcaaaagatgttaaagaattacaagcactatttgatggtttaccatacgaaagatcaattaaagggaagtatgtatttgagttcatcaaatgttggctgtcatcgttgaaatcatatctattagccaataaagagttgagaatcacaaaggatcctttaatgttggaaagacgaagattagcttgcgcaactcctataccggaagagttaataagattctcgtag

SEQ ID NO: 184238 - DNA, 132 bp, Klebsiella oxytoca
atgaactcccgattttatttcatgatgatatattatttgacttgtattaatcagattctaagcaaattacaaatcaaacacttcttgtatattactaagcgtcttagcacctataccttttatgctttttaa

SEQ ID NO: 184239 - DNA, 1173 bp, Klebsiella oxytoca
atgccgcataaaaaagtagcactacagcttattgaggaaacgcttaaagaactcgagtccccaaaaggctctttgttatcggctatacaaaagctacaaaggaccgcggatatcattaatgatgaagatacaaaaatatggtgtgctattcagttgggtgatgataaatacacaaaaccacttaagttatttttaaaattcttaatcgataacaaaaatacaactacgaagacttatgaggaaaaattaagcaaacatttaaaaacgttatctgatacaggaattaagtctggagttcactattctaacgaagaacttacgttaaaaagtaatgaaagtggtggtggatataataatattggatttattgaagaaaaatatgcagaccttgtaagaaaaaaagaaggtaatgacgggacatattataaaaacaacttaaaccaacatatcaattatgtaagaaaaaaagcacatgaattagcatcacaaatatttaatcaattaaaattctcaggcactgtcagtaactgttttgatatactgaaaaatgctgtcgatgataaattattagatctaaatccagtgatcgcagaacaactaatgttggcatttaaagctatctcttcagataaagaagaagaatggtctcaagctttaactacatgtcgtaggcttctggaggggctggctgatgaactttatccggcatcgaaggaaaaatttaatggtcgggctgttgggcaaggtcaatacgtaaaccgcctatgggcatttatggatggggctattcagtccgatagcaataaagaccttgccaaagcacatatagattttctcggatcatggttagataaagttaataagttaacaaataaaggtgttcatgccgagttagatcggattgaagctgtaaaatcagtatttcatacgtatttagtagtggctgatttgcttgagtatatgtcaaataccaaaacctcagtatctaagcctgatatcaataaagctactttagatgaactggaagcattgttaaatataaatagaacaatcgctaaagaaattgttaaagcacgagttcgtgaaggcaagcttgatctagatattttaaaaagcataaaaggtataggtgctaagacgcttagtaatatacaagaagtgtttgatttgtaa

SEQ ID NO: 184240 - DNA, 1005 bp, Klebsiella oxytoca
atgaagtttttagtgactggagccgcaggattcatcggttttcatgcgtgcaaacgccttctgcaggcgggtcatgaggttgtcggactcgacaacatgaacgattactatgatgtcaatctgaagcaggcccggctggatttgctgcaatcccccctgttcagtttccataaaatcgatctggcggatcgtgaaggtattgcccaactttttgctcatgagaaatttaaccgggtaatccaccttgctgcccaggccggcgttcgctactcgctggaaaatcctttcgcttatgctgattccaatctgattggttatctgaacattcttgaaggctgccgacataatcacgttgagcatttgctgtatgcttcatcgagctcggtttatggtttaaaccgcaagatgccattctcaaccgacgattcggttgaccatccggtttctctctacgccgctacgaagaaagcaaatgagctgatggcgcacacctactctcacctttacggtattccgaccaccggattgcgattctttaccgtctatggcccctggggccgtccggacatggcgctgttcaagttcacaaaagccatgctggaaggaaagagtattgatgtctacaactacggcaagatgaagcgcgacttcacctacatcgatgatatcgtcgaggcgattgtacggatgcaggacattatcccgcagcccaatcctgaatggaccgttgagacaggttctccggctgacagctctgcgccctatcgtgtgtataacatcgggaacagctcaccggttgagctgatggattacatcactgcgctggaagaagcgctgggtatggtcgcggaaaagaatatgatgcctattcagccaggcgatgtgcttgagaccagcgcggatacaaagccgctgtatgatatggtgggattcagaccgcaaacaacggtcagtcagggggtgaagaacttcgttgactggtataaggcatattataaggtgtaa

SEQ ID NO: 184241 - DNA, 942 bp, Klebsiella oxytoca
gtgtgcgctcatctccccgccgtaaatcgcatcttcctgacgcatccgctctttaatgaacgcgtgcccggtcttcgacatcaccggcgtgccgccgctgcgggtcaccatatccaccgtattccacgtcagacgcgggtcgtgaataatccgggcgcccggctgcttctgcaggaacgcttccgccagcaggccaacaatataatagccttcgataaattctgcatcgttatcaaacataaagcagcggtcgaagtcaccgtcaaaggcgatacccatgtccgcgccgtgctcgcgcaccgcatccgcggtgtcctgccggcactccggcagcagcgggttcgggataccgttcgggaagtggccgtccggctggtgatgcaccttgataaaggtcaccggcacgcctgctgccacaaaacgtttctccacttcatcaatcacgtgaccggctgcgccgttgccggagttcaccaccagcttcagcggacgggtgaagctggccaggttcacgtagcccatcaggtggtccacgtactcctgcagcaccgatatctgacgcagggtgccgcgacgggacgcgtccaccggcgcaaactgattctcttccgccaggcgctggatatcgcgcagcccggtgtcgccgctgatgggcttcgcgttttcacgcaccagcttcatgccgttgtagttcatcgggttatggctggccgtcacctctatcccgccgtccacgcccaggtggaaggtggcgaagtaaatctcttcggtcccgctcagaccaatatccagcacgtccgttcccgcatccatcaggcctctggccagcgccagcttcagcgactcgctggtcagacgcacatcgccccccaccacgatcgttttcggcttcagaaattcgccgtaggcgcgtccgatacggtaggcgatatcttcgtttaa

SEQ ID NO: 184242 - DNA, 252 bp, Klebsiella oxytoca
atgctgtcagcctggctgctgatatccttttccgtctgcgttacccgattagataacgcgtttaaggcagtggcgtcggctttcttcgtcacgttcgcgttggtgcccgacaggtcattctgcagctttgtgatcgcctggctctggctggccagcgtcttgccctgctcagtaacctttgacgataaatcattcacgacactggcgtcggctttacccgccacgccatttgatgaaaacacaactacatga

SEQ ID NO: 184243 - DNA, 357 bp, Klebsiella oxytoca
atggtcagctccacggttttcgtctgccagctggtcgttatcccttttaaccatgatgtactggataccacccagctggtggggttattcaggtcagaaataaccccaacggagtcagaggatatattcgacatcgcctctgaggatttaaattcaaacgtaacggttaatttcgtatctggctcaaccggaatgcgggtctggttggctacacgaatggagcctgtcgtcgttctcagcgccttttccccggcatcatacgtaaacgcggagccggtgccggaatccacccatagcgaaaggtccgattccatccccccgttagctatcagactgccggatatcagcgatgcctga

SEQ ID NO: 184244 - DNA, 279 bp, Klebsiella oxytoca
atgctgttactctggcttgtcagtttcccttcggcttcggtaacccggttacttaacgaggtgacggctgacgcatcggccttcttcacgatgttctggttcgcggtcgtcagcccgttctgcaggctggtgatgctgctgccctggctgctcagggttttgccctgttctgtcacggtgttctgcagcgactgcagcgcactcgcgtccgcctttttgttaactgtggcattcgtcgtggccagatcgttcgtgagtttcgtgatgctgctgctctga

SEQ ID NO: 184245 - DNA, 504 bp, Klebsiella oxytoca
gtggctgaacggaatattgacattaagcgccagcatctggtcgcgcccctgctgccaggcgtttctggtcaggctgtagctcagggtccagttgatatcgtcgacggcggcgttaagcccggcctgaagctgctggtcggccttaccggttccccagtaggtctggtgactgccgctcaggtagagcgtggcggtacgccccagctgctgggtgacgctgagctgtaccctgccgcgcttgttgtacgcgaggttgtagtaatcggtgaacttcggtttcacttcaatcacgccgtcctgggtctcgacgttgtagccgctcatccggttataggtggtgtcggcgaagctgaaatagccgcgcgtcgagtagcggtagcccaccagctgaatgttggtgccggtatccgtcagcgacttgttatagaggaaacgcaccgactgcccctgatgctcgctgtcatcgggcagggtggcgttggcctgggtgatatccatcgatag

SEQ ID NO: 184246 - DNA, 294 bp, Klebsiella oxytoca
atgacggtgaaagtggaatgggaaacgggtgtcggttattcaatggattttccaggatatggagatgacgctaaatatttagaatgggaaaaaaaaataaaagctcagaaccaggaacatagccggatagtcccagttcccgattataccaggcaaaaaacctgcggaataaaggtccactttttaccctgcgatcaaataaaagttaccacaagctgctacgactacggcaatccaaattatccgattaaagatccgatcaaaatggaggaacccaaagtatgtccacaatga

SEQ ID NO: 184247 - DNA, 411 bp, Klebsiella oxytoca
atgtcagctcataatgataaattcccatggctaagttactatggaaactacaatttctttgagcagagaatgcatgagcatagtaaagttacatcttgtcatgagataaaaaaagggctttacaacatccaattaactaatggtaagatgttaaaagtttttatctgcgagtgttattcatttagcacggcagagtacgtagagtcttgtcagaattatggggagttagatgcagttataataagttctaactggtgcggatatagtctggatttaaaatatgagtgcatgaagaaaaatgtgggaatttttgacattagaggatttatggctgcgatcaataaaatgcagttctgggaatatatgactgattatgaaaaagagaaattcaaagaatatggttggttgtaa

SEQ ID NO: 184248 - DNA, 699 bp, Klebsiella oxytoca
atggcaatttcagaaaaagcgataaagattttatggtctaatgctgctggtatatgttcttttagcggttgcaatgaaaaactttcagtagcggaggctgctgaaggtgccccatatactattggggagatggcacatataaaagggaatagaccaggttccaatcgctatgacattgaacagcctgcttctgaacgagatagttacgagaatcttattttactctgtccaacccatcatacattaattgataaagttgaaaacgttgatagatttagcgttgaaattctccatgaaatgaaaagagaacatgaggtgtcgatttctaaccgattagctattattaaatttgagtctgttgataaactgaaagaccaaatttctacatacttagctgaaaatcatcaaagttgggaacaatatgggcctttatcggataatgctaaaaagaatcctaacagtgagcaaatttatgccgtatggacatctgaacgcctctcaataatcgttcctaataatagagaaattgttaaaattctccagaggaatagagagttgttttctcggaacgagcaaagattagtaagtaaatttattcaacatgctgaaagctatgaaagatgggttaatgatgaaataccttataacgccatacaaagatttccattagactttgaaaccttaattttaggagagtaa

SEQ ID NO: 184249 - DNA, 735 bp, Klebsiella oxytoca
atgaatacaaacgatgctgatctattacaccgatttgaatcattaaccaccgagcaaaagattgatatcgcaaggcgcttactacaaaataaagaaataaaatcaacgacagttatttcttctgaggaagataaagcgatctcgttttcgcaaccttatgtatttgcttttacttctaactttcgtgttttttctgatcttgatatatccaagaatgaattccgtgtattaacatacatcttggagtatatggagtttggaaatctgattaatctttcacaatcatcactgtgcaaagcattgaatatcgcttccggtaatatgtctaacattttcaaaaaactcagacagaaaggaatactcgttgagcatcatggtcatctttatatcaactctaacatttttgctaaagggatgagccatcaactggataataaacgtaaagaacagttgagcaacgctcgcaatctttgcgcagagatagagcagtatccagaaaactatacgaaacattcacaggaagaaagaagaaaactgaccttagaaacagaggttaaagaaatctatactgacgcatttgttttcagtaagaagaaaaagaataacgctgttcctaatcccaataacagcatacatattgataagccacgaaaagtatataaaagaacaaaggaaaatgaggaagcaagaagaaacgctgttgacgcagactctcatatgcagaaagtatcctga

SEQ ID NO: 184250 - DNA, 183 bp, Klebsiella oxytoca
atgaaaaaactacccggttcgcttgagattaagctccacgaaaaactatccaagagtgatatactaaatatattagctgaacaaataaccatgcttgaggaaacatttggcattcaggagtttaagattttctcttaccttgaatgctacattggagataaaaaaacaagcgttatattataa

SEQ ID NO: 184251 - DNA, 588 bp, Klebsiella oxytoca
atgtccacaatgaagcctgatgcagtctggtatcctccgcagtttccgaagcagggacgatggttcacacgccttgtttttatcgctgtggcgatattgctggctggttgcgatcgacccgcgaaagaggagagcatcagtggcggtagcggcaccatagaagcggttaaccatacccactgggcgataaatcatttcagcgtagacgggcagtcagggctggatattatcggcccctggcaggggggcggtggtggctgctgttacggcgtgccaacgaaatggaaaccgggaatgacggtgaaagttgaatggcaaaccggagaagcttccacagatgattttccaggatatgaacattgggataaatatctggaatgggaaaaaaaaataaaagaaagtcatcgggagcatagccgaatagtccctgttcctgattataccgggcaaaaaacctgcggaataaaagttcactttttaccctgcgatcaaataaaagttaccacaagctgctacgactacggcaatccaaattatccgattaaagatccgatcaaaatggaggaacccaaagtatgtccacaatga

SEQ ID NO: 184252 - DNA, 459 bp, Klebsiella oxytoca
atgggggacgaaaagagcttagcgcacacccgatggaactgtaaatatcacatagtttttgcgcccaaataccgaagacaagcattctacggagagaaacgcagggcgataggtagcatcttacgaaagctgtgtgaatggaaaaatgtgcaaatcctggaagcagagtgttgtgcagatcacatccatatgcttgtaaaaatcccgcccaaaatgagcgtatccggctttatggggtatctgaaagggaaaagtagtttaatgctgtatgagcagtttggggatatgaaattcaagtacaggaacagggagttctggtgcagagggtattacgtcgatacggtgggtaagaacacggcgaagatacaggaatacataaagcaccagcttgaagaggataaaatgggagagcagttgtcgatcccatatccgggcagcccgtttacgggtcgtaagtaa

SEQ ID NO: 184253 - DNA, 525 bp, Klebsiella oxytoca
ttgattcagtcatgggtggagaatgccgatggcgcgaaggacggtcgctttgtcatcaccccgccgctgttcgccatgcagggaaaaaaagagaataccctgcgcatcattgatgccaccagcaaccagctgccgcaggatcgggagacgctgttctggatgaacgtcaaagcgatcccgtcgatggataaatcaaagctcagcgaaaacacgctacagctggcgatcatcagccgcatcaagctctattaccgcccggcaaagctggcgctgccgccggatcaggctgcggaaaagctgaaatttcgccgcggcgcaggcacgcttacgctgatcaaccccactccctactacctgacggtcaccgaactcaacgccggtacccgggtgctgaaaaatgcgctggttccgccgatgggtgaagccagcgtcagcttacccgccgatgcgggtcgcgagattacataccggacgattaacgactacggcgcgctgaccccgcggatgcagggcgctacccaataa

SEQ ID NO: 184254 - DNA, 936 bp, Klebsiella oxytoca
atgaaacttaaaaagttacagtctcttgattttgtaaatgactttctgaatcacttagagactaattttgaaaaagaattattcacagcttgcttacggaactatgcatctcatggcaatccattacgcttccataactttgcattttcaattcgcgaactaataacacatatcatcgaaaaaaaatcgccgaacgataagttattacaagcatcatggtatgaaagagaacatgaacattacgaaatatccaggaaacagcgtttaaagtactgctcccaagcaaaaatttcagatgcatacttgggagaagagttcctggaagagtcgaatgaaagaatagatgagatgcttaaactctatttcttcctaaacagatacacgcatataacagagaagtatatgcacccatcccctcaagaatttttcgtaaaggcaaaaaaaatacttcagaccgcaacagagatcctaaatggtttagataattgtagagatgaattaatccgtactctcgaaggtaaaatcagagatgcagtgatcgacaccgcagtaagcacaatgcctgaaaaccttgtgactatcgcgaatcatgcgtatgtagattacacagaggttgaagaatttggaataacgtccattgacgatgaatacatcaatatctatgcaaccggcactgtctatgttactcaggagtatggccccagaaacgatggggttagcttggacgaaagttatccattcacgttgcgtatgtcctctcatttagtctcccctgaaacattcgaagtcatatctgaagctttggaggtagatacttcatcttggtacgatgatggagagaatgaggctcaaatgatggagatggaaagaaatgaaattcctccagtctctgtttcatcctacgactttgagatagatgaaagcacgccgttctaa

SEQ ID NO: 184255 - DNA, 606 bp, Klebsiella oxytoca
atgagcgcagtcaaagaagcgatgatccagattgaactgagtggtgtgctgggtaaaagattcgacaagactcatcaacgtttaatcaacacgattcatgaggaagggattgcgttagcagtgaccattccggggttcgaaaagctcatgattaacagtagagagcagggactgaccttcgccgtgtttagggggaaaaataatattggtgaggctgatttgggttttaccattactggcgaaattatccgcatcgtacctgtagttattggaagcaaaaaggctgggattctgcaaaccattcttggtgcagtgcttgcggttgctggcgccattttatgggccacgcctattggggcgccgctcgttgcatctggcgtgggtatgattctgggcgacatcgtccagatgctttcccctcagccagcgggactggcccgtagggagtctccggaaaacaaagcttcctatgcctttggggtgtcaccaataccgcctcacagggttatccggatggccttctttacggcaaacgccggatcggtggcgcgattatttctacgggaatttacgtcgaagataagatgtaatatatcaatggaatag

SEQ ID NO: 184256 - DNA, 786 bp, Klebsiella oxytoca
atgacatctaaatatgaagctctaaagaaagaagtatttgaactggaaaaacgaggaaaagagctttatgtatccatgatcaatgagtgcgaaactattgatgatgagaatatgaccgcattaaaaaatgatggcatacgcataatttcagtgggtaataattatcaatcttggtatacgaaagcctgtagagtgatagaacaaataataccagagcgcctgaatgaattcgtaagcttatatcaaggtgacccaaaaagaaaagaggtctcctatatgaattactctatttatgactatttaataggcttacagtcaactagaggaagtcaagtagtagcaagtcggaagtcagcacttccgaaaatggaaactcagtggcatattttatcttccgcttccgaaaaattcgatagttcgctatttgatatcaaggaaatactacaagccgatatctttgacactgagattgatacagctaaagaattgaataaaaaagggtttgtacgtgcagctggcgcagttactggcgttgtactcgaaaaacacttatctcacatttgcaatttacacaaattaaaaactaagaaagcgcatccatctatatccgaatacaatcaattattaaaagataacgatgtcattgatactcctaactggcgtttcattcaacgacttggtgatctacgaaacctttgcgatcattacaaagataaagaaccgagtaaagaagatgccgaagaactaatcaacggtacagataagataataaaaaccgtcttctaa

SEQ ID NO: 184257 - DNA, 147 bp, Klebsiella oxytoca
atgaatactgtcgaaaagggctcagacctgctgtctaaacgtatctgcgctatgagcggccttatcatggctctagcaagtatcgggcttcacgccttccttgttatccctgttagcgtcgctctggttttaatgctacgtagatga

SEQ ID NO: 184258 - DNA, 1317 bp, Klebsiella oxytoca
atggccgctaatcttaccgagactgctatacgtggattgaagacaaagagtacgtcgtactacgtgtggagcaacagcgctcaacgtggcaccggcagacttggtgttaaggttcagccttcaggcagcaaggttttttatttccgctactacgttgagaaagggaagaaagaaaaattcattcagttaggcatctggcctgagatgaaactggtgactgccaacgagctggcgaaaaagtacggagcttggcttgttgaaggaaaagaaccccagcaagaacttgagcaacaacgcctggccgagcagcacatcatgcagcttcatcgctcgcagggatcgtttaaagagctggtacatggctacgttcacaagatgaagctcgacaataagcggacctgggccgatgtcctgaagcgtcttgaaaaagagtgctattcagtcattcctcgagagaccaaagcgaaggatgtcacgccattacagatcaaaacgatcttatctggcatcatccagcgtgatgcagtggtccatgcgaatcgaattcgttcctacctaatggcggcttttaactacggtcttaaagccgataacgatccgatgaataccagcgtgggtattacgttcggccttgaagttaatccagtatcggccataccgaagcagtcctcggcggagaaagtgggtgatacatggttaacgctggaggagctacgttttgtcatggagcagttcgctcaggcaactaacgttgggccgttgatgcagcacctaatccgcttcggtgtttatgctggcgggcagcgcccgtttgaaatgattgctagccagtggagcgcgattgactggcagcaaaagacgttactggtcatagctgatgtatcgaaaaacaagcgtgagcacctgatcccgttgactgaatcggcattacaagaattagcctcagtgaaagagctgactaaggaaagtaacagcccctatatcttcccactctcgaccaacggtgagcgcccgttacgtaccgatagcctggcccgttccatcatgtatttccgtgcttttaatcctgagtttaaagttttcacggcgcgagatttacgccgcacctgtaaaacgctaatgggggaggcggggatcagtaaagagatccgcgaccgtatccagaatcacgctttgaacgacgtcagctcgaaacactatgaccgctatgattacctgactgaaaagcgcaaggcgcttgagatctgggaagagcgggttaacaactatcagcggcagcacgaaaacaacgttgtgaacttgtttggacggaggtaa

SEQ ID NO: 184259 - DNA, 1305 bp, Klebsiella oxytoca
atgcctactcgctctgacaggatacgtcggttgctcagccaaggcccgatgcaagctcggcaactcattgagataattggcattagccaaccaacgctgtcccgcgcattgagagatattggcgatgacattgttcgaatcggagctggtccatctattcaatacgctctacgtgatgtttatcgcggattcaggtctgcccccatttaccgcatcactgatgaaggacgcgttagaccccttggcgagctcatcccagttcatcctgagggatttgtcatggtgcaaaccaataacgtaagcctccatagcgacggactaccgtggtggctgtttgacatgcgaccacaagggtatctcgggcgagcctacgcatcaacgtatgcggccgatctcggcttgccagcgaatccagagcaatgggctgactcggatgtcgtcagggcattgcttgcacatggccatgatgctatcggcaacctgctgataggagaacaagcacgagagcgtttccttgagatgcctgaacccaccccagttgagcgcgccacagcctaccccgcgttggcattggcggctggggccggcgaagcaccgggatcatctgcaggaggtgaacagccgaaattttgcacctatacagagcgcggtcacgtcttagtaaaattctcggccccagacgataatccggttagcgaacgttggcgcgaccttctgttggccgagcacttggcgttaagggtgcttggtgtggaaactgaggtatatgattttagtagtcagcgcttcctcgaaattccccgattcgatcgcgttggccaactgggtcgtattggcgtcttctcgctgagggcacttgatgcagagtttgtcggaaatgccagagctccctggcctgttctggttaacagccttgttacggaagggcatgtccatccggatgctgcaacaggtaccgcccggctttgggcatttgggatgctaattggcaataccgacatgcatcacgggaacttgtcgttcatcagcagccacggtcgcccgtatcaccttgcaccggcctacgacattctgcctatggggttcgctcccagaacgggaggcgcaatcgtgaacgagcttcgacctgcatcactacccgaagtaattagccgggatatctggcaggaagcgctaggcttggctgaggacttctttgttatagctagcagttgcgagcgtttctccgccaatttcgtcccatgccttgagacattacgccatcatcttgacgaggccagatcacgtatcgcccgtctaggataa

SEQ ID NO: 184260 - DNA, 369 bp, Klebsiella oxytoca
gtgctggctaataagctggggatcattgatgaacaggaaatggaggcgctggagtctggcttgctgttgatgctttatgagcagttatttatcgaaggccagccgcctgctgagctggcttttgaacatattagcggctggcatcgtcaatggctggggaatgtgtacgactgggcagggaggctacgtaacgctaacctgactaaggatggttttcagtttgcggctgccgacaggattccgctgttgcttgatggcttagagaagcagtttctttctcggtctggtgaactcaaatccctggctcgtctggagctggtaagttatctggctgtatgccatgtggagtttattttgatcagaaggtaa

SEQ ID NO: 184261 - DNA, 156 bp, Klebsiella oxytoca
atgagtaaacatacatcatctcaagtgaccaaagcaaaaatcctccgtgccgttgccagttcaaccgcaatcgaaaccggtgtttctgtgcaaaaaattgagcagcaactgaaacaaaatcaggcacaggcgaaagccgttggcctctcccgctag

SEQ ID NO: 184262 - DNA, 441 bp, Klebsiella oxytoca
atgtttgataagcctgattttacaagagaaaactttgaagaactattgaggataaataattctttaaggagggaaaatagtaatcttttaagtgatataaaaaagtatcataaagatacggaaaacttccttgttgataaagaaaacttcatcaaagacattgaaatgtttagaggcgaaaataaggagctgaaaaaagagttgttaaataatgagaaaagatcaaaaaataacaacggtgatactaaaatcagaccgccagcattaaatgcaatttatcttcttagcaaagagtgttatccagaatgcgaatttattgcaaaggattttgttaaaaaattagacttcctcgcaaaatcacatgatattgtttactcctttcagttaaagactgttgaggcctggtgtacagaattcaaaaaaatggatgctaaacagtaa

SEQ ID NO: 184263 - DNA, 231 bp, Klebsiella oxytoca
atgatgccttttaagttaactaatgaacaacgtatcaaagtcttaagagattacggtgaaacttgtgatcgattagtacgagaaaaagagcggcaatatattacctctatttctcgttcaacagcgtggaaactggaacagtctggtaagtttccactgcgtaagtccattggtctgaaatcctgtggatggttgttaagtgacctgctctattggatcaatgagcgttag

SEQ ID NO: 184264 - DNA, 1413 bp, Klebsiella oxytoca
atgctgtgtggtcgtcctttccctgtacatgtgttcccgcagatcatcagaaatgcggtttatgaagtggaacagcatacgcaggctccccaggctttgattgctgcatcggtattgggggttatttcactagcctgccagaaccgtattgatgtgtgccgactgaataatctgcgcagcccggtatcactttttttactgacactggcggaatctggagaacgcaaaagcacggtggacaaactgctaatgaaaccattatatcaactggaagaagaatggtttgaaaaatatacccaggatctgattatctggcggaatgaggaaatggcttttaatgttgaaaagaaagccctgatgtcgaaactgaaatcagatattcgtcgtaataaagatcactctgcaacgagcgaacgtctgaaagcgttactggcggcgtccccgaaagcaccggccaggttcagacagatatgcaacgatgccacacctgcggcgatgaaagactctctctgtggacgctggcggtccatcgggcttatgtctgatgaagctggcaccatttttaacggctacgcactaaatgaactgcctttcatcaataaaatgtgggatggtgcaatgtttcccgtggaaagaaaaagcgagccagataaattaatcaaaggtgccagaatgacgctggggctgatgattcagcctgatgtgtttaaaaaagggtatttggaacgaaaaggcgatgccgcgaaagggatcggattcttcgcccgatgtctgatatgtcaacctagttcaacacagggctacaggcaaattaccagcccggttgtctcaagtgagcatctgccggtatttcatcaacgactgatagacattgttaacgagagcattgccagaaatgagggaaatgagcgtcagtgtctgcgtttctctcccgaagcagaaaaacgctggctcgaattttataacaaagtcgagtcagaaatgggattgattggcctcctgtctgattttaaggattatgcttctaaaatggcggagaatatggcgaggatcgctgcactgctgcattactttaacggcgatgaaggagatatatcccttactgccgtggaagccgcagtagatataatcgcctggtatgtggatgagtatgtgagaattttctctaaaccccagacgttactgctggtaagttcagaagcagacgagctttactcgtggataaaagattattgctacaggtgtgtggtgccgtatatcaggaagacaaccatcctacaatatggtccgaaccggttcaggaaccggagtaaagtgaatgaactgctcagtacactttattcgcaaaacaaaatacgggcagagaaaagagggaaaaccattttcatacaacctgtcgatggttttatataa

SEQ ID NO: 184265 - DNA, 915 bp, Klebsiella oxytoca
atggaatctgcacgtgataaacgtacccgtgagattgtggaggcagaggatctttggttgcttgatagcgttgatactgaaggttacgtatgctggggatgtggtataaccatgcatcctgctgcatgggaaaaagataaaaaagttagagcctattttaaaaagcaacgccatattcaacatcatcatgaatgtgatgctgatgctgaaagcacagtaattcgccagggccagaaggagagtgtccgcaacatactggacagtgctccaggtttaatgccctcgggattaaagttgattgaacagcgcccggttgttgaaccaggtatcgctggtggtgaaagtaagtccagttcgacgcgttcagcatcctcagcatctggtgaaggtaattcacccgaacgacaatcccggcgtcaagtgaatgctattcgtaatatttgccgtgccttcattcgcttcccgcatgaccggggaatgtcgcttaacgttcccggtattagtggtcaaatctacatgacggcatttaaaaagctccgaaaagaggttcaaccctacccggaaccgaagatcttttatgcaccactactctggaacaaattttctgaaaatgatgataaactcatcattacgctgtctggtgaatggggaaaagatgaggcaggtaagcctaaaccaacccgaagctaccagatccacatcgaatggactaattggtcaaaagccaagcgtaccgtggttcgtaaagagctggaggctgctcgtacagaggcgatagaggccaaaggcaaaggactaaaagataaagcttgggtcttctttatcggcgagcaaaatgctgaaaatccggaaatcttctacgtttgcgattatcgactcatctgcgcgattgtaggacatatcacttatccctga

SEQ ID NO: 184266 - DNA, 3576 bp, Klebsiella oxytoca
atgggcaccggtaaagcgctttcacccatcatatctgaacaagccagaaagcaaggcagctacattattgtcagcctgggtgatgattgctctccgtctggaaagagagatcgtcttaatgcgatgagggatgcagtaaaagatgatcctaacaaaagcaatcttcatcttgatttctacgaccgttccaaactcattcaatggctgcgccaacatccatcagtcatgctgtgggttaaagggaagcttgggcaagggtattccggctggcaaccctacggagcctggagcaatccgccacaaggtgttacagacactttaatctcagccccaggtgtaaccattactttaccgtcgggaaaggggcaaaaactcaaaattgatgaagcaattagcccaatgcgagaacttatccgttcgacgaataaggcggttcgtattacaggattatctggtgtcggaaagactcggatcgttcaggcgctctttgatgaaactgttggaacagatgcgcttgaccggacagtagctatttatgttgatactggctctgagccagtaccgtcggctacagcaatgcttgataagctgatcgctgaggaccgacgagcaattatgatccttgataattgtccatcagaactccatgcttcgcttgccagcaaggtatcagccgcaggaaaagaagtaagcctcatcacaatcgagtacgacattagggatgacaaaccacagacaactgaggtcatccatattgagacagatggtccagaggtggcagagcaacttcttatccgtcgcttcccttctattggtcagaataatgcccgtcatattgctgagtttgcagatgggaatgcaagagttgctttggctatagctgagagaggggaggaaggcgagagtttagctctactttctgatgcgcagttgtttaatcgcttgtttgaacagcgtaatcatcctgatggtaatttacgggagcaagctgaaatattgtcactggtgtattcattctcggtatctagtccagatgctgctaccgacgaactggaaatattaggggcgctctttgggtattccagaacccatttatttaaagccgttacgaagctgatggaacgtcatatcgttcagaaaagatctcactggagagctatcttacctcatgccattgctaacagattggcagcatccacactcgacagtattcccgtcgatcaacttagggcgacttttgaagctccgggttgtgagcgtttattaatgtctttttcgcatcgcttggggttgttacatgaccatcctgttgcgaaagaaattgtagaagcctggcttcagcctgaagggatgttaggaagaatagccgagttaaatgatatttcgttacgaatacttgggtatatcggaccggttgcacctgaagcattgctcaacagaattgaggccgtactctcgtcatctgatttcaaaggtatggaaccgggctacaatccgcagcgacgtagtattctgcgtcttttacaaatgatggcatacgaaccgaacgcctttgaacgatgcgtcaggcttcttattcaactggcagaggacgaagccgataataataacttggattctgctcgaaacatggttccaaggtttttccaggcgtatctgtctggtactcatgcatccctaagccagcgtattgctttaatgaacgaatgcattgcatcaagtattattacgcgtaaatctttgggcttaaagatgctgtcaactgccctggatggcccaccgtggtcagggtttggggttggtgagtttggagctcgaccaagagactatggatacgaacccaactatgatgaacttgtcgaatggcgcagcgcctttattgacgtcattatccaattagcggcatccggagatcctgagcttgaaaggcctgcaagatcaatcctggctgacaaattcaggggaatttggtttcaagaagcaatgcgagacaaactcgttgatgctgcccgtacattaaatgctttaagtccttggggggaaggttggaaagccgttcgttcaacgatctattttgactataccaagcatggcgatggagatgatgttgagccgttgccggataatcttgctgccttagagaaggagttggagcccattgcgttaattccaacaataaagacatacgtgttgagtacaaatcatgattattgggcactggatgcggattttgatcatgaggactccgataaatataccgcagccggaaaacgacttgaagctaaagcacttcaattgggacaggactttgccttatcaaatcatgtacttgaggagttaggagcagatctgttctccatcggtggaatgccttatcgtgctgtctttggtcgaggacttgctcgaggggcgcatgatctacgtattggctggcagcgacttgttgaacaaattgaaaaacagccagatgctaacaaagactttggagttattggggggttcatcgaagaagttgactctgtcgatccatcattagcacagaagtttctcgaccaatgtgcgcaacatcctgaacttcgacaggtattggttggcttgcatccttgggggacatttacggtcactgatttggatcgctgcataaagcatttggatgatccagacattagccctttcatgtatgagcctattctatggcgagaacaatatgccaatttgccgagaattcgtcttctcgagcttgctgagcaactcctgagtaaagcaagcggagacaatgtcattttgcatgcgctctccatgagactgcatggtaaagacaaatcggcagatacgcttggctcagactttcggttgattggtcttgctgctgcaatccagcgggttaaaaacagcgacaaaggccaaagagggacaattgatttttacatggagcgagttatcaatgctgcattgcgtttcgatggtaatgaggcaaaaaaaattgagtggttggacgcaattttcaatgtcattgatgaacactatggatattttttgggattcgagaagactatagcaacaactgttgcgttaatgcctgaatcatttctcaattgcatttttgaatgcaccgaggaacagcagcagggaagacagttctttattcgacgtggcggtttacgccgttctcctcttgctgatgtaagtactagcgtcttgattgaatggtgccgtgccagaaatgatcccagtgtttgggctgccattgcggctggtgtgactctctggtcaaagaatgatgaacagaatgtactaaccctacacgaagctgctatagaactattagaggcctctcctgagccattagctgtgctggagtcttttgctgagcgaatcactccatcctcctggactggtagtctggcgaacataatgcaagctagatcaagcgccatcggtgcgctgagtaaacacgagcgtccagatatcgccgaggctgccaaaacagtttgtgaaaaaatgagtcagtgggtcgaacaccaaaaagaacgtgaacaaagggaagatagtgaaagggaacagcggtttgaataa

SEQ ID NO: 184267 - DNA, 1065 bp, Klebsiella oxytoca
ttgttaaacaaaaaagtactttctcagatacaggatgtggctggtagcggcaatatgtctcccgcagagattgctgagtggttagatactcattctgaagacatagagcatttggttgcgttgaaaatgttcgagtatttggatgaggctaaaggggaggtattaaaggaccattacgaaaatctagatgcatttagaggaagactatttacaacatgggagtcccctttaaagcggctggatgcattaatttatggctgtactgaaatcagtaatgaggtaaacagtgagtatcgcaccggttctggagaaaggtccgcaaaactgaacataaccacccgactgcacgcacgtgctgtccaagtttcctgcgagatatctcatcttctaaagggtggctttgcagacggtgcaatggcccgttggagaacgctccatgaaaccacggccatattgatatttattgcagaaggcgacgaagacctggcgaaaagattcacggattttcagagcatacagaggcgaaaagctgctaatcgctataataaatatagtgaagagttgggttttacttctttctccccagaagatttaagtcggtttgatctcgaaagaaatgacatcgttggtaaatatgaagcgggtttcggcaatgaattaggttgggccgcaaaagctttaggaaaagaacccaatgccagaactaaggttcgctttagtgatattgaggaatttgtcgagctggactttttgcgaccgcactacggctttgccaaccagtatattcatgcaggaattgacagcattggcttcaagctcggtacatcgctttcaaataaagatctcttgctatgtggaccatctaatgaagggctgttagagccgattcagtgcaccagcttgtccttaatacaggccactcaggcgataatctcagtttcaccaaacgatcaacgtttgctatatagctccgtgctctggttgtggcatgagaagttgaaagaagaagttgttgccgcatctgatgccctaatgaagaaaggtgaagctgataattttgaataa

SEQ ID NO: 184268 - DNA, 1419 bp, Klebsiella oxytoca
atgccgtctgagtacgatttatttgcttttcgccgcggcgcgatcactgcccctgcggggtgtggcaagacacaacttatcgccgatgcgctgacccggcataccggaacaacgccagtactcatcctcacccataccaacgcgggtgtcacaacgctgcgtctgcgcatgcaaaaagccggagttgctgcttcggcttaccacattgccacaattgatggtttttccatgtggctggtggctatgtttccgcaacgaagtgctgttgcctctgcagtcctcctgctccagaatcccggagccgactacccagcaatacgcatggctgctaggcatttactccaaagtgggcacctcaatgaggtcctcgcagcaagctatgcccatctgattgtcgatgagtaccaggactgcaatttagtgcaacacgatctggttacagcactttccgtggtacttcccacatgtgttcttggcgacccgatgcaggctatcttcggctttcgcggtaatcagctggtggactggaatacccacgtgcttccgcattttcctgctatcggcgagcttaaccagccctggcgctggactaacgcaggcaagcccgaatttggccaatggcttctggagtgtcggcgaatactcctggcaggaggtggcattgatttacgccaaaccccgccggaagttgtctgggtcgagttgcaaccggctactgccattcagcagcggctcaccgctgcgttaacacaggctgttacgcgggaaggagacgttctggtgataggcgatagtcgtaaccctcgtggccgccggcaaatggccagtcagactccgggggctactgcagtagagcccgtcgacctcgccgacctcacgttgtttggaacgacattcaacctgcagtctgccgacgcactgatttgtttagtggagtttgccgcggaggttatgacgcaggtcggagtagctgtcttgcaacgccgactggagagcttacgcagagggactgcacacaatccagcgactgagtcagaagccgcactgctcgcgttcactaatgccccaagttttcccttggccatcgaggcactacgcgcattgaccaggcaaaacaatgcccgagtctatcgtccggatgtgttgtattgctgtctgcgcgcgatgcaaatagctgcggaggggagttgcagctttgccgaggctacggtgcgcgagcgcgaacgaaaccgacacgagagtcgcccccttgcgcaacgtgccattggtagtactctgttgctgaagggactagaggcggaagtggccgttataaccgcccctgaggagatggatgcccgacatctctacgtagccttcactcgcggatcgaagaagctggttgtctgctcgtttactcccgtgttgatgccccgctag

SEQ ID NO: 184269 - DNA, 1737 bp, Klebsiella oxytoca
gtgaccagaatttgcaaagtcgagatccagaatttccgaactatccgcttactgaactggcaaccttcaccaggcctcaactgcctgattggccctggagacagcggcaagaccactattatcgatgcgattgacctttgccttggtgcccgccgcaatatcagtttcgccgatactgatttttatgggctggatgtcacccaacccatcagcatcacagtgactcttggctcattgcccgatgcactgatgcgcttagattcttacggaaattatttacaggccttcaaccgcgcaaacgggttggtcaccgaagaacctgatcagggtctggaaacggttctttgcttacgtttgacagtggatagcgagttggagcctgtctggtcgttggtatcacagcgcgctcaggcacaagggctggagcgcaatattgcctggaaagatcggttgctgttagccccagcccggctcggggcttatgctagttccaacctgtcatggacacgcggttcggtgctcaatcgcctgacagcagagcggccaaatcttggtgctgaattggccaatgcggcacgccaggcccggaatggtttcggagatcaggctggtgtacagctggcagcaacactgcaaattgtgacccagaaagccaatgaacttggcgttcctttaggtggtggaacccaggcattgctggacgcgcacgccgtatcgatcggagacggagccattgcgctacacgatgctacaggggtgcccttgcgctcactgggaacaggctcatcccgtctactggtcgcaggtatgcagcgtgtggcagcgcagcaggcgtctatcgttctggtcgatgaagttgagtatgggttggagccgcatcgccttacccgattgttgaattcccttggtgcgaaggaaaatcctcctccccttcaggtattcctgtccacccactccccggttgctgtccgcgaacttaacggcaatcagctcttcgtggtacgcaagtctgcggatggcacacatcgagttctccaggtaggtgtcgctgatgatattcaaagcaccgttagggctgatccagaagcttttctcgctcgtagcgtcatagtctgcgagggggccagtgaagtcggcctaatccgtggcctggaccatttctggacgaatataaacgggcaatcaatgctggccgcaggaactgcatatgtgaatgtaggcggcggggagccggaccggtgttttgttcgtgggctcgcattgcgtcggcttggctaccgggtactggtcatggttgatgcggataagccgcccgctgcggcgacagtacaggcatacatggatgcaggtggagagtacatcacctggcgaaacggacgtgctctggaggacgagctgtttctgagcctgccggataccggcgtcgatgccctacttcaacgggcaatagaccttatggacgaagagctggtggctgcacatattcaggcacagtcgaacggtcaactgacactcgcccacattcggcaacagcgagaattgatcggcattccgtatcctattgagacgcggcaattgctggggatggccgcacgtaatcgtcgaaacggctggtttaaatcagtcaccaaatatgaagatatagcacacgatattctggggccgcacatgccagcgacagacgctgtgttttacgcacttattgatcggctttacaggtgggctcatgccgtctga

SEQ ID NO: 184270 - DNA, 918 bp, Klebsiella oxytoca
atgaaatccagaatcgggccaaacggagtacatttcttcgatcgaaatacaggtctgaatgtccttttagacgagtttcgccctcatcagacagtctggtcgaagtctcctcgccaggtatccgttgcgcttaccaatctttgtgacctccactgcgcacattgttttgcgcctaagcacaaggcattgctacatgctgaccaagtgcttacttggttaaaagaactggatactgaagggtgcctcggtatcggatttggtggtggagaaccaacactacatcctgatttcgtcgatatatgcaaacgggctgctggggaaactcatcttgcagtcacatttacgactcatggtcaccgtctgacccaaccattggttaaaaacctcaaaggttcgatccactttgcgcgcattagcgttgacgggataggtcatacctacgaagaacagcgtggaaggcagttttcaagtttactcagaggcattgagtcgatcgcgagattgtcgccctttgggatcaatatcgtgataaacgagcgtacgatttttgagcttgacgcagtggctgaattggcgcaacagtttggagctagtgaattgctgttgttacctcagcaagcaactaatgcagtcgcaagtatggacgaattggtcggccgagagcttcaaaactgggtctctaactatagaggaaaggttcgacttgcagtaagtgaggtgggagcgtcagggctccccgtatgcgaccctcttcctaatgagacaggccttcaagcctacgcgcatatagacgcttccgggatattacgcacgagttcttattcaaccacaggtatggatattgaagaaactggcgttatgtccgcgctcaaacggcttagaaataccttagagattaaacaagggacacaatcatga

SEQ ID NO: 184271 - DNA, 408 bp, Klebsiella oxytoca; identical to SEQ ID NO: 82756

SEQ ID NO: 184272 - DNA, 4059 bp, Klebsiella oxytoca
atgcctgaagtcaattggaaagtattcaacgaactgccaggtgcagcagatgtgaacttcgaaaacctttgccgcgctctggtacgccgacactatggtcgtttcggtcgctttaagcaactcgcaaatcagccaggggtggagtttcacctcgagctgacggagccttgtgatctcggtgcgccaccaggctggattggctggcaatgcaagtggtatgagctggtgaatggacaagatttgggagcctcccgccgcaacaagatcatcgaaggtatcgaaaagacgcgtaagcatgtcccaggagtgaccaattggaagctttggactcatcacacgttaacaaaaggtgatcaagagtggtttttcgcgctagagcaagaccgcttccccgaattaaagttagaactgctcactgctacggatatcgaagatcttttggtcggaccgggagcgcttttacgagaaacctactttggtgaattggttctaaccccagagctaattgctgagcagtataagattgccgtggctccatttaagaaccgctaccagccagacgttcatgtagctgtgggggctgaggagaatatattcaggcatctgtgcagccaaaacgcatgggaatctctggaagaactttcaaacgctttaaaaaagaatcatacgagcatcgcttcggttactgagcaactcaaaattgagctcaggactgaagttgaattactcctgtcccgggttattgggttgactgagtttattgatggtttacacacggcgctcggcaaaggtgactttaactctgtacatcaagcgttggtttcaaatccgcgtcagccggtacgttatgaaaggctactttcgaaattgcgtggagcgcgctttgacggggctccgttaaccgctaatttggttgcagatatccacgcggtttcgtctgttctccgcagtctggagcaatcgattggtgcccgggcggttgctgtacttgcggcggcaggtgaaggtaaatctgaacttgcagtcaaggtaacacagccagaaggggaattcccaggggggatcctcctattgggtaagaatcttcattcaggccaggggcttgatgatctcgtatctgctttcaagatctctgggaagccagcagaaagtttcgaccgcttgattgaggccgtagatgcggcaggccagcgtgcaggcaaacgcatacctattgttattgacggtctgaatgaggcggaagatccgagaaattggaaggatgaactatcccgagcggatgagcttctaaagaatttcccttatgtcttgttagttgtcactcttcgcaatgaatttgccccaatgtgtctgcccgaggagtttccccaagttaaacataacgggtttcaggaagatccgaagacagcatttgacaagtactttgagtactacaagatcgatgctaccgatgcggacctaccagtcgaactcttgcagcaccccttaacactgagaattttttgcgaagtagcaaattctcctcgtcagcatattgtcggagtggaagcattgccccgttcgcttgcaagccttttcgaagcacactttaacaaggttgccgcacgagtcgctgagctttcaccgacgattcatcgcatttatcaagatgacgttcaggatgcactactaacgatcgcgggtcttctttgggataacaatgcgagaagtgtggattttcaagctacacggacggcagttagggatatggggtgggatgacagtattattcgtgcacttgagtctgaaggcattctcgttcggactatttctccagaaggtaggcaaggagttgggtttgcatacgacctaatggccggacatatgatggcgcgcaacctgcttatgaagcctgaactggtgcaatggctacaaagcaatgaagggaacgcaaaatttaaatctcatggacctgattcgcataccttcgcttatgacgtattacgggctctggttgatctgtatccgcaacactctggtaggcggcagctttggcaagacttgtcggatgatatactcgttatgaacgctctgttattgacgacgcaatcggacccaagatatatcgggcgggctactgttgaacgatttgctcaagctatgcaggagtcgaagcggtttgcacaacttgccttcgagagactacggagcactagggctgcgctggcacatccgtttgatatgagctttttgcatgatgtgctaatggctatgtccaacactcagcgcgatcttttttggtcagagtggattcgtcagaaatctgaacaagtcaaagatgacttaaaattcttgtcgacgagatggaaatcgggtcatctggatgagcgtgaacttcggagagttcgctgggtgatgtggacactgacgacgacatccagagctttgcgggatatggctaccaaagccctgtatgaatttgccatcaggcagccagaagagtttttccggttggcgatggagacaattgtagtttcagacccatatgtccccgagcgagtgttcgccgcagcctacggtgcagtcctgaccacttggtcggatatcgatgcagtagagttacatgatgcgctgccacggttcgctcgcgagatttaccaaaccatgtttgcacctggtgctacagctcctacctggcatgcgttatatcagcagtactgcttgggaatcattgctattgtaaggatggtagatccaaattgtttttcagaggatgaagctgcttatcttcttccgccatttagccatctgcctaacgtatttgaaagcattcaacagtacgatccagcaatgattgagcgagcggagagcgcagcgattcaaatggacttcggtaactatacgattggtagacttattccagacagaggcaattacgatgacagcaatccggagtatcaacaggtattgcgggccattgtttctcgaatgctgatgcttggttatgaccctgagcagtttgaagctgttgatcggcaaatgtactcaggttctcgtatgggagatgacaagcacaaaatcgatcgatatggcaaaaagtacagctggatagcttacttcgagatgtggggaatacgatacgcgcaaggcctcctttccgaagaccgcagcgctcgtccatcggacgcagatatcgacccgacgttcccgctagacgctgtgagcattgatttgccacttccagccttgttcagcgaacagtcgtcagatgatggtgattggatcatgagaggtccacaacctgactaccgtagtatccttgagattacggagattgatggtctgactgggccatggatcctacttgacggttttgttgagcaaaatgctacctcggatgaccgacagattttcactttcctgcgaggggtattcgtagatagccaagaagttgacaatctatgtaggttgttcactgatcttgaatatcctggcaatagcgccatccctgatgctcctggctactattacacctatgcgggtgagatgcctttcccgtctattccggggctgctagtcgctaatgaacaagaggatgatagcgatgaaaatttggtgtccgcagaaagatggtcaggcaatggcgttgcggtagatatcacagtgcaggactacaactgggagagttaccatagcgtggagaaccaaagcagcggtgcgaacctgccctcaaagcaactttgtgaggctttgaatctcaggtaccgtgcaaacaaatgggatttgcatgatgctgcaggtgtagcgtcactttaccgcaaaattggcgaaaatggttcggacgtcagtggctctgtcagctatctacgtcgtgatctacttgaccgctatttgatgcaatccggtaaggtattggtatggcttatgtggggagagcgtggttttcattatcggtccaacaagacgcgcaatttgcaccggtactacgtgaatcaccaagagattcacaagcgtattcatatccatcagatagcttcgagtgttagtaatccaaatattacggacggagtcgctatatga

SEQ ID NO: 184273 - DNA, 876 bp, Klebsiella oxytoca
atgcaaaaatctgacagccatcaggcctttgagcaaccgctggctttactgccatacacgcttcgcaacctcatccttgaacgtcttcgtagcctgacgcagtacgaacctgtgataggtattatgggcaaaacaggggctggtaagtcgtcactctgtaatgctctctttcagggagaggtaacacctgtcagtaatgttgactcttgcacccgtgatgttctgcgctttcggctccgcaatggcgatcacagcctaatgattattgatttgccaggggtgggtgaaagcgatcaaagagataaagaatacgccgccctctatcgtcacatccttcccgaagtggatttggtactctgggttatcaaagccgatgatcgcgctctgtcggtggatgagcatttttatcgaaagattatattggcctaccagcatagggtcatatttgtagtgaatcaggccgacaaggccgaaccctgccatcagtggaataccaccagcaataccccctctcatagccagcagtcgacaattgaggccaagcggagcgctgtacaacagatcttcctgccgcaccatccagtctgtgttgtatcggccagaactggttgggggctggatgcgatggtagagacgatgatgcgcagcctgcctgaccgggccgcgagcccactgacaacacaactgcatggaaggctctgcaccgagccggtaaaaaagcaggcacgcgagcgctttggtcatgccgtggatgaaatgattggcaatgtggagtcatcatcttttctgccagcgcctgtaagggctgtgattcgaaccgtgcgggaagccgtggtgtccgttgcccgtgccgtctgggattggattttcttctga

SEQ ID NO: 184274 - DNA, 444 bp, Klebsiella oxytoca
atggatacacaaaaccttcagttcgctgagcagacagcaatcacggcctcagtggtccatgacgagttacgcatcggcttctggccgcagcactttggctccatcccacaatggataacccttgagccccgaatctttggctggatgggccgtctgtgtgccgattaccacggtggtatctggaacttttcgacgctcagcaacggcggtgctttcatggctcctgagtcagagcacgataagacgtgggcattgttcaacagcatgaacggcaacggcgcggaacttactggcgaagcggcagggatagtcacctgtctgatgacatacagccaccacgcctgccgcaccgagtgtgacgcgatgactgaacactattatcgcttacgcgactatgcgctaaaccatccggaatgcagcgccattatgcatctaatcgactga

SEQ ID NO: 184275 - DNA, 342 bp, Klebsiella oxytoca
atgaaaactctacctgctacaatttcgcgggcggcgaagccctgtctgtcgcccgtggctgtctggcaaatgttactgacacgcctgctggaacagcactatggcctgacactgaacgacacgccgttcagtgatgaaactgttattaaggaacatattgatgccgggattaccctggccgatgcagtcaacttcctggtggataagtacgaactggttcgtatcgatcgcagggggtttaactggcaggagcaatccccttatcttcgggcggtagatatcctgcgagcacgacaagcaactggcttgttgcgacggagccgtaataacgctgtatcgtga

SEQ ID NO: 184276 - DNA, 207 bp, Klebsiella oxytoca
atgcaatggattatacatacctacagcgcacgttacgctgagctgaatcgaatttcagagaacgttcttcgctattaccctgcccagccagttgaacacattttatcatccggccccgagagtgacatgttctctgcctggtacagccttcatcagagtcaaactagacgttatttacaggcaaaagaagacagctacagagtttaa

SEQ ID NO: 184277 - DNA, 159 bp, Klebsiella oxytoca
atgctgaagtggtactggcacctgatgccagcgatctggcacacccggcattcagcaatttgtttattcagactgagctggctcctgagcgtgacgctattctttgccaccggcgcccgcgctcaccggatgaaccgggcccttgcctgtttcacatga

SEQ ID NO: 184278 - DNA, 162 bp, Klebsiella oxytoca
gtggctcttgtcaggcatattggtgtcacagttataaccgacgctgagcagactggttgcttcactgtacagaaaggcgaaatccatccgggcatgctcatccagccgctgttccagctcggtgataatattgagtcgcattcgggcctgctccgccactga

SEQ ID NO: 184279 - DNA, 198 bp, Klebsiella oxytoca
atgacatgcgctggtcagatggttgcactgggtgcgcatgcttttcagttcgctgaaaagcgcctgcggagagagcgacaccgcgttcaggcaatgcttgcgcagcagtctcaggctgtcaggtgggttcttaccccactgtttttccagaatatccagcgtatcgttcagtcctgccagtatctgttggttgcttaa

SEQ ID NO: 184280 - DNA, 228 bp, Klebsiella oxytoca
atgattaaagtccttgttttctttaatgctgaatcctgtaaagtcatgaccgttctggaaggtatatcctctatcaggcaggaatatccaaacggtgaagaaacacatcttcggattatgtctgcaggttttccttccttaactggcgatcatggtattgtttacgtggctactgacagggagttaacgtcacaggagatacttgatgcggccaggaaatatttatag

SEQ ID NO: 184281 - DNA, 483 bp, Klebsiella oxytoca
gtgttcagtgggctgattatcgccagcgcgatcgtggcgaacgtggtaaaagacccaacttcaccgcgctttatctggcgtaccgttccgatacagctgaccggcctgctgatcctgctggtcggtaatcttctgtggccgcatgtctggttctggtcggtgctgggtaccagcatttatgcgctggggattgggctactctacccggtgctgttccgcttcacgctcttttcccatcatctgccaaaaggtaccgtgtccgccacgctgaatattctggccctgagcgcgtttgccgcttccattgaggcaacccgttggatctacttccatgccggaggcagaatcgccttccactgcgcggcgctgatggccggtatcgccgtggtaatactggtttcccggctgctggaactgcgtaagcggcatcaggaggcatcaacagataatcgtcacctccacggcaatgttcataaagaatga

SEQ ID NO: 184282 - DNA, 1197 bp, Klebsiella oxytoca
atgaagctgactgctcgtcaggttgaaactgcgaaacccaaagagaagccctacaaactcgctgatggtggaggtctttacctgctggttaatcccaacggcaaaagatactggcgtctcaaataccgttcactaggtaaagagaagctgctcgctattggcgtttaccccgatgtttctttagctgaagccagaagcaagcgagaggatgctaaaaggacattagcggctggcaacgatccttctcttgaacggaaaattgagaaacttagtcgtcaacaagacgctgaaaactcgtttgaggctctcacgcgggagtggtatcagcgtcgctatgaccgctggtctgtgtcctatcgtgaagagatgatgagaacctttgagaaagatgtatttccttatatcggtcaccggccaatcaaagatatcaagccgatggagttgcttgcagttctttcaaagatagaagcacgaggggcaacagagaaagtccgcaaggttcgtcagcgttgtggagaggtctggaagtatgccgttgtgactgggagggctgagtacaatccagctcctgatctagccagcgccgtgactcctcatgagaaagagcattatgcatttttaacccaggatgaattgcctgagtttcttcaaactctgaacacctatgccggtagtgtgcttgttaagattgcgatgcaattgcttattttaacgggagtaaggcctggggagttgaggcaagcggagtggcaggagtttgattttgagaaaaaggtttggaatgtaccagcggaacgcatgaaaatgcgccgccctcatctggtcccattatcaagccaggcaattgacctgcttaatcagcttaagcccatgacgggagcaggagcgttgttgttccctggacgtaatgatcctaagaaaccgatgagtgatatggcattgactgtgttggtcaggcgtatcggctatgccgggcgcgttacagggcatggattccgccacacgatgagtaccattttgcatgagcagggtttcaattcggcctggattgagttacagcttgcacatgtcgataagaacgcgattcgtgggacgtacaaccatgcgttgtatctggaaggacgtagggagatgatgcagtggtatgcggattatattgataacattggaaaatataaattaatcatggccttatga

SEQ ID NO: 184283 - DNA, 465 bp, Klebsiella oxytoca
atgaaaaagaccttgagaatacagtttggcgagcgggtaaaagaactgcgcattgccaccggaatgagccaggaagcctttgctgaccggtgcgggttcgcacgtagctatatgagccgcattgaacgtggtgggtctaatgcgtctctggatgcgattgagatgctggctaacgctctgaatgttgagccgtggcagttgttagtatctgactcatccgaagataacgacccggaactgctggttccctatgcggcggatgggacgtgctttaatcccgaactggcgagtagtcgcgatggttcatttgctgtaggagataaagccgctcagaagcgttttggcacgttttccgaagctcttgagtatctccgtagcatggagacggcaaaatggcgtaggcctaatcctagcggcaactggggtatcgtatctgcggtgcgctgggacaaactgagaaagtag

SEQ ID NO: 184284 - DNA, 498 bp, Klebsiella oxytoca
atgacgggaacagactttttattaccgatgtcagcgggagccacgcttagctgggccagttatagtgtggtcgcccatgttgtatcaaagcagcacatcagcacactacgcgcaattacatggggggctcttggcactctctcattggtgctgggtgtatgtgccttttcagctgtaggtgcagaacaaccgctaacaaaactaaatgccttatgttcaggtaacagcccggaatgctatgcgaaaacgcaccataacccggtcagagagtgcaaagagataatggacaagaaagcgacgtttcgccatgtatggcaggaaagtgaggctcagccggtttttgagagctatctctggcacaacgagagcgctaagatcgttcaggcgtttgggcaacaagctaaggccgttaacggtctggggatgctaaccccacttcaatatttttgtattttcaacgcagatacaggcaatatcattgccgcatctttcgaatag

SEQ ID NO: 184285 - DNA, 606 bp, Klebsiella oxytoca
atgaaatcaatttttgaagaaaaaaatctacttgatgcggttcaggaaagaactgggggacgtagtgcgagggtcagagaagctgtgttgcaggctgctcgacaaattttaatggagcgtggaacagaggcgttaactcaccgcaacatagcacaacttgccaatgtgaatgcttctacagtttatcgccgctggccagacagggcgcgtttgattgcagatgtatataaaaatacggctgatagtattgtccagcttcctgatagcggtagcttgaaggaagatttacttcattttttgcagatgatttctgccatgctaacttcctctgaaggaagaaaactggtcttaggtgggatcagtgcgacctcatcaaatgatgagtctgttaaatctgcgattcgaacgctttgggaacagcgatttcagcaggcagagttactgtttgaacaggcaatcgctcgtggtgaagaaggatataaggggcagaggcagatcatccttgaaacactaatagctccggtttggtttaggattttagttacacaagagccagtagataaagaatatctgattgaaaatattaatcgggttctggctcagtga

SEQ ID NO: 184286 - DNA, 837 bp, Klebsiella oxytoca
atgaagatacattgcttgcaaaccggggatgttcagataaaaacccgacaccaacttgccagatacgaggcccgaccagcgcgagtgtttgatgtattgaaagataaacactggagtcctcgtcttccgattggatgttggcttattgaacatccagaagggcttatcttagtcgatacgggagaaacctcacatgcaaatgatcccggctatcagccttggtggcatccattcatgcaaaagtgcgagagaagatgggtaaaaccagatgaggaagttcactcaaggatactggctctggggttcgatcctatggatgtgaagtgggtaataatgacgcacatgcatggagaccatgcaggtggtataggccactttcctagcagtgagataatcctgagccaaaaagaagcgcatgatgcaatggcgtggaatggggcaatgcaaggttttctaaatatgcactacccaaaatggcttaagccaacaacaactacacatgacgacggtccatttgaaagttttgacagaagcatggccgtaacgaaagatggcgcagtaaggattgttccaacgccgggacacactcttggccaccaatctgttattgttgatactggtgattattacgtgttgattgctggcgatgcttcataccaagaaagctatatgctggaaggcagaattgatggcgtcgctgtcgatacacaattacaccatgactcaaccaaacgaatgcgtgaactttgtaggcgtaaaccgactatcacacagtttgctcatgacttcgatagtgccaaacgactcgaagaaaagatatttaccaccccccaataa

SEQ ID NO: 184287 - DNA, 561 bp, Klebsiella oxytoca
atggcgatttttggctacgggcgtgtttcgacatcgcaacaggatactgagaaccaacggctggaacttgagcaggctgggtggcaaattgattactggttcgctgatgttgttagcgggaaggttccggcaatgcaacgtaaagcgttttctgaaatgctcaataaaatccgtgatggtgaaacgttggtggtagcgaaactcgatcgtctggggcgtgatgcgattgacgtcctgcaaacgataaaggcgctggctgagcgtaatatcaaagtcattgtccaccagcttggcacaactgatctcacctctgctgccggtaagcttctgttgtcgatgctggcagcggttgcggagatggaacgtgacctcttggttgagcgcactcaggcggggctgtcacgagcaaaagctgaaggcaaaaagttgggcagaccgccgaaaatcgcccctgaagcccgtagggcgattatcgagaaaaagaatagcggaaccagtgtcagtgcgttagcgcgggaatatggcgtttccagggcaactatagctgtgattgtggattaa

SEQ ID NO: 184288 - DNA, 921 bp, Klebsiella oxytoca
atgattgctctcaacacagtcaagggaatcattgagatcagcagttggcatgatatcgttgaacgcccgcattttcgctcaaacatcaaccctacaaacgttgaccttaaagagatcatcggtagctaccaatttccagaagatgttccgtgtggactcacaacatgtcatcaaccgcataaacgtggttatatcgttatgactaaagaaggttacgaaaccaacatcggaaaagattgtggcaaaaactacttttccgtagatttcgtcgaaatgaagacgcggtttgatcgagatgttaaaacttcactacaacgcgacaatattcgcaaggcaaaagaaacagcaccacaactccttgagcatgtcgagggattacggaaacaccctaaaggggctgattggatctactctcgtattgagaaactccgtaatcgaggtgtaattggtgaggcagcggctaacgaaattcgtaaaatgcttaaggaaagacgcaaagagctactctcatctcgtcttgcaacgaaagaagaaagagagcgggatttttccatgaatccgtctttggaggataaataccgtggtcaaccttattacgttactatcgttacaggctcgattaaccacctcgaagcaatgtctaaagacaatgatctcaaagaactactgatccgtggcgttacacaaacactaaggcaattaatagattgtgatgtcgataatttgaagtctcgtgaacttgcacaactgtccaaagatgcaaacaacattcaagcaaaaattaacatggctcaagagatcataccgcttgcacaaaaattactgacagcttcaaatcttgaaccgcttgccgtttggttggaagagcatcatggagagcgagcagcgacaccctttaaacgctttattgaacaactctaa

SEQ ID NO: 184289 - DNA, 1929 bp, Klebsiella oxytoca
atggcgcaacgtggtaatctctatcgacgttccagtgggatctatgttctgcggatcaccgttccggttcgttatcgcgccctgatagggcagcgagaaattcatgcatctacccgcacaacccaccttgcaaatgccagagctattgccgcgcgtttgctggagaagtggtatgcgtctctggaagagttcaggcaagtggataaagagaagattcggggtaatgcgccgctgttggctggcgctggcaaaatcagtttagcgctgttttgcgagtcatttgggattgcgcttgaaacggttgttcagcatcttttggcgcacaatgttccggtttattgcttcgcggaaggcctaaccgctttccagattgcagactttaccgaagctgaacgggaagataatggcggttttgtgcttaataaccttgagcagaaagggttagaaagcgtgatgcatggctatgtccgattgttccagacgagctatgcgtttaaacaacttctggagcaaggctacaccgaggaagtggcattcagaacgaatggcgacaaccgtctttctatctggttgatggattttccagggatcagattggatggcagttctttgtttatcaacaaggtgcaggctgagaatttgcgcaatatttgggataacgcgtttgcgaaatcagagcctgaattgcctccggctcctgttgtgatttcagccccgctacctccaccagttgtcatcactaatccgtattgcaatcctctatccgcttcgaaaagggtttcagaagtgctggaggagtttctggcttataaacactcaggggatatcaaacttgccagcgaggagaaaattcggtcacgaatatctcattttatcgacattgtgggcgacataacactcgctgagttagatcgtaatgttgttaaaaattacgtttccagaatgcagaggatgcccagtaacttgtatttaatgcggcgtcgatatgctgctgaaagcttagatcagctcatcgcaaaagccctcgatgctggtgagccgctcatgacgaaagatgccattgaacgccatatggcatcactgggttcaatgctggaatgggcgcgtaaagaaaattacttaattgcgaatccagttgagaacgttctggcgaaacgtaagaaaatcgtcagatctcaggataaccggcatcaatttagtgatgatgaactggaactcatattctccgcatactggtttaaaacaggtgcaggtgtgccgaataagtttgggcgttacatcgactttcgtccttaccgctactggctgccattgttggcattgtataccggcgggcgaatgaatgagttatgccagctttatctttctgatatccgtgtaagtgaaaatggcgtcgcatatttagatttcaatttggatgcaccggataaagtaatggactcagaagcagataagtcgctaaaaacacttaatgctttacgacagatgccgatccacccagagttaattcggcttggatttctcaaatatgtagaggcgttaaaatccgacggacaagaacgccttttccctgagttaaagtttaataaaactaaaggttatcgtggctatgcatcaaaatggtttaatgagctttattgtggcaaccagcttggcttagagcgcaatgggaagatagtatttcactcattccgccataattatgtgaacagcctcgacaggctggagctaagtgagcggatgatcgcgcagcttgttggacatgttcgcggcaacactactgccatgacaacctatcgtaaggacagggcggttgaggatcagttccacgccatttccgggctgacatacaatttgcctgagatagccccatttaatgcagaggcggggctgaaagcgatgaaagatggggttcgcaagcataaatag

SEQ ID NO: 184290 - DNA, 1149 bp, Klebsiella oxytoca
atgttgacctcttttaacgttttaacaccgggcaatatccgctttggacgcggccttgctcgcagcgccgccccctggctcgccgcccgctccgcacagatactgctgattcacggcgccagcctgcagcgcgcggcgttcttattaagcgaactccacgctcaccagctgaacgtcaccacgctgtctatcgcccatgaacccgacctgcaggatattgaacggggcgttcgtctggcgcgggaaaaaggcgtcggcgcggtggtcagcctcggcggcggcgcggtgatagatgccggcaaagcgattgcggcgctggttcccgcgcaggggcccgcgatcgagtatctggaagtggtgggtaccgggcgcctgttagaagccaatccgctgccgttcgtcgccatccccaccacggccggtaccggggcggaagtcacaaagaacgcggtgatcaacgtccccgagcagcagcgcaaggtcagcctgcgcgacgaccgcatgctgccggacctggcgattgtcgacccgtcgctcaccgacaacaccccgcgcgcggtgaccctcgcttccggcctggatgccctcacccaggtgattgagccctggctgtgcgcccgggcgaattcttttaccgacgctctctgccgggaggcgatcccgcgcggcatcaaagcgctcagaacgctgatggccaaagagtgtccggatagccgcgatgagatggcatgggtcagcctgtgcggtgggctggcgttagccaacgccggtctcggcgtcattcacggtcttgcgggcccattaggcggtctgagcaacgccccccacggtgcgctttgcggcagcctgcttcccttcggcctggcgctcaatgaaacgcaaattagcgacgaacgcctccgccagcgttttgccgacgtacgccagtggctggccgccggactggacgccgatccgaacagcgcctgggagagcctgcgcgagtggagccagcgatccggtctgggcaatctgcgcgagctcggcgtcccccgcgaagcgctggaacccgcggccctcgccgccagcagctcatcctccatgaaggctaacccggttatgctgaccagcgagcagctgctggaaatgctggaggccgcgtgggagtaa

SEQ ID NO: 184291 - DNA, 609 bp, Klebsiella oxytoca
atgcagatactcatgtttgacaggcagtcgatatttattcatggaatgaaaattggcctccagcaatacattccagagattgatatttttggcacctgtcaggctgaacagctctggcagaagctgacggcgcatcctgacgcgctgctcatgctggacggggatatgcacggtgagttttgctgttggctgctggaggaaaaacagcgtcgttttccgcacgctcaggtcctgctaatcgtttctgacgataataagggctggctacagcgcgcgctgtcttataatgtgcgggccatcgtgcagcgcgaggaaagtttgcccactttcgctcagaccatcaaccgtctccggcgggggctgccctgcttgccggacaatggattaataatggcggaggtgagcgataataaacgagttcatttgagccagcgccagcgggagattttgcagctgctggccgccggtgactctaataaacagattagccggacgttaaatatcagcaccggcacggtaaaggcccatcttgagtcgctgtaccgtcggctggacgtgaagaatcgtacccaggcggcgatggtctttcatcgcgttagcgaaacttaa

SEQ ID NO: 184292 - DNA, 282 bp, Klebsiella oxytoca
atgaaaggcgcgatggaggtgctgacgcgctaccaggcgaaggagctgggagaacgcggaatttcggtcaatattattgcgcccggcgcgattgaaaccgattttggcggcggtgtggtcagggataacgcgcaggtgaatcagcatattgccgcgcaaacggcgctcggaagagtggggctgccggatgatattggcgatgccatcgccgcgctgcttagcgatgacctgcgctggatgaacgcccagcgcgtagaagtctccggtgggatgttcttgtaa

SEQ ID NO: 184293 - DNA, 534 bp, Klebsiella oxytoca
atgctgcggctggtaagccggttctggctgatatgctggctgctgtaccggtgcctgttctggctggtacgcatgctgcggcgggtaagccggttctggctgatacgctggctgctgtaccggggcctgttccggctggtaagcatgctgcggctggtaagccggtgctggctgatacgctggctgctgtaccggggcctgttccggctggtaagcatgctgcggctggtaagccggtgctggctgatacgctggctgctgtaccggggcctgttccggctggtaagcatgctgcggctggtaagccggtgctggctgatacgctggctgctgtaccggcgcctgttccggctggtaagcatgctgcggctggtaagccggttctggctgatatgctggctgctgtaccggtgcctgttccggatgatagaccggctgagcctcataccctggcagcggttcagaccatgcctgcggcgcagcggtatcctgcgcggccaaagccaccggatcggcaatgctatgaccgtttaa

SEQ ID NO: 184294 - DNA, 234 bp, Klebsiella oxytoca
atgctaacccaggaccagccggtaaatagcgtcagtcctgccgcccagatgcagagcagcgcgattgtgccgccgctgctgtgcagcagcggttgcagggtggtgctcagcaggctgccgatcacgccgccggaggcgaaataccagatatcatcagcgttgattgccgccagaccgcaggaagtgaggatcagcgccagcgcgccaattaaacgcagcgagacggcgaaatag

SEQ ID NO: 184295 - DNA, 249 bp, Klebsiella oxytoca
gtgttcaaggcatacgacatcatcagccaccgccgcattgagtttgacgccggtcataccgacatcgcgcagtcattcatggctatccgccgggccactaccgccagtggaaaccgccccacctacgaagccagccgtagcgaagaagccagccacgcagatttggcctgggcaactatgcacgccctatttaacgaaccgctgcagggcgaagccgccaataccagtaacatcgtggagattttttaa

SEQ ID NO: 184296 - DNA, 360 bp, Klebsiella oxytoca; identical to SEQ ID NO: 181124

SEQ ID NO: 184297 - DNA, 303 bp, Klebsiella oxytoca
atgctgacaaacgcatgccagcttatgtccgtcaggatcgcgcagataggcaacataaaagtcggggccgtatgcggttcgtgtacctggctcgccttcattctcccctcccgcaaggaggcctgctgcatgaaaccgcctgacaaggtcagcgctgtctgcacggaatgcgaacattgtcccgtttcccgccgttgcgggatgctggtcaaaaggaggacaaatacagaagttgaacacctcatgtggattattttcatctccccacattgcccagctttctgtccaggctggcagtcgtga

SEQ ID NO: 184298 - DNA, 288 bp, Klebsiella oxytoca
atgggtaaactagggtactgtattctcatgctgggtaccggcgctacttcgggtggtggccccatgacctgtgcgctctctattgatggcgttttatataagcaggaaaatgagagtatggaaattcagtcaatggacttcatcgttccgccaggtactggccagactgttgtgcgctatgggtactatctggacagaaacggtggtatgacgggcgtaatcttgtcacgttttcacgcgtttgttatgcgtaattcaaatattattcgaggtgtttcaagtgattaa

SEQ ID NO: 184299 - DNA, 450 bp, Klebsiella oxytoca
atgaacaattcactgaccgataccgtggtaaccatcttaagaacaaccgggctggatccgtatcgactggatttggaaattaccgagtctgacgtctttaacgaaaatacccgttctctcgagatcctgagccagctgcgcgagctcggggtgcagatctccattgatgattttggcaccggctattcttcgctatcgcggctaagctacttcccgttcgataagataaaaatcgatcgctcttttgtgattaacattcccgatcagaaagatgacctcgatatcgtgcggctgattatcagcatgggtaaaagcctgcatatgcgcatcgtggccgagggtgtcgaaacagaagagcagctgcagtccttacgcaaattaggctgtgacctggtccaggggtatttaatcggtaaaccaggaccgctcagttcacctgaaaataagtaa

SEQ ID NO: 184300 - DNA, 1017 bp, Klebsiella oxytoca
atggccggaaagcgtaagaaccccgctgataactggatgccgccccgcgtgtatcgcggtaaggcagcgtatgaattcaggaataaagataacaaggctatcaggctatgtgcgctctccgagcctcaatcagctgtatggctggcatatgagaaagccatgggagaagaagttgagcgcaagacttttcaggcgctggccgagcaatttatgtcttcccctgactggcaggatttagcagcagaaacccgaaaagactacacgaaatatgcaggaaaggtattgccggtattcggaaaagttaacccggataaaattaaacctgaacatatccggcgctatatggatcagcgtggcatggccagtaaaacgcaggccaaccgggaaaagagttttctttcgcgagtattccgctggggttatgagcggggttacgtccagcacaatccctgtcagggcgttaagaagttcaaagagacagcccgagagcgttacatcaccgacgaagaatacaaagcggtttacgatgttgctccggacgtagttcgtgccaccatggaaatcgcttatttgtgtctggccagacaaagcgatgtgctggctttgactgaagaccagatacgcgaaaccgggatctttatccgccagggaaaaacgggcgtgaagcaaatcaaagcatggtcgccacgcctgcgagccgctgtcaccctcgcccgttccctgccgttaaagccgggtatccgtagcctgtttgtcattcaccagaccagcggtagcaaatacacccgcgacggctttaattcacgctggcgcgacgccaaaatcgcagcgcaggaaaagaacccacacctgcagatagatttcactttccatgatctgaaggcgaaaggtgtttctgatctggaaggaagcctcgaagagaagcaggctatttctggtcataagaattcgaggcaaacggcgatttacgacaggaaaactaaaatcgtgccggttgttggtggtcagaaaaaatga

SEQ ID NO: 184301 - DNA, 246 bp, Klebsiella oxytoca
atgagacacgatcacgacatcatcaccagagaggaaatgatcgaactgacggggacaccgcttaaatcgaggcagtgtgaagcgctacgccgggccggtgtctttttcatggaaagggctgacggccatcctaaaacgacgtggggccatttcctgaacccgattagataccgcaaccagcaagaagagacggtgcgggaggaagaaccagacttcggagctatctttaatggccggaaagcgtaa

SEQ ID NO: 184302 - DNA, 186 bp, Klebsiella oxytoca
atgctgaaactcacactgaaacgaggcgatgcgcttcacgtcgtttttccggacggtaccaacgggataatcgaagcctgcgcgcgttgcgaacttgctatgcatttcccacgcagtgccaaaatcacccgcgaaaatggcgcgttccggaataaaccaaacctgattaagcctaatcagaaataa

SEQ ID NO: 184303 - DNA, 561 bp, Klebsiella oxytoca
atgacttccactactgctattgccatcgccgcggattatcagaacctgctgcaactgctggaaagctctgatgacctgactccggaaatgatcgccgatacccttgaaggcatggaaggagaactggccgataagctggattccatcatggttatcgcacgtaataacctcggtaatgccagcacctgcgatgatgaaataaaacgcctggccgaacgtaagaagtcctttgagaataaggataaggctctgcgtaagtatattctctcctgcctgatggcggccgggctggataagctgaaaacggcaaaaaatacgttcaccgctcgcaaaggtagcgtaaacgttgtgattgataataccgatcttcttcccgatgagctggtgaatactcaggttgttatctcgcccgataaaaaggccatcaaggaagcgattgaatcagcacaggccgcagcggcccagattaccgctgacggcggagagataccggaagaactgttaaacccagtgccgggtgctcaccttgagattggcgaacgttcattacaggtgcgatga

SEQ ID NO: 184304 - DNA, 2157 bp, Klebsiella oxytoca
atgaccatctacaacggcttatttgagccaaagaaatcggcgattaaagactgcggcgccgtgcagctggcgatcgccatcgatgcgccaaacaaaaaagtggccgaaagcatcatgaccggcaaactctgggaatcatacccggccaatggtgacaactatttcaaaccaaaactgtgggaacacgttgaagaccagccgctgccgaccgttggccagttcgatgagtcattcgcccagcagcatacttttgatggtgaaaaatgggtttctactgcgcaggatagtgcttccggaagtggtgctggtttacctgccgacgatgaagtgatcgacctgatgaccgtttccgcagaggaacgctttgctgctgtcctgctttttagcaccgctgcgattgatggccatctttattctcaggttgtggattatctggataacctgaaaaaccacgatggcgaatttgaagaggaagatcgctttaactttaatgtgctgtgcgccctgcaaaataatttcccggtgcaaagtatgcatgtggaaggtctgaataaccttgttcaagggattttctcccactttgaaaaccagacgccaggcaaagcggctatctctcagttcgttaaacgctggcttgagaatccgggcaagcgcgacgaactggcccccggcgtatataaaaataccgctctcagcaccagcaccgatgacaataaaacgccagtggttatttctaagcgcggctataaacacacttatgcaacgctggatcaggagatcgcaaccgcccttctcccgctggcgcctgatgcgccggtactatccggaaatcttctggacgctaagaagatgatttccgatgaccgggaagattttaaacgctggtcagcatcgctgcacaccacgccgcagatactcaaatacgaccgcgccagcatcttcggcgtggtacagaacgtaccggcgaaagatacctaccatttccctgacagcctgcgccgccatatcgattcatggctggcggccaacggccgctttgaggaaaccgaggcgggatccgttaaagaaccagaggcaacgcaaaataccccctcaaacgcgggcgaaaaagaggaagtgccgccgtcggttgtaaccgatacccaggccaaacaggcgcgtgagacgctcaacgatatgggctatggcgtatatgcctctggtgaaagtgcagagccagaagagaagttgagtgagaaagtaaaaactatcgttcaggacgttgatcagcttgttgaacgaattaaccgagaagagaacctgccgaaagctgccgaagttgtccagagcattaacgatatgcaggcaaccgaacgggacaacctcgaattgtggaaaagcgtattcaagacagatgagcgctttactacggccttctcagtaaacggtggcggaacatccattaatggcacctacatgactatgatggccacacgagagtttgggccaaaaggtcagggctggggcgttgatattctggaagaacgttttgatacaggcgcgccaattacccgcactatcaagggtgccgatggcaataacacgtgggaactgatccctgatggtatgggtggcatcctcatggagaagcaccacgttattaaaatcaggctttggtatctgaagaacgatgtacgcggcgaagaatttgcattcggctgcacaccatatatttacggcagtaaatacggcccgatttgcgatggtgaggcgacaaaaaaatcactcactgatgcaactaaaaaagcgctatccggcctcggctttagcggcgatatctttatgggcctctatgacaatccagaatatcgccagaaaaacaaagcagagtttgacctcaagaatgccagcgaaaccgccgaagatgcagcgcggttgcgtcaggagttcgacgacaaactaacccgcaacgccaataccctcgcaaacgctgtatctgtgaacgaaattaacaaggtgtttgcccctatcgcccgtgaactcgaagttcaccgcaaggatgcagaatcaaaaggagacacacagcgctcccgccacctcagtagccggttgcgccgtctcactgatatcaaaaatggacgtatcgccgaacttaataaatctgaggagaaagcataa

SEQ ID NO: 184305 - DNA, 324 bp, Klebsiella oxytoca
atggaagcgcttaccatccccgtaactatttacgttatggccacaaccaacccatatctaccaacgtcttatcactccttcacctgtgacatgtcacagcaataccctgatctgtatgtcctcgttactaccaaaacggtagaggttcccattccggctttagagccaatcgacattattggtatgcaggttaatgcccttcgcgcgaagaaagagaaaatctctgccgaagcgaagaaggagctgggtgttattgaagaccagattcagcagctgctgtgcatcgatcactctccgattgaagaaagcgacgtaccgttttaa

SEQ ID NO: 184306 - DNA, 234 bp, Klebsiella oxytoca; identical to SEQ ID NO: 97639

SEQ ID NO: 184307 - DNA, 447 bp, Klebsiella oxytoca
gtggaatacctcgaagaacttaaacgagaaatctttaactgggcagcggaaagcgggcaggagctggttgctatcgagataagccgcatgtggtttcgtcttggtggtaataccggttcgctgaagctgcaccagatcgaagatacagatggaaacgccgactggcgggcaatcaacaataaccgacaacaaatttttcgttggttgcgaggcgagaccaaagccgcgagagccaaaactctggcgctggtcaaagcgatggaagcggcgatgccggcagaacgttacgcgcgcttgggtatgtccacccagtatttaatttgtgtggccattcgtgagtttgccgcggcgattatcgcgttgttactcgacgccagagacgggccgcagcaagtcgccagagcattgcaagctatgcgagaaacacagcgcctgaccagcgtttaa

SEQ ID NO: 184308 - DNA, 222 bp, Klebsiella oxytoca
atgagaacacaagaccgcatcacctggcggaacgggtttcgccggaacggggtacaagtcccgatagaagatatcgaatcgattttcgaagagcgtcgcgctactgcgctgacaatctgggaacgctatgaactgcgcaaggcagatctgcaggaagcgggactcacccagaaagaatacgaaatcgcctgccgtcagctggctgactcgctggggatctga

SEQ ID NO: 184309 - DNA, 984 bp, Klebsiella oxytoca
atgagtatgacgcttatggccaaagcaatggcaatcaagaccggaaacccgattcgaaaactggtgctgatcaaactggctgataacgccaatgattccggcgaatgctggccgtcttacaaacatattgcggatcactgcgagtgcagcaaaagcgcggtgcgtgaccatatcgatgcgttaatttctatgggcctgctagtgaaagaaaaccgcccgggcgtaaaaaacgggaagggtaacgcgtcgaatttgtactgtatgaaacttgataaccctatgccgccaaaaagcatagcccctatgccgtcaaaaagcacaggtatgccgccaaaaagcatagcccctatgccgtgtggcggcaccataaccagtcactcttttgaaccagtcatagaacctatagatccccctaacccccagacgggggaaggcgatgaaaaaattaattctgatgcaaaaaaagcgctggaattttacaacgagcaaacaggtacccgctgccgtgacctgaaaccgtttgtgctgatgctgacgccgaccaccacccgggcagggtacacgctggacgaattgcagttagttatccgctgggtgctggccacgtggcgccgccgtggcgatagcctgccgaagccagcgaacatctgccgggtaaaccgctttgatggttatctcgctgacgctgaagcatgggcggtgaccgaaaccgatattgatccggaagccgttatgaacggctacaacgaaatttttgctgacgttctgcctgctgctgaactggacactgaccgccgccggatgatcacccgacttgccgcccacatgaaaaacaaaaccacgggcgcatttctgggttatttcgaaaaattccgcgctgacgcctccgatttttactttggtgaaaatggcggatggcgcgccagctttgactatctgatgaaaccagagacattgcgtaagaccagggagggcgctttatga

SEQ ID NO: 184310 - DNA, 1407 bp, Klebsiella oxytoca
atgatgcagatgatgtattccactcaggaactggaatgtctggttcttggctgtctgatgaacggcggcgccacgcctgatgcctttgatgtgattgccagcaccccgagcgaggctttcagcgtcgcatactacaggcagatttacggagtgatcaaagcgcaggccttgagcggcggcttaattgacatgatgtacattagcgaggccatcggcggacaggggacgctggccaatctcgccgatatttgcaaattcccaacatcgatcgtcaacctcaaaggctacgcaaaaaaaatggtaaaggcctggcgaagccgaaccatagcgcaattacttcaggatggtgcggatggtattcgtgatgcgataaaccaggaacagcgcgatcaggttgtcgaaactgccgtggcgcagctgctggacatgactggcgacactggcgacgtacagccggtacacatgagcgaattattgccggtgtacatggaaaccatgcagaagcgcatggacggtgaagagggtacccgcaacctgaaaaccgggatcgaggaactggacgatgcaaccggcggaatcaacctgcaggatttgattgtcgtcgccgggcgtccgggcatgggaaaaacagaatttgcgctgaagattgtcgatggtgttactgctgccggcagtggtgcgttgatattcagcatggagatggccgctgcgcaaatcgtagaacgctctctggcgggttctggcaacatgtcggtgtcacgcctgcgtaatcccctcgatatgcaggacgaggactgggcgcgctttacagcggccatggagaccatgaacgggcgagatatctggatcgttgatgctaccgatctgacgattgagcaaatccgcgccgttgccgaaacgcataagcgccggtatccgcatctggcgatgatcgttgtcgattaccttggcctgattaaaaaaccgaaggcagagcgtaacgacctcgcgatcgcccacatatcccgaaacttaaaaactatggctatgcgcctgcatacgccgacgttcgcgcttagccagctttcccgcgctgtggattcccgcccggcgctccagcgccgcccggtcatgtcagacctgcgcgattccggttctattgagcaggacgccgacagcatcatgtttctgtatcgcgatgaggtttacaacccggaaagcccggcggctggcgtcgctgaaattatcctgggtaaaagccgcttcagtgctgcaggcgcaattatttatcaggaatttaaaaacggacactttctgtcaatggatcagcatgttggcaaagagaaaacacgtatccaactggaggccgctaaaccacgaaaaccaagccgtaaatactccgagaagtacaacaccgattcattttag

SEQ ID NO: 184311 - DNA, 669 bp, Klebsiella oxytoca
atgaccacgaatttaaattacccaaaaccagtaaaaccggacgatggctgcaactggcttcccgttattctctggcgcatgaacgccggcgcgcgcgcccgtagccgttccgtgttcgttgcggcaccacgtccggcacctgtacccggcatcaccccgcaaaaaccgattaaacgtgaaattatcgcccctacggtttccggccgcaggcgtaagacccacatcggcaccgtgatttattccagaggtgaaaaaaacgttcgcctgagtgaaggcgctaccgtctggtctgctggctctaatgagcatttcgataaaaaaacgggccagcgagtcggcagtattggccgtcaccgtctggtgctggagagtatccgcccattgcgggccagcgacgaacagcaggacgccgggtgcgtcaccgcgcagcagctggtagccgtgatgaaaggcaaaacgctttcttaccagggcatcctggcattaatccagaagcactatccagattgtcaggtgacgattaaagaacttcacgatcgcgtgttcggcatgttcatgtcgaattacgtgggtatcacccgtcacgacgatatgccggtggttcacttcacgcttaacagcgttgatccccgttattacatcgagtcagcgaagaacaagagggcataa

SEQ ID NO: 184312 - DNA, 234 bp, Klebsiella oxytoca
atggccgggcaatcagattacttgccgcccggcttaccgctcaatcgcgccaaatggccgcaggagtgccagatcaaagagcactacgacatgcgcgcctcggcactcatacgccagctgttcgagaagaaagttactcgacaggccatcgtagaacagattgcagcgacgccggaaagctaccgggagtttttcaaagagagattgaatttttggcgggagaagcggacatga

SEQ ID NO: 184313 - DNA, 171 bp, Klebsiella oxytoca
atgaaattttcaacacctgattttatgcattgcagccgcaggacgctgatgctgttcgtactcagtgcaaacgttgttggctggatagtcattatcgctcttatttgggctggatgtgaggtagctcagtgggcgctggaatatctccgcagtagtggggtgctggcgtga

SEQ ID NO: 184314 - DNA, 591 bp, Klebsiella oxytoca
gtgaataacaaatacaccctgatttatgcagatccgccctggacgtaccgcgataaagccaaagatggcgagcgtggcgccgggcataaataccagaccatgactgtgctcgatatctgccgtctcccggtctgggaactggccgctgaaaactgcctgctggctatgtggtgggtaccgactcagccgctggaggcgttgcgagtagtcgaggcgtggggcttccgcctgatgaccatgaaaggctttacatggaacaaatgctacagccggcagaccgacaaactggcccttggaatgggccatatgaccagggcgaacagtgaggattgccttttcgctgtgcaggggaaattgcccgcccggctggatgccgggatcgttcagtcattcacggccccgcgtctggagcattcgcgcaaaccggatatcgtgcgcgaaaagctggtgcagctgctgggcgatgtaccgcgtattgagttattcgcccgccagtcttcgcatggtttcgacgtctggggaaaccagtgtgaatcgccagcggtggcgctgttgccggccattgcagaatatatcggggaggtagcatag

SEQ ID NO: 184315 - DNA, 285 bp, Klebsiella oxytoca
atggccgaccaaaccattctcgatttgaaagacgctctacttgatagcgcataccgtcgattattggaactggagaaattgctattgcctgatgtctctgaaaccgtatggcccgttgaagttagcatggttttttctcagatagaaaacgccggggatctcccagcgcaccaccagcgccgcctgcagcaccatatcaaccggatgtggctggaaaaaatgccggtaccgtcaattatcgccgcggctcgttcgctggccagtgccatggagaaatacgcgtga

SEQ ID NO: 184316 - DNA, 2190 bp, Klebsiella oxytoca
gtgagagagagcgaaatcatcgttgataactttgctggtggcggcggagcctcaacgggcatcgaattggcgatagggcgcagtgtggatattgcgattaaccatgacccgaacgctgtcgcgatgcacactactaatcaccccgacacgctgcattactgcgagtcggtttattcagttcgcccgaaagttgcgaccgccggccgccgggttgggctggcatggtttagtcctgattgccgccacttctcaaaagctaagggtgcaaaacccgttgaaaaagcgattcgtgggctggcgtgggtaacacttcgctgggggctggatgttgaccttcgggtaatgatgctggaaaacgtcgaagagtttaaaacatgggggccgctgcttgcggctgaaatgcgaccagatccagaccgcgtcggtgaaacattccgggcatttgtaggcatgctgacaaccggtatcccggcgaaccatccggcgctggcagaatgctgcgaatttctgaacatttcgcttgatagcgaagatgccgcacggctggtaaaagggctcggatacgtcgttgagtatcgagaactgcgcgcttgcgactacggcgcaccgacgattagaaaacgattcttcatggtcatgcgccgcgacggtaagccgatagtatggccggaagccactcatggcgatccgaaatcaccatcggtgctggctggcaaactggcaccgtggcgtacagctgcggaatgcatagactggtctattgccgcgccatcgatatttgaccggagaaagccgctggcggtgaacacgctcaaacgtattgcccgcggcatccaacggttcgttatcgacagtgcagatccgttcattgtgaaatgcaaccacacaaccacccgtgggaaatacgactgtttccggggacaggcgctgggggatccgctgcagacgattaccaaaacccacggatttgggctggcggtaccgcatctgacaaaattccgcaccggtgcaaccgggcagccagtcaccgagccggtaccaacagtgactgctggtacgtcaaaacgcccgggcgggaatggtcacgccctcggtatcgttgaagctgagctggcaccgttcctggccggaaatggcggcagcgagtatcaggcgaagccacggccactggataaaccagcacataccatcctgaaagagtcccgcgcctgtatggtcacaccatacattgcgaggattgggcagacgggattcggcggtgaccgtatgtcttatgacgcaaaaaaacctcttacaacagttacaagcaaaaatgaacatttgttactgacaccaatcattgcgcgccagtttggtggcagcatcggccaccgggcggacgagcccagcgcgacgatcaccgcgggcggtggcggtaaatcgcagctggtggtgccaacgttgattcaaaccggatatagcgaaaggcccgggcaggctccgcgtgtgcctgggcttaataaaccgctgggtactgtagttgctggtggcggtaaacatgcggtcgttggcgcatttctggcgaaacactacggcgggaactattcgggcccaggagtagggttggacgagccagcacactcagtgactacggttgatcatcatgcggtagttgcggcgcatctcatggtgaacaataccgggcatccaggcggatccgttgaatcacctgcgcatacggttacgactggcaatcaccacgccgttgtcgcctcccacctggttaagctgcgcggtacttgccgtgacggacagcgaactgatgcgccgatgccgactattaccgctggtggtcagcacgtcggggaagttgataccactctcgctgttgagcattacgacgagcagcgcgcgcaacaggtgttagcattcctgaaagagtattgcggagccgatagcaccgggctagtggaaatcgccggggtaacttatcgcatcgttgatattggcatgcgcatgctgcagccgcacgagctttaccgggcgcagggcttccctgagtggtacatcattgaccaggattaccgcggcgtgaagtatgcgaaggataagcaggtcgcgcgatgtggcaacgctgttccgccgccgttcgcggaagcactggtaagggcaaatctgccagaaatgtgccaggcacgggaggccgcataa

SEQ ID NO: 184317 - DNA, 339 bp, Klebsiella oxytoca
atggctaaatcatccgcagaacgtaaagccgcgcagcgagcgcggcagtctgccgccggcaaccggaaaattgagctggttctcgatgcgcaggaactggatatgctggcgcgtaactgcaccgcccggcgcccgggccgtgaaccgtacgaactggccgagtacatagccatgctgatccgtcaggatgatgcgcggcttagtgggcacatcaaatcgatcagcaaacgtctgtgtagaaaatgcggtgagtcgctgccgatcacctcctgcccgtgtgctggtgattcgcaatgctgggtaacgcgagggtggcacgaaactaaactgtcagcatag

SEQ ID NO: 184318 - DNA, 192 bp, Klebsiella oxytoca
gtgattgataagaaagatgcaggagaccttctccccgatgatggtgatgtgctgataacatgtgaaaagggcaaaattaagaagaccagaattgtccattccgatgagcacgtagcgacacttaacgcgttgtttgaattagctaaattgacgggttataccattatcaaaccagacggcaatatgctataa

SEQ ID NO: 184319 - DNA, 594 bp, Klebsiella oxytoca
atggcgcagtattcatttataaaatcagatggcgatgtgttaatccctgcatcgcccgacgcccgcgagtttgtgaagaaaattcgctcgggcgctgttctgtattccgattttaagcaggcgcgaaaccctgcatttcaccgcaagtttttctctctcctcaatctcggttttgactactggcagccatccggcggtgctatttcccctgcagataaaaaactggtgcatggttacgtgcagctggtggcccactatgccgggcatgctgacacattgcaggaactggcggaccagtatttgcgcgatgaagcagaaaaacgcgccgggaatatcagtgcggttaaatcgtttgaagcgttccgttcctgggtaactatcgaagccggtttttataccgaataccagatgcctgatggcaccactcgtaaggaacccaaatccatatcgttcgcaaaaatggacgatctcgaattctcccagctttataagtcagtcctcgacgttctctggaacttcattctgttccgcaccttcccgacgcagcaggcggcagaaaacgcagcctctcagcttttcagttatgcggcctga

SEQ ID NO: 184320 - DNA, 477 bp, Klebsiella oxytoca
atgaaattcaatattcgctctcatatcgtcgagatggatgaggccgacgccttgatctttgtgggttaccccatccacatcggctcgaatggttatgcaaaagtcaccggctggcattttggcaaggaaagataccttcatcgcgtcatcatgaatgcgaggcctcatgatgttgtagatcacattgatggtaataagctcaactgcacccgctcaaatctgaggatctgcacacaggccgacaataccaaaaatgtgggcttgaggagtgacaatagctcaggaattccgggagtttactgggtatccactcgcctcaaatgggcggcgcaaatttcagttgatggcaggaccgttagtttaggccgctttgatgaaattgccgatgctatcaatgcccgccggaaagcagaagatttgtattacggggagtttgcagccagcaagggggtgctttgtgaaaaagcgcgccagtaa

SEQ ID NO: 184321 - DNA, 348 bp, Klebsiella oxytoca
atgtcgggtttaaccagaaaaaaaattgcggtgcttgagcttattcgcacctgttcgaaaggagtgacgtctgccgaagtgatgtattcgctcggtatgtcacgcagcactgtgttttttattttggacagcctgcttaaagacaatctcatattccgcgcccacaacgaaacaggacgaaattcacgtcgtatttatttcccaactgcagagctggcggaggagttttccggaaaaaaaatccctatgagcaaacgtgaaagctttttcgactcctgccggcgccacagcaaaaactacatgatcactctgctgctgcggagtgcacgacaaccaccaaaagagtaa

SEQ ID NO: 184322 - DNA, 318 bp, Klebsiella oxytoca
atgagcgacaaagatatcgagcagcaaataaaatccaaaggtttaaccgcggcccgcgttacgctggatgattttaaagaaaacatcgtcaatacagagatcgttaaacacgtttccgtatcaggtcaggtactccgttgggccgtactgaccacgaaaaatggcttttctgttactggcagaccttcatgctcagcctcttcagaaaacgacaacgctgaaattggtgagcagatagccatcgaaaacgcagaaaatgaactgtggccgcttatggggtacgcccttaaagagcgcctgcatggcacaggcttctga

SEQ ID NO: 184323 - DNA, 234 bp, Klebsiella oxytoca
atgatcaccattgaaaacgaagaggcaaaaaagctgctggaactgatgaaagcccgctttcttaaagcccacctgaatacagccatgtacggcgcagctgcttacgcgaacggcaattctgaccgtgtgattttacgcgcagtaaaaaacggtgacgcccctgaactgaaaatcctgatggccactatgggtctcatccctgaagaggaagacaacattgaaaaaactgcatga

SEQ ID NO: 184324 - DNA, 261 bp, Klebsiella oxytoca
ttgaaaaaactgcatgagttagacaccagtattcaggtggaaatcgtcaaaagcgctggagctgttctggctaaaaatttcggctggcccggcggagcggatggaacgcaggctgcaaaggatatcgtcaccgccgttgtagatgcattcctgtcgctttacccggaagaaaaaacgcaggcggaaaaaatcgaagatccaaaaaacgatcccgaagaaatcccccaaaaacggaaatacacccgccgcagcacggagtaa

SEQ ID NO: 184325 - DNA, 453 bp, Klebsiella oxytoca
atggccgcgccaaaaggtaataagttctggctggcacgcagcaaacacgggagaaacccaaaattttctgaccctgaaaagctgtgggaagcctgctgcgaatattttgattgggtggaaaaacatcccctgtgggaaaccaaagcattcagttttcaggggaccattactaaagccagactcccgaaaatgcgtgctatgacgcttagcggcttgtttctgttcctcgatatcgaccggaagacgtgggaagcatacgcgaagaaaaaagatttactcccgatcactacgcgagttgaaagcctcatatatgagcagaaattttccggcgctgccgctgatctgcttaacgccaacatcattgcccgcgaacttgggctggtggagaaaaaatctgttgagggtgatctggaaatgaccgtcaaggttaagcacttcaacgaaaaagaatag

SEQ ID NO: 184326 - DNA, 1395 bp, Klebsiella oxytoca
atggcagaaattatcctccccgcgaacaactggacaccacgccctcatcagcgccgggcatgggctgaaattcagggtgggaaaaaaagggctgcgctgtgttggccgcgccgttacgggaaagacgatttcagcctgcacatgacagcatgtaaggcattcgagcgtgtcgggaactatgcccactgcctgccgcaggcgaaccaggtaagaaaggctatctggaaggcggttaacccgagaactggacgtcttcgtatcgatgaggcttttcctcatgaactgagaagaaaaacgctcgataacgagatgatgatcgagttcatcaacggttccacctggcaggcagtcggcagcgacaactatggtgcgctaattggttccggtcatgtggggattgttttctcagaatgggcactaagtaacccctctgcgtgggcatttttgcgaccgatactggctgataacggcggctgggcgttttttgtctccactccacgcggaaaaaaccatttctacaaaatgttccagggcgggttaaaggatcctgacaactggttttgtgaccatctaagcgctgacattacgctgcatatcccacctgaaacactcgctcaagagttgcgcgagatgcaggcagagcgcggtgaagaagaggggcaggcgctgttcaatcaggaatacatgtgcgactggaacgctgcaatacccggcgcctattactcatcgatcttggttggactggagaaggccgggcaaataggaaatgtgccgtgggatccccagtatgaggtttacacgtcatgggacctgggcattggcgacgcaacggccatctggttttttcagtttatcggcaaagaggtgcgcgtcattgattattacgaatcttcaggcgttggcctggagcactacgtaaaaatattgcgcgagaaaccgtatacctatgctgagcgtcatttcttcccacacgatgtacgcgcccgagaactgagcaccggcgcatcacgagaagagacgctgggcaagctggggatacgctgtaatgtactgccggccacatcggttgatgatggtatcagcgaggtgcgtatgatgctgcgatcctgctggttcgataagaccaaatgcgaaaaaggcctggaggctctgggagagtatcaaaaagagtgggacgacactcgcaaaatgtataagccaacccctctgcataactggacgtctcacggtgcagactcgttccgctatggttcagtaggcagtaagtctttgcgaagcggcaaccgccacacaacccagcaatttgcccagtccaattacgatccttataaccctcccggacatagccagcagttttacgctgattccgaatgggatctgtacggggataactga

SEQ ID NO: 184327 - DNA, 1665 bp, Klebsiella oxytoca
atgtcagaccaaaaaacacacgaaaatgaatcagagcgtatcggccggatattgcgtgagcaaaaaagtatggaaaccgatcgttctgtattcgaacagcactggcaggaaatagctgagcgtattctgccgcgcagtgccgagttcaaggggactaggcagaagggcggtaaacgtaccgagaaagcgatagatgctaccggcgcgctggcgctgcaaaaattcggagcggccatcgagtcagttatcaccccgagaacacagaaatggcacactctcagcaatgagcgattcgctgatgatgaagaggtgcagcgttatttccaggaggttcgcgatatcctcttccgcctccgctatgcgccgtgggccaatttcgcttcgcaatctcatgagcattatatttcttcaggcgcattcgggaccggctgcacgttcgttgataacgtggtcggaaaaggcccgcgttattgcacatatcatttacgcgaaatctatttcactgaaaactttcaggggatgatcgatatcgtccaccgaaaatattgcatgactgcccgccaagctattcagcaatttggtgaagaaaatcttcccgaacaggtaaaaacaaccgcgaagagtgacccttcaaagcagttcaacttcctgcaccgcgtcgagccaaacgataagcgtgacatgtcacgacaggacaaagagggaatgcctttccggtctgtgcatatttgcatggatggcagcaagattgttcaggagggcggctactggtcacaaccctacgcaatcagccgctattacaccgctcctggcgaggtttacggtcgctcaccggcaatggttgtgctgccggatatcaagctgctgaacgaaatcaaccgcgccatcatcgagggggcacagatggccgttcgtccgcctatgctgctgccggaagacggcatactgcaaccgttcaaaatgatgcctggcgcgttgaacttcggtggaatgaatcgtgatggtaagccgctggccgtgccgttgaataccgcaacagatttcagcgtggcgatgacgctggccgaacagaagcgccagaccattaacgacggattttttatcacactgttccagatcctcgttgataacccacaaatgaccgccactgaagccatgttgcgcgcgcaggagaaaggccaactgctggcaccgaccgccgggcgaattcaggctgagtttcttgggactttgatcctaagggaaattgatattgcttatcagaatgggctgctgccggatcccccggaacagctgaaagaatctggtagcgaatatgatatcgaatataccagcccgctggtgcgtctgcagatgagtgaagaagcgagcgggattatgaacgtcgttaatgctgccggtactatcgggcagtttgatcagaatatcgcccgcaccctgaatggcgatgccgcattgcgctttattgctaaagccagtggcgcaccgctgcaggtggttaaaaccgaagaagaaatggctgcgcaggatgccgcagatcagcagcagcagcagctacagcagttacttgctgcggcgccggtggctgcaaccgcagctaaagatttcgcccaggccaaccagatagcacaaactccagcgccatcgccggcgttacagggataa

SEQ ID NO: 184328 - DNA, 327 bp, Klebsiella oxytoca
atgatgaaccgtataaaaagtctatggctcacgctgaaccgtgcgcgggcttttcagtcagtctttggcaccccggggaacatgacgccggaacaaaaagttgtcatcaggctgctggcgaaactctgccacgtcaattcttccagcgttgccatttcaccaacgactcagcaaaccgacccatacgccgtatttgtttcggaagggcgccgggaagttttcctgcacataaaccactatctcggcctgtcgcaatctgatattgccgcaatgatcgccgaagagatgaacgaacttaacgaggacgacaacaatgaatctgtttga

SEQ ID NO: 184329 - DNA, 726 bp, Klebsiella oxytoca
atgaatctgtttgaacgcttaatcctgcgccgtctgatgaatgcaactgttgaaggtggggaagatggtggcgctgctgcaggtgtcgattctgccgcactgcagcagaatagcgatccgacccagcagcaaaaccttttaaatccgggcgagcagcaacagcagcaagccgcccagcagcagtcgcagaccgccgcacccttcctcgaaaaactgcctgacgaaggtgatgcaaaaggctggcaggatctgtacgcgaaactgggccgcccggaaaaaattgaagattacggtattaaagcccccgacggtgtagacggcacgtttttgaatacagctctgggctggatgcatgaaagcggactgaataaaaaacaggccgaaacggtaattaataaattcaacgaatatgccgccggacaacaaaaaagtgcccaggaaaatattgctaatcaaaatgccgctaaccgggaaaaggttattaagtcctggggaagtgaagtcgaggcaaatactgcaattctgcagaacgcggtgcaacgattcttccctgacgcggtgattgagaaattcaatagcgcgggcctgctcaatgaccccgaccttgtaaatgcagtcctggcgatcggtaaagcgctgggtgaagacaaaacagttactgccgcagcgccgggcaatgcagcagaaaaagacattgctcaccgcatgtggccgaacatgcaataa

SEQ ID NO: 184330 - DNA, 996 bp, Klebsiella oxytoca
atgccaacacttaccggcttaccgactctctgggacgctgcaaggttgcttgatcccgatggcacctctgcgaacgtcgccgaggtcctggaccaggacaacgaaatgctgtgggattgtccgttttatgaaggtaacctgccgaccggcacgcgcatcacaacccgtactggtttacctgctgtgtactggcgcaagctgaacaaaggtattccggaaagcaaggcaaccactgcgcaggtcgatgaaactaccggtcttcttgaggcccgctctcaggttgatgttcgggttgctgcgctgaatggcaataccgcaggttttcgcttcaaccagtctaaaccgttcatggaagcgatgaaccagaaggctcaattccagatgcttaacggtacgcttgttggacaaccggaggcattcctgggcattgctccacgtttcagcgatttgtctgcgcctaatgccgacaacatcatcgatgctggcggtactggtgcgaatctcacctcgatttacctcatcgggtgggcgccagacaaagtctacgggattttcccgaaaggctctaaagcaggtctgacacaccgtgatctgggtgagggtgacgcctttgatgatgacggcaaccgcttcagggcgttgatggacctttacacttgggatctcggtattgcgctgcatgactggcgctatgtcgtccgcatcgcaaacattgatgttaccgctctgcgtactaacgctaatgcgggtgcaaacctcatcaaactgatggctatcgcggaagagcgcattcagtcactggttggtgtaagcccggcttattacatgaaccgcacactgcgtgcgatgctgcgcctgcagctggtagatgccgtgaaaaactcaaccctgaccatggaaatggctggtggacgtcgcgtgatgttctttggagaggtaccggtgcgccgggttgaccagttaaaaatcggggaagatcaggtcgtcgcctcttaa

SEQ ID NO: 184331 - DNA, 474 bp, Klebsiella oxytoca
atgtttgtagatgcccagcttgaattttctgactcccaggtgatcaccgcctcggcagccagcacgaacattatcgatttcaacccggcgtttaattacaacactttgattgatgcgggggcaggcgagccgacttttctggttgtgattccgtcggtcacattcgcggctgcaggggctgcgacgctcgcgattgagttgcgcgcttatgccaacgaggacaaaagcgacacaccaactgtgattttctcgaccccggcaaaagcagtggcaactctcaaggccggaaggcctgcggttgtcgtggcgttgccctcggccgactataagcgatttttaagtttgcaatataccgtggcaacagggcctttcaccgcgggcgcagtggatgcattcatcacgaaagatgctcagacttggcgttcttacgccaataacgtcgagttcgccgcgcttaatctcagcaacgcttaa

SEQ ID NO: 184332 - DNA, 606 bp, Klebsiella oxytoca
atgaccggtcagacagatatcatgaatctggcgctggtttccttcctgggatccgatcatctcatggatcggggtgaacaggataaaaacacgcgcgtgatgaacctgatttacaatccactcctcgaaaaattacagcgcgaatatgcatggaatttttgcgcccgcagcgtccagctcaccccgctaaataaaacgcctgtcattgactatcaatacgcctatcagctgcctgttgatttaatggtactggtatcggttggtgatatgtactatggccacgatttcaccgagtacgatccgcgcctggtaaccgctgaatacagaatcgaggggcgggagctgcttacgaacctaccgccgccgttaagtctgcgctatcgggccagggtgaccgatgcttctaagttcgattccacctttgttgacgcgctggcgtgcatgctggcaatccgttcctgtaaggcggtgaccgggaaagacacgttgaaatcgtcattgcttgatgaatttcagatgattatctccggcgcagttcgcgccaacgccattgagaagccaagcgaaaaatttccgccctcaacatggatggaggcccgtttgtaa

SEQ ID NO: 184333 - DNA, 2277 bp, Klebsiella oxytoca
atggcaaaaatccgccccataaaacgcagcttcaatgccggcatactttcgccggtaatgtatggacaggtcgattttgataaatgggccagtgccgtcaagcgtatgaaaaactttatacctctgccacaggggccagcgcgtcgccgaggcggtacgcaatacgttggttccgtgaaggagagcacacagcgcgtctggctgtcctcattccagttcagtaccacagaggccttcatacttgaatttgggccagaatatatccgtttctggtttaaccacactcagctcctggacgacgataataatattctggaagttccgacaccttggggggctggtgatttaacacgcaacgggaagtttggtttatcgctgcagcaatcagcggacgtgatttatatcacctgcacaaacggtctttaccctgtttataagctgaccagaaacacaaatacaaactggagtttgtcaaaagcaaaattttccgggggaccgttcgctgatattaattctgacaaatccagcgtcgtttacaccgatcagttcaggatctggtctgaggatggcaacgatttgcctgatggcacaccaaccactacaagcctgtgcaacatcacggccaacaccgatatttttcaggcttcgcatgtagggtgtcttttttacatcgaggccagcactgacgcagtggatgatgataccggtcatagcggttacatacccgcctgggccgccggcacgacggaaacattctctgctggtgtcttctgccgttcagatggcaaatattacgaagatatggatggcaccaagaccggtaatacgcaaccgacatggacagctggcgctcacagggatggtagcggcggtgatgcgtcactctggcgttattcaggtggtggttgggggatcattgagataacggcagtcaacagcgccacatccgcaaccggaaagattgtcactgaattaccacctagtgtcagaaacaccgttggcaaaacatataaatacgcgttcggggattggtctgatgttctccgatatccccagtttgccgcgtttttccgggggcgcttggtcttcgctggccggcaaaaaatatggtccagcgtcgcgggtgatctgcagaacttcagcccaatgacaaatggttatgaggctgaaagcgacgactcaataaatgaccgtatcgatgatacgcaggacactatgcaatggcttgtagcgtctgccggcaaagtgtttatcggaaccgctgggtatgaattttcctacggcgagcaaagcctgacatctgttttcggtgccggaaatacgaaggtagaactcaatagcacaatcggaagcaacgaggtacaggcagagcgtctgtttgatcgcgttgcgtttgtgcagcgtgccgggcgtaaggtaatgattgccgcctatgattccggcagcgattcattttctgcgacaaactccagcattctggcgccacatattttcacttcagaaattattgcactggcgtaccagcaagagcctaaccgcattctctgggtattactggaagagggtaagcttctgggccttacatatgatgccgagcaaaatataactggctggcatgagcacgagactgggggaacggtagaaagcatcaaggtcattccggatattgacggcggccgtgatgagttgtggatggtagtaaggcgaaccataaacggcgcaacggtacgctatctggaatacatgctgccggaatatgacagcgcgtttatcacccaagaatgggcgcgggtactggattgtatggcgacgtataacggtgatgcgacaaccgttatatccggcctggagttcctggaagggcaaaccgttgcagtggtaaccgatggcgcgacgcacgcatcccggctggttagcgacggaaaaataacgctcgactgggaatcatcggtggtgcatgtcggcctcaataacgcggctgaaatcgttaccctaccgctggaaggtggcataaaacgctttgccaaagcacggctgcgtttcctcgatacgctgggaggtaagttcggcgatgatggcggcaagtatctggataaacttcgcgccagggattattccgacaatatggatgaggtgccctcgctgtttaatggtgtggtaaccgttccgtggccgggcgagtttaatgaaaatggcagtatccgtattgttcaggaccttccgcagccaatgaccatcgtcagcatcgatccagtcggagagattgaagatgactga

SEQ ID NO: 184334 - DNA, 402 bp, Klebsiella oxytoca
atgactgaacccgtaattgtccgccttgaggagttccacattcatgaaatattccaagacccattaccgcaggaagctgttgcggcgctggtatctttcccgtcgtttgcgatggaatacggagataagacacttgcggctggcggtgccatccagatagcacctgggcgtgtcagactctggctaaataccgtccccggcgcagaggtattccccgttcatattttccgcactgcccggaaatttaccgaaatcgcgctggccgaaaatcatcgagtggaatgcatctgcaccgataacttatccgcccgcgtcgcaaaaatgctcagttaccagcaagacgctattatccgcagttatcagcctggctgtgacgccaggttattttcaatcgtgaggtga

SEQ ID NO: 184335 - DNA, 282 bp, Klebsiella oxytoca
atgctgtttaaacgtaaatccacattggaagccgatcccgcaacatggactgctggcgccgctgttctttctgctggggtgggtacttattcagcgatatccaatgccaacaaaaaaggttcagtaataaagccttcatcgccggttactcaggatacctctatcgctgagtctgatgatctgctgcgtcgccggcagcggcaggggaatcagggaaacgtaacgggagcctctggcaccgccgttaatacttcaggtcagaaaatgttgctaggtggctga

SEQ ID NO: 184336 - DNA, 432 bp, Klebsiella oxytoca
atgatcgtttcgtttgagccgtggcacctggcggccattacgccgcaaccgcatcaggtcggtagtatcaggaatgagcagcacgcggggaacatagccagcgtcggcgcgtttacctgtctgcacaacggccagcctgtggctataggtggcattgtgccagcggataaatatggactggttttcgacagcggtatcgggtgcgcctggatgattatttcagctgacattcctcatctctggccggagatattcagggcaacccgccgggaactacacaaggcgctggtgaactatcaccgtattgaggccagcaccacattcccggaaggtgaaagaatgctggcgatgctgggtatgcaatgtgaaggatatctgaagaagttcaaccaccggggcgaggattcaactctgtgggcgataacgaggtaa

SEQ ID NO: 184337 - DNA, 495 bp, Klebsiella oxytoca
atggattctgtaaactggcagacggtcggcgacagtttcaaaaacaatgcagcgccaatagcacaaacctcaagctctgcattaaacgcattttcatcgctaagcagcgcgcggcagcaatccagtggactgaacaccaacgcgcagctgcttgaccagcaggcaaaccaggccattttaaacacaggccagcagtcggcgcttattcgtcgccgcggtgggcaatttcagggagatcaggatgcgcgcattgctgcgagcggtaccggctttggcggcactaatgcgctactgcgccggcagacagcgcttaacatacaggaagatgcgaacgcggtagctaacgagggcatcctccagtctgacgcgctgaagaatcaggccagcgccacacgccagcagtcgaaagcgtcacgaccgggtttgctggggttcctgggggcgggcgcgcagattggtagcacgttccttggcgcaaaatacggacagaaatag

SEQ ID NO: 184338 - DNA, 2715 bp, Klebsiella oxytoca
atgcctaacttacctttttacgatcgtcaggtgacgacacaagggcttggcgccgggccggtggaattacccaataacacaaccgatcagcagatgctgaatactggtgcggatgccgccgccagggcaacagcgtctattacgcgacaggtttcagacacggctttacaggacggcgcgttgaaactggacaccatcaaatacaacctttttaaccaggttcgccagaagcaagggcaaaatgctattggctcttctgatgatgccctacagcaatttgatcaggccgccggcacactggggcagaccataccagaaggcaggcgagatgactggaacaggcaggtagcggcaacacgcctgcagctgcagagttctgccgattcgcatgaatatcagcaatttcaggactacagccgtgggcaactggatggacgtctgcagatggctgtgaatgatgccgaaacttatcgcagcgatccgggaaactatgccgttaccagggcaaaggcgattgatgctatccggacctacggtgctgcaaacggacaatctgatgatgaagtaaacggccggatagccagacttgatcagcagatgtctcagaacgccacgcaggcatatattgcagactggcggacaaaacaacttacctctccaacgactttcacccctggcgacctttcatctgacaaagttttctcagcgatgatccctgcggaatctggcggccggcagtttaatggcaatggtcaaacgcttacctcgccggctggcgccatggggatagcgcaggtcctcccagcaacagctgaagaaacggccaaaaaacatggcatgcagtgggatccacaacgctttatgtctgacgccagttacaacatgcaaataggtcagctatatcaccaggatcttaccaaaaaatacgggggtaaccaggcgctcgcggtagctgcatataacgccgggccgggtgcggtagatgactggattaacggtacgaataaagccggaaaaaatccggcgctccttcgtttaggggatcccaataaaggggagatttccagcgatcagtttattgccgggataccttttagcgaaacccgtaattacaccatgaatgttttaagccgtgctcagtctttgccgccggaagctgagatatcgcagatccagaaaatgccctggtatcagaatgcgagtccggagcagaagagccagtttttaggtcaggtatccgctgaagtaaaccggcagcgcgcgtacggcatgcagaacctgcaggacaccatgcaaaacaatatggctcagatgcagaacgggatcatgcccacacgtgacgtcactcgccaggaatatctctcatatctgccgcagggagcaaccgcgccacagcttgaacaattcaaccgccaatatgatgagtatgaagcgacaaaagcgctggtaccgacatataacacgataatgacgcagcctgtcgcgatggcgcagcagagtgttcaggcgctttacccgcaacctaatgacccggattttgatcgcaagttgtctttgtaccagaaagctaccgcccagttgcagcaggtaacgcaacagcgaaaaagtgatcccggctcgtggtttatgaaaaactccccactggtgcagcaggcatacagcgcatggcaacaaaacccctcagattcgactatggcccaatcatttatcgcctcagtgcaatcagagaaaaaccgattcgggattaatagccagaaggtgcttcctgactcaatcgctcaggctatggccgaaggatttaacaacaacaaagaaacaacggttgaatccatcaggcagcagctgaacgcttttggtccatattctcaggcagttggccggcagattatggggcagagtaaaaatggtcctctggttggtgcattatcatctggaaacccgcgggcgagtgtgccgctgtggcaggaaaggaacacgccaacggccagcctgaaagagtccgtgattgcgaaaaacgggaaaggatcggattcctcagtaacgcaagaatgggccgatgcgtctgcagatttccgtcagacgatgcttgtgcagcccggcggggcaggaagctggtccacgctggacgaacaggggcagcggctgacgatgatcaacgtattgcgtggaatggatgccagcgcggcagcaaagcaggctgctgccgatatgttcaccagtcaatacactgtcaacgatacgtatcgcgtcccgacatatcttggctatcagcctgattatattgcccgcggcgctagtctgtttaaagacaaactgacagccgatcagcttcagcctcttaattttggtagtaaaacgcctgacgaattcaccaaatcgcagacgctttacgaggtgaaaaataacgctcactgggtgaataattccgatgattccgggctggtgctttaccttggaaacaacgtacagaatgatgccgacggcaatccggttaccgtcagctttgccgatctcgacaaaatggcgaaagctgatccctcctggtggcagagcgttaaaaaattcgcatcccaggagacgccgtatacaccaggaactgaacgagatgcgcgcgcgcagaaacttcaggggctgcgggaaacctatggcggacagtcacaaagcggcgtgtcatttgctgaaggaatgagggataccaatgccaatattcgttga

SEQ ID NO: 184339 - DNA, 1707 bp, Klebsiella oxytoca
atgccaatattcgttgatgatggtgacgccgggtctggcctgcagcagccgggaagtaatttcgaaagtggattcggtcaggctctgggggctgcattttcagaagggatgcgatcggggccagccaacgccgggaatcgttttttagaatctgaagcctatgcgaatgatccaacatctccattggttgatcagcagacggctcagcaaaagtttgacgcgctgggtattaaaaatatcaaagttccagaacagggtgtaacacaggcatacctggaccatgtaaccgagacaaaccgggcaacacgggaacgaagggctatattgcaatccgcgccttccggtgtggctactcctcttatttttaccgcgggtctggctggggcaatgacggatccgggtaatcttgctctggggtttgttcctggtttgggagaggtgaaagctgccagcgtagccggcaggtttgctcagcgatttgtacagggggccagcgccggtgccgtccagtctctggttgccgaacctattaatgctctggcgtcagcgtctgaaggggatgattacactctcgggcaggcggtggaaaatttctttatgaacacgatcgccggcggcggcctgcatgcttttggcggcgccgttcgtgattctattgccgccaggcgccaggcgcgttttcaacaggataatccgcaggcggttgcagatgctgcgccggcagggcaggcggatgcggttagctctgcaggattaacccctgataatgcccctgggtttaacgatcgctttgctgatgctcaaacggacctggcaagaactattaacagcagggttgatgattatgcgtattcacgagcctggaatgaaaatattcaaccttaccgcgaatctttagctgcgcagcttgatggtcagtcaccctgggtgggagaaattaaccgtcagattcgtgaaaatgagttagccatacagcaggaagaacagcgtttccgggatttatcaaagcagtatcagggccaacgcatgacgcgcaagcaagcggagtcccgggcgcgaaaagatgttgacgcatggcgccggcagaccgaagaaacaaacgcacgtctgcgcgatgaactggcttctaatcgtgatgcagaagttgccagaggtaaattacgccagcttgatcgtggtgagatcccggaggatttcgcggatttgattgctggcaggtctgcacagattaaacaggggcttcaggtttcgcctgttgccggtggtgtaaaaacggcggcagaacgcttcaacgagtctaatatctttgtccggcagaacgcttttcgttcagcgatcaggcaagctgcggacggatattcacctgatattgaagatttctttcgtcttggcgatccggcagaaagaaatacagcactgaaccgccttcggacacaggccgataaccagcgtcattctgatgcggccgcgcgggcagcgagtgccgatgcagagagaaccatccagcagcgcggagacgacgaactgcgggcggcgcaggaagatctgcaatctgaaatggaactggcccaggcccattttaacggactggaaaatcaggcagagataaacgcccaccttgcggaaataaatgccgctgcgggtgaccagagttttgcccaggcagcgcgggcatttgccgcatgtatgttgaggagagcgatttaa

SEQ ID NO: 184340 - DNA, 2925 bp, Klebsiella oxytoca
atggcacagggtgaatttttaactgcctgcgagcaagcagtaaacacggccgccgggcggcagctggctgaagatgagatgcaggacctggtatcacggatggaatcaacggtttcccgcatacgcgccgaaaatgaggggttatctctcgaagaagccgcgctccgtgcagccgatgaaattgcgcgtgatgatgctctggcgaagcatatcgaggcccgtaaccgggtaataaatatgcgtctgctgcatgaaaatcttcagcgcatagacgcttttggtgggcgcccggacctggctttatccgcgattatggttgggcgcaatgaggcggtatccggttcccgcgacagcgcatttaacaacatgcgccagctgcgtgatcattatatttctggactggcgaatgacctggaggagcagggtgtgctgcctgttttttccaatggctctcttgatcaaagtgtggcagatgccatgtggcgcctgggcaataagcaggatgtaagccatcttcccgaggatgcgataaaaattgcacacattctggataagtggcaggaaaaggctcgcgttgactccaatcgcgccggtgccgctatcggcaaaataccgggttatatcgcgcggcagtcccacgatatccataagatccgtaccgccggttttgagtcatggcgcgataccattctgccagaactcgatcagcgcactttcgaaggcctggacatcaacggccagaatggtttgacggtacggaaagccaaggcaatgacggaagaccaaatttatggacgagcgcggccggcaaaaccgttaaagcctgaaaatgttggcgcactggcgcagcgggcagacggacgtttttacattaaaggtgtcgtcagtgaaaacgtcgatctcatgcgtggtaacgggcaggttgtacgggcgaactttcgtgacggtaatctgctggcgaacggacaggatatcgatctcggtgatatcgtcggtttccggaacgacggcggcgagtgggtgagtgtcgccgggcgaacgccgcgttttgatccgactgcatcgggcgggctgtcaccatcacaggctgtcattgatgattttctgcataatgtctacgttggcctgtcctccggggttcacctacgttctgatcggccggactggatgagcggctttaagggcgggggcagtaatgttgcgcgtcgtgccagtcaggagcgagtgctgcatttcaaagacgggctttcttggtaccggtataacgataaatttggcgtgggaaacctccgtgaagcggtaggcagtggcctgattcattcggcagaaactacaggcgtaatgcgccgcatgggtaccaatcccgaaaacatgtttaacgaactggccgatcgcatagaacagcgctacaaagacgcgaaagatgacacggcgttaaacaagttccggcagaaacgaaacacctccctgaccaatcagctgaaagagataacaggccagacaaatattcctggtaatgccgcgcttgcccgcgttgcggccaccacgcgcgcgatagaaaccatgatgaagcttggcggctcaatgatttcttccttcaacgatattgccacccaggcaatggagatgcgttatcagggacgaaatatgttgggctcggtctgggaagccacggcaaataaagtgcagctgacgcgctggaaaaatgcggaacgccagcaggttcttaaatcgatcgggttgcatgctgatgcgatgaaagacgagttaatttatcgcttcagcgctgacaattcgatgcccggtagagttaacagggcgatgcgaaattattttcggctgaacctgcaaagctggtggacgaacagcagccgctatagtacgggaatgatggtttctgagtggatgggggcgcatgctggaaagtctttccgtgatgtgccagatgagctgcgccgggttctgtcgatgcatggtattgaagaaaacgagtgggctgcgctcagtaaaatgaaactgcgcgctgcagatggcaatgcctacatgacgccggacggagtggcggatatcccccgcacggatatcgaaaattatctcaccaaccgcggcataaaaattaatgaccgctcggtagaatatgcgagggatcttctttccgataaggtccgcggctatattctcgatcgcgttggcgtagctctgaacgaaccggatgcgcgtacaatgtcgatcatgaagcaaggtatgcagcgcggaaccgcctatggcgaaatgctccggtttgcatggcagtttaaatcattcactgccagttttatgcagaatgcgatcggtcgcgagctctacggtcgtggttatgattttggttcactaagccagaataataccttccgcaataacgcactgacccgtgcgatgcgcaatggaaacggtgaactgatgggcgttgcccagcttttcctatgggcgacggcttttggttatctctccatgcagacgaagctcatgttgagggggcagaccccgcgtccggccgacaacgtcagtacatggacagcggctatggcgcagggtggcggtttgggcatcttgggcgattttctctttggcgaatacaatcggttcggtaataccccagcgacgtcgctggccggcccctttgcatccgatgccgcgcaggctataaacctctttgggctaacgaaacagggtgatgcaaaagccgctgattactttaactttgcgataaatcacaccccttacatgaatctgcacatcgtgcggccggtgatggacttcctaatcctaaaccagatgagggaatggatgtcgcctggctcactgcagcgttatcagcaacgtgtgaaggaagagcagggaaacgactttattatcccgccgtcgcagtttatgcttgggcgatga

SEQ ID NO: 184341 - DNA, 333 bp, Klebsiella oxytoca
atgccattgacagagcgggaacaggctttaaccgcagaaaatgagtattatcgtacgcgcgcaatagaaaggaatttaggtatcttttcgattgttttattaatcggtgtaattttcaattttattttttatcccacagacaatatcatcttgagcgtaatattcggtggtgttctttgtgggtatctggttgcgttagataaaagagttaagcatcagaaactcctggataatatttgcataaatcattttagcaagccctataaagccgcaattattgagtttagtgactttttcagacagaaaaccggatcgccatccacctggatttga

SEQ ID NO: 184342 - DNA, 216 bp, Klebsiella oxytoca
atgaaaatgacacacagagtttccgaggtcataacctacgggacgtcaacggccagcgctacgtattggttttcgcagttgcttgattcatacacccccggccagtgggcagccattggcgtcattggcagcctggtgttcaccgctttgacctttctcgtaaacatctacttcaaatggctggcgtaccgccgcggcaagttgtcggaaggatga

SEQ ID NO: 184343 - DNA, 540 bp, Klebsiella oxytoca
atgaccaaagacgaaatttttaacgccattcttgggaaagagggcggctacgtgaataacccgaacgataaaggcggaccgacgaactggggaataaccctggccgtcgcccgggcccacggttataacggcgatatgcgcaacctgacacgccagcaggcgctggatatcctggaggctgactactggactggcccgcgtttcgatcaggtatctgcgctgtcaccgactattgccgctgagctgtgcgataccggagtgaatatggggccggcggtagccgcaaaattcctgcagcgagttttgaatgtgatgaacaaccaggggcggctgtacgcggatatcgttgctgacgggcagatcggaccgcgaaccattgccgcattgcgcagctaccttttcgccaggggcgaaatcggcactacagttatgctcaaagcacttaacagcctgcagggtgcccgttatatcgagctttcagagcagagagcagctaacgaagtatttacttttggatggttcaacagggtgacgctatga

SEQ ID NO: 184344 - DNA, 345 bp, Klebsiella oxytoca
atgaaattgattatctttgccgggtttgtgctgctcgcaattatcgtcctgctgctgatccgtaaatactcctcattggagtttgtcagtcatgcccgcctgctttttaaaacgtggtctgtttggctggcttccatcggtacagcgctgggcgcgtttgttcagtcgttcccggatgcggccctgcaggcgtgggctatccttccgccggatattaaaggctatcttccaacgaacattctgggcttcatcagccaggcaatgatcgtactggccgtgctggctcagttcgtccggcagacaaagttaaaggaccgggctgattcgatgagggcgccgcaatga

SEQ ID NO: 184345 - DNA, 297 bp, Klebsiella oxytoca
atgaccgaaattctctctcttctgtccggtggctggggttatatcgccgccggcaccgcagtggtgatcgcattagtggcttcctggtttaccgggaagaaagttggtgccacccagacgcaggcaaaggctgatgtcgaggcggcgcaggaagttactaaacaggccgaggcggcaacccagcgccaggcagatatcgttaaggtggtgaaaaatgttgagcaggataaccagtctgtttccgatagcgctgctcgcgaacgcatgcagcaatcaaagtaccactccgacaattag

SEQ ID NO: 184346 - DNA, 228 bp, Klebsiella oxytoca
atgaacatcatcaaatggcttctgacgaagcaccaaccgaaaaccaacataaaggaactggatatgacagctattaccatttcactgactattgctgatgtggcaaagatcgttaacgacaattctgatattaaggcggcagttatcgctaaatacttagaaaccaacgcccccgaactggtcattcctgatcttcctgtggttgagaccgttgaacctaccgcgtaa

SEQ ID NO: 184347 - DNA, 2670 bp, Klebsiella oxytoca
atggtcgagaacgacacttcatcggttgagtatcagctatcaaccagcactggcccctttgatatccctttctacttcattgaaaacgggcatattgtcgcggaactgtatacgcagaacggtgacgattttaacaaaaccacgctgacagttgacgttgattactatctaaatggtgctggcgataaggatggcggtcagctaactctgctatcagcgcatagtggcgcgacgctactgatttatcgtgatcctgatgcgacgcagttaaccagttatcaggcgaccggtaagtttccagcgacaagccacgaacgtgcgcttgataagctgacgatgcttatccaaaaatttggttggtggtgggattctttggctctgaaaaagccaaatattttcgctaactattatgacgcgctcaacaaccgtattcgtaatctgcgtgatccctcacaggcacaagatgcggccacgaagaactatgttgattcagcagataatggtttgcagcagcagatagccagcaactttaaacgctctctgcgtgttcctgattcctctattaaccagctaccgtcggcagaagaacgagcctggaaggggttgggctttgatggtgccgggcagccgaaactgcaggatcctgcgggaactggcttatgggggtatgttccggcaattggctcgtttgaaaaaggttcgctactcactcaacgctttgaggttcttctgtgggaatccacggatgaatactggcgctgggatggggcaatgccgaagatcgttttaccaggtagcacaccggatacggctggcggacggggtaaaggaaagtggctggatgtcaccgatgcgactcttcgttcaaacctgggttcaggcgacggagccaaactcgttggtggaataggatttgtctctccggaaatgttcggctatttacagggtgtctcacctgatgcggttccgtactatcaggctgcggtcgatgaaggccacgccagaggattgcccgtgaaactcacggggaaatattacgccacaacctttccccacaaagtcacgctgcccggtgatgacggaaccgcttacccaggatgggtgactgcggggaatgatgcaaatattgccgcggaatcagaaaatcatatttatgcggcgattcgactttatcccgactccgttattatcggcgacagtatgcagaactgcgcgttaatcggagactgggattcggatacgcctgtgattaacaataaccagcacattggttattttatttccggtgactcatcagacggttatatccgcccgcaactggttaatcacggtgtgcgcaacttctttatcggtcgctacggaaatggcgttcttgaccggtccactgaagataatttcctcatccgtgattgctgtctgacgggctggtttatgggggccgactccgtttgcaacggtttcgttgtcgcccgtgattgctttaccggcgacgcctatggcggggcgtggacgcaacgaaatgccgcggtcacgattccgtatctcccaccctatccggcggcagagattttcaaagtgggctgggttgatgccatccggtatacgaaatatcacttttacggcaagccccggctgtttggtcctgcagatgaggcgattgatacgtggttcgatacgtatatctataaatccgccaactctgcgcgaacctccgcaggcggcaggctgacaaacaatactgccagcggctattcagcgcgttcgtttcccggtattgcgggccgggcattcaccgtcctcagtcgttatggacgtgcggtaaacggggtttgccttgacgatgtgaaggtgctgggaacccaccgcgtgccgttctacaccgacgcaggcagttacaacgtgattcacacgtcatacgttgaaaagacctgtctcgttgatatcacgacgacaaccattgccggcaatcagttctataccgactatcaggacccgtggaatgcgacactgacaaaagcgcccgcgatggtttgtgagggtggtatcaccgtcgacaggactgtcgtttctgctggcgtggctacgcatccgttcagccagaagccagcaacaatcaacggcccgctcatcatcaatccattccgtgatgacaccgaggactatactgctgcacagattgcagagtggaacagtgccgaggggaaaacggtatatctctatgatttccgtcgtcagtacagcgtccagcgcccgatacggttttttgagaacactcaggaagcattccagtattacaagggtgtctggacgccggttgtcaaatgcggctcggaagtcgtgacgctgaataccaccgtgggaacctaccgccgctcagggcggttagtgcatgcgactttcagaatcgaaaccacgtcaatggcactgacgacaggtggcgcggtagtgatatcagggcttccgttcacggttgccgcactgagcgatgggggattaacggtgtccccgataatctgcagtcgtgccggttcggggatcatcctcgcgcaaacgaacccgaccacaaaagatattttgttgctgacaaatagctcgcctgccgctctctcaataacgggtggaaccggtttaactatttacggctcagttcagtacgttctgacagaataa

SEQ ID NO: 184348 - DNA, 258 bp, Klebsiella oxytoca
atgtttacgatagagaaagaagttgcggtcaatcaggtaactgccgatggcatttcagtcggaaccacagcattaaaagtcaccctgacatataccatcgagaggattgagcttgaaggtgagaacggtatcgctttttacactgttacgtctggcgctgatactgagggtgcgaggaactacatcccattcacctattcaggaagtggcgatccgctgtctgaggccgaggaagcgctaaagttaagagttaaatga

SEQ ID NO: 184349 - DNA, 288 bp, Klebsiella oxytoca
atgaccacgctttatcgatacgacgaaaacgggctatatctcggtgaaatagagcctgtaatcaatcctgtgtttaatttccccgatgaacccatcgacaaaggttattacgatgcagatggcaatccgccgtctccgccagctgtcggggatgatgagagggcggtgtggattggctaccggtactcggttgagcctaaatatctcgtatttgcgaatacgactactgtgccccctggcgatgaaccagaaggtatgatcttcaatggtataaaatgggtcaaataa

SEQ ID NO: 184350 - DNA, 654 bp, Klebsiella oxytoca
atgggcgtcagtcaggccgcagcttttgacggctggaacataacgaattgcagctactttgatgcatcgccccgctctttaagctctcaggggtggggagttcaggttctgaactgcgccaactttacactcaatggcaactgctataataacggagcaggactttttgcagcagccaacggaggaaacgggcgcataaacggatgttcaaattacaatgcaactggcgtttatgtcggcggcagtacaacatcttactatggccttttcaatgatgagacccctactggtcgtgttgacccttctacagtttgcaatggatacataccaagaaacaggccaagaaatctaaatgctttaagggatgcatatgctgcatgttctttcggtcaaactgtaagcgggtctatttcattgcagggtgttgttaactgctcagtagagcttgtttctgatggcagatacaggattaattttaccacgccatttgaatccacattttacaggccggaaattgttgcacaggcaatgaatcaggatctaatcgtccgcccgattgcgaaagacggcagctactacacgtttgaggttcgtaactcatcgggtgtggcactggcaaacttcattttatgtgaattcaaaaaggcgatttaa

SEQ ID NO: 184351 - DNA, 783 bp, Klebsiella oxytoca
atgtctcttgatttagttatgggtgattctgtttttgcatccgggataggtattgatgttcctgtatcagaaaacctgctttcttttggtcttgggggcgatcttttcggtgtgaatcttgtagaagatggcgtgcaaccgacaattgtcggtgcacctgccagactggacgcatactcaacgctgcttggtccgggagggtatcttgatctgaatattaaggagtcggaaaacttcacttacttttcagtgttcaaactgtggaattctggcgggggcggaaatacgcagcttataggcacattccagagttatgcagcagatggcactaccgcagttgttggatcggggattgttcttgaggctcagggataccgtgatgttatctgttcaacgtacgatggcggcactggttcatcgtctgcaaacaacgtgataataacggatgtttctgatctgccgacaacagaagctgcagcctcctggcgctgccttattggctgctatgacggaactggcattaacggcactccgcgactcaaacgaattatggataaaacggccggaaaatccggttcctctctgacgccgacgggtgtggttcgtgatatgcgtgggacatctactatcagggtagggaatactggccctcgggttactcaaacgaaatcgctcgcatttatgggatatgcttgttacgaccgccagttaactaacgcagaaatggatctgatgtataaccggtttaaagatattggtgaagttcagggaatgtcactgtaa

SEQ ID NO: 184352 - DNA, 2193 bp, Klebsiella oxytoca
atggcctttactcccccgctcgggagcacctccccggaggtgttgctggataatgccacgcgcctcgataaactggtgaacggcccggaggccaccatcccggatcgcgccggagaaccattagactcatggcgacggcaacaaaagaaagttgacgataccctggttaatttccaggagaacggcggcgctatgggtttcagttctttgcaggaactgctggcctttacacctgataaagtcaatgttctggctgtcgataccagtacaggagaacaatatttgtggaatggtaccgagtgggtaccttctgaataccaggtcaataagcagattaaatcgcttaacgaaatcgttaagaaaagccacagcacgaagttctttcatcggtggaaggacaggatcggaactattatcgccgggtggaaaaacgatgatgtgggcggtgtttattttctgtcacggctgctgaaattcggcccgaatggtttttttggcgcgggcatgcaactgtcagaaaatgagatatcgaataaaaccatcgcattcaaaaaggggctggacggtaaaaccagaatcttcgataaacgcggcgtgatgctggcctcgattgagaacggcaaactgcagatggcaaaaatgaatattgaaaccatgctgcagttagctgttaagtccgggaatacttctctaaccatcaaaaaagatggcaaggggatcagcgtttctgacaagcggggagtggtatgtttcaggattgatgaaaggggttacgttcacggtaattttgtgaataaaggcgggagcgccactccggttttgactgaggaacagattattcagcagcttgaaacttcagcctttgcaaagcagtcaaaccgcttcaataaaattttcagttgctccccaaagtcccgtaaaaaagtaaaagtcattcttgtttacgggcagtctttcgccgctggcgcgcaaagcaatgcagcgctcacgactacgccgctttatggaaatgtgatgttgggtcagtcgcctcgaggatcattcttctctaaccctccggcagggagtgaggtatacgggccggttggcggggagaataaattttatcctttgcatgaagtttgtcaggacgtggacggaaccattatcccgcaaagtggatatggcgaaacgatttgttcaacggtaggcaatgagttcaagcgcctgcacaacgaagcaatgggggtcgccaatgacgatgacatggttgtttgtgtcggtagttgcggtgtatccgggcggtcgatcgcgcaactacagaaaggagcatccccggagctttacaacagagttgaaacctttcttgcaggcgtcgcggaggcctgtgcagctgatggggtggagtttgaggttatcggggtcatttacctgcagggagaaaatgataattccgccagcaccacttactatgccgcccagtcacagactatgcggcagaaccttatcaattcctgtaaggcggcatccgggcagaccttcgatccaatttatttgattaaccagattggtaacacctatatcaacacaatgggcgtaccacaggcgcagaacagactgccggagcaggccgacaaaaccattctggttggttcgtatcagggactgcctaatcccggcgcacatctctgctcgaactcataccgcaagctgggttgcctcttcgcgcgggaactatggcgctattactctggtaatggtgatttcacttttcggatactgaaagctgttcaccgcgaggacaaagtttatttgtctctaacgccacgggtagcgccactgaagttttctgctgttcacgataaatggacagagacactccacgcagataaagggataacgctctcagatggtgccgggacattttccccggaagattttagcgttgaaatagtttctgaccgtgtgatccgcattaatgccagtcgtgccttaaccggagcagtgactgtatcgttgggggataaaagccataacgggactcataatattagcgactcgtcaaatgaagtcggtggacttaactgggtatacggaataaacggtcagtatactcaggaaaatataccttctctcgttaataaaccttacgcgctcaataattttgccgccattcaacaaattcagtcagaggaaataaaatatgtctcttga

SEQ ID NO: 184353 - DNA, 3078 bp, Klebsiella oxytoca
atgacgataaagttttacccgtcccggctaccgggtgaacccattgaaacgcacgagcatggtgtgctgacgctgcatgagtggatgagcagaaatgtcccgagctattcacaggataaaactcatcctgtcgtgatcgagctgaacggccaggcagtccccccggcggaatggccgttatgtttgttgcggccagacagtgatgtgcggatatatcccattccttatggcacgggtcttgaaattgccgcgtgggtttcggtggccgtatccattgcgtctacggcctatgcattattctttgccccaaaaccagagctgggcggtttttcatccagtaacgcttcatcgctggatctgtctccggctaaagccaatacagcgaagcttggcgatcccgttagggaggcttttgggcgaaaccggatttacccggattacctggtgcagccggtaacgcgattcgaccccgctgatcccaccagaatgacggtagaaatgtttgtctgccttggatatgggcgtttctcctataccggtggagattttcgggtaggagaaactccggcgctgaccttaggcgagggcttttcatataccagctatgggcccggcgataatgtggccggggatcgtcgcagcgagatatggttcaactcaacggaagttgggggaacgtcgagcggcagcggcctagatatggctcagactgcccctgaagccagtgatatcgttgctgatgccatgaccgtcagcggtgcctctgtatcgttttctggcctcgatgtcgatgatgataatgatgaagacgaggatgagaataaacttcctcctggctggatcgccggtgcaattgtcaccctgaaagcgccagtgaattatcaggtatccatcgagggcggttttaacgttctgacaggcgacgtcgtgtcagagattgcgccattcagcggaatgcctgtcaccctaacgtttaacggtactgactatgacctgcagatcgccacgtatacccctcaccaggacgccgttccgggaacagggggagcgactgcggtattacgcgccagtgcgtcgccgtcaacgtatgactttacgacaaccagccagacctttgctctgacctggcagggtatcacctataccatatctctggtcgccaactacggcacaatgtctggcttgctcgcagcgattaatggcgggttgaatggttcggggctcattgctcaggatgatggcggcgtgatacgtatcgtcgagatctccagcccctggcgtggcggttccattacgtcatctttcctgcctgcgtcagtatttggtgacagcccggtatttactgctggtgcagcctccagcggcggaagccctgcggtaacagccagcgtcacgctggcatacgattctggcactgccttttccggattgccggaaggaacccagcggatttccctggcgcatcgtggcaacgaataccagatagcgtctactgatggcccctctgcgaccgtacagcgtgtggttaacggtgtcgttgacagcacctggtcaggctttatgacccgtaccgtcgtggattttgccgcgtctggtattaacgataatgaaacctggctaggcccctttctggcctgcccgcaaaatgaagttgtggacgccttcgaggtcaactttgctttcccaaacggaatttgcgggttccagaacaacgggaataagcgggtccgccatgtcgagtatgaaatccagtatcgcgtttatggttccggatcagggtggacgagtaagccaggggtttacgcgcttaaaaacattaatggcctcggttttacagagcgttttgatctgtcctctcccgggctggtggaggttcgatgccgccgccgtaacgagcagggtagcaacaacgcgagagacagcatgttctggcaggcgctcagaggtcgtttgctttcccgtccgacctcctacgcggggatatcaacaatagggatcacggttgaaaccggcggccagctggcggcgcagtcagacaagcgtgtgagtgttgtcgccacgcggaattatgatggcggtggtgacaggacaatcagcggtgcgttcctgcatcttgcccgcagtctgggatatcgcgacgaccagatcgacatttcggcactcagtacgctggaggcgacctactggacgccaaggggcgaatattttgatcaccaggcaagcagtgacagcacgtcagcaaaggatattttcgacaaaattgcagaggctggcatggggtattttctgctgtctgacgggttgctttctgtcgggagagagggcgtcaaaagctggacagggatcattactcctcaggataccgtcgaggaaatgcagacgtcattcagggtcccgtcggaggatgattttgatggcgtggatgtgaaatatatcaaccctgtgacctgggcggaggaaaccgtacagtgccggacgccggaaaatccttttccgcgcaaaacggaggcatacaccattgatgttgccatgaccgcagatcgcgcctggcgtatcgggatgcgtcggttaatgaaatatctccaccaacgccgaacgtatacggctacgacttcaatgctgggatggtgtcatgacttcggtgatcacatcattttgtccgacgacattccaaccgggaaaacccaaagttgcctgattgacgcgatgatttacgactttcaggaaattacgctgcacgttacggagccactggactggagctacgcgaatcctcgctgctggatacagtttcaggacggtcgaccatcatcgcgaatgttcacgccgcaacgggtagatgatttcacgctgacggtgccgtacaacgacgacctgcatcccggcgactggattatggacgacccagatattgatctgccgaagttattgttctgcgacagtgaaaagggggcgcggcatgggatagtccaggaggttgccccatcaggtgacagcaactgtcagattactgcacctgaatataaagaaattttctaccagtacgacgacgccacataccccggcgacgctgcttaa

SEQ ID NO: 184354 - DNA, 474 bp, Klebsiella oxytoca
atggcagatattttctacccggatgaatacctgcccatgccgcttatggacgggtacgggtttaagcccatatcacctttactgcgaacggagatgacgtccggtcgcgctcaacaacgaaggcgatatacctcaacacccacccaggcatcagttaaatggatttttaaaactgatgctctggcgcaggtgtttgaggcgtttttcagggatgcgcttaaagatggccagtcctggttctatcttaaactccagactccagtcggggtaaagccctataaagccaggttcgtggatatttacgaagggccgacgctggtcgcgccaaaatactggcagtacagcgcaacgctggaattatgggagcgcccgttaccgccttctggttggggaaattacccggaatggctggcgggccagtcgttactggatattgcgcttaacagagagtggccgaagcatgacaattcttga

SEQ ID NO: 184355 - DNA, 729 bp, Klebsiella oxytoca
atggctgctactgcaaccagcgagattttgaatgacacaacaaactccataatcaacaacctggacaatgttcgtactggcgcagtctcgtttaaagacggaatgtctaatatcttcagctcccttggagaaacggtgattaagacgctgatccagatggcaacacaggcattaatcaccaaagcgattatggcgtcattcggcggcggagcgggtgggttgttcggtagtctttttggcggtgccagcggtgcggcaagtagtggtaccgctattcaaagcgcgggagctaatttttcattcaacgctctcggaggcgtttacgattctccgtcactttctgcctacagtaacggcgtgtacagcactccccaatattttgcgtttgcgaaaggggcaggtgtattcggcgaggccgggccggaagccatcatgccgcttacccgtggcgctgatggttcgctgggggtcagagctgttgggcgggaatcaccggcggtacagaacgctgcgaagcagatccaggcacagccacgaattgctgtcagcgtagatgcccgaagtacgttcaccggtaaaccggatgacataacgatgcaggcaattgagcgaaggaatgacgctctggaacagcggatagttaacaccttaaccgccgaagtaaataacccccagaagaaattcggtcgggctatttattcaaatctccaatctaaaaaaccaagatag

SEQ ID NO: 184356 - DNA, 2592 bp, Klebsiella oxytoca
atggcaaccctgcgtgaacttatcattaaagtttctgctaactctcagtcatttcagaccgagatagcccgcgcgtcacgtatgggggctgattattataaaacaatgcagaatggcggcaggcaggctgcggcttcagttcgggaaactcgccgttctgttgctgagcttactgaccagatggagtcagcaaaggctaccgctcttggattgaccggggcatttgctggtgcttttgctacgggacatttaatatccctggctgatgaatggaattcagtaaacgcccggctaaaacaggcatctcaatcaactgatgattttaccagctctcaaaaacagctgatggatatcagccagaaaacgggcacatctttttctgacaacgctaatttattttcccgttcagcagcctcaatgcgggaatatggttacagctccagccaggtgctggatattactgaggctatttctactggtttaaaactttctggcgcgaatgctcaggagtccagttcggtcatcactcagtttagccaggctctggcgcagggcgtgctgagaggcgaagaattcaatgccgtcaacgagagcggcgacagggttatacgggcgcttgcggcagggatgggggttgcgcgtaaagaccttaaatctatggcggatcaggggcagttaaccattgataaagtagttccggccctcatcagccagcttggtaagctccggaatgaatatggtgagttgccgcagaccgtttcatcgtcggcaacaaaagttgaaaacgcttttatgcaatgggtcggtggagctaatgaagcgagtggcgcgacaaataccctgaccggattacttgatggcgtagccaacaatattgatcaggtcgcaactgctgccggagcgcttgttgccgttggcgctgcccgatatttgggaaatatggctcttggtgccagctctgcaacggctgggattattaacgccgcaaaaagcgaagtagctttagctgaagcccaggtcagagggacgcaggtttcgacagctcgtgcgcgtgctgcagtttatcgtgcccagcaggcactggcagcggcgcggggtacagacgcgcaggccgccgcagaaaaacggctctcactggcgcaggagtcacttaaccgtaatattcaggccagagtatccgctcagactgcactgaactcggttactgctgtaggttcccggctcatggggggagcattaggcctcgttggcggtattcctgggctggttttgcttggtgccggtgcctggttcacgatgtaccagaatcaggagcaggccagattatccgctcaggaatatgcaaacaccattgatgctgtccgtgaaaagacaaaatcaatgtccctgcccgaagtttctgataatgagaccaaaacccgtcaggcgctggaggagcaaaaccgtcttgttgatgcccaggcatctaaagtaaaaagcctgaaggaagagatcgctggctatcagtatgtcctgtctaaccccggaccaacaaccagtggcggtttcatgataaaccacctgacttcggtcgaaacggtcacccgtggtctggaagaagcgacttccgctctggccgttgaacaggagaggttagctcagatgcaggctaagtctgagtcgatccagtcggtactggaagggatagagaacaggcgaatagcattaatccggcagcaggctgcagaacagaattcagcatatcaatcgttattaatgatgaacggtgagcatactgaatttaaccgtttgctgggtctcggaaataatcttctcatggcccgacaggggctggtaaacgcaccagtacgcttaccacaggtagacctgacaacccagcaaacggctgcacttgaaaaaagccgtcgtgatctggcgctttcaaaactcaaaggtgaggacaaggagcgcgcacgactgggttatgctgcggatgacctggggttaactaacgacccacagtttcagaccggacggcaggagttgattaataacggcctgaatgaatggagaaacaaccaggaaaataaacccaagccaaaaggaaggcatgggaaaaccgaggcggagaaaaccgaagatacctatacccggctgattaaacagcaacgggagcaaattgctctttccagccaaaacactgagctggcaaagatgaaatatcaggttactcagggggaattatcttcgcttgaaaaatccaaaaaggaaacgttgctgcacaatgcggcgcttattgatcagaaaaatatcgctgaacagttaaaaacattccgcgaaggtctggccgacagtaatactgccgcccgggaaagggggaatatcgatttcctcggcgcgggacagggggataaagcccgtgaccgaatgaaggaaatggcggatattcgcgctgattttctcaggcagcagcgggatttacaacgtgatttcagtcgtgggcagatttccgaagacctgtataaaaagcaaacggaagcgcttaaagcagcgcttgccgaacgcctggatattcaggaggagtattacaaaaaaaccgatgaacagcagtaa

SEQ ID NO: 184357 - DNA, 234 bp, Klebsiella oxytoca; identical to SEQ ID NO: 135203

SEQ ID NO: 184358 - DNA, 339 bp, Klebsiella oxytoca
atgaaaattggaccaatgcggcatcggatcaccatccgtaattttattactacacgaacaccgagtggtcagccgacagaagagtggtctgacggcgccactatctgggcagaggttaagggaatcagtgggcgagagagcctgacagcaggagcagaaagggcggatgctaccattcgtgtatgggttcgatatcgcaaagatatttcggcatcatcgcggcttcttgtcctgaatggcccctacaaaggagtgacattgaatgtcaccgggcctccggtgccagatagcaaaggtacccggctggaaattctttgcaaacaggggaccgaaaaatga

SEQ ID NO: 184359 - DNA, 333 bp, Klebsiella oxytoca
atgacggtaatcaacactgaaacagccatggaacatctcaggctggatgatgaaatcgataaaacgatggtggaggggtatcttgccgctgcggaggatgctgccatgcaatttctcaaccgacgctttttcgctgaccaggctgctctggatagtgctgttgagaatgaaagcgctggcgatcgtcctcttatcatcacgccctccattcagagcgcggttcttcttatagtgggctggttgtatgaaaaccgcggggatgatctgagtcctgatattccaggccccgcacgctggttgctgaatccctggcgaattcaaatgggtgtttag

SEQ ID NO: 184360 - DNA, 246 bp, Klebsiella oxytoca
atgtcagagatcaccgcatccgagcaaatccgcctggatatcatcaagaaagttaactatgacactgcagcggccaagctggccattgactgggtaggcgacagttatctgaagtccgaacttttcgcagactcctttgatcgtgttttcacggaaagcgagattgtctcgaagactcgtaaagcgattcaggaagcgaccgaagcgctggctctttttgataccggcgctgagcaggccagctaa

SEQ ID NO: 184361 - DNA, 276 bp, Klebsiella oxytoca
atgggaatcgaagctatcgcggggctggtggttgtcatcctgggtgctatcgctggggcattcggcatcggccatgcacgcgggaccagtaaggcggaagccaaagccgatcagcagcgtaccgaagagaacgccgccgccaccgtcgccgcggcagaacgtaaggcggaagtcacgaaagaggccaacgatgtactgcagactgttagccatttgcctgataacgacattgatcgggagctgcgcgaaaagtttacccgccccagtagtcgttga

SEQ ID NO: 184362 - DNA, 627 bp, Klebsiella oxytoca
atgaatcaatcacaattccagaaggcggctggtattagcgccgggttagctgcgcgctggtttccgcatattacagccgcgatgaaagagtttggcatcacttccgctatcgatcaggcaatgttcattgctcaatgcggccatgaaagcctcgggtttaacagggtagtggagaatttcaactacagcatcgccgggcttgctgattttgtgcgttacggcaggttaacgcaggaacaggccaattccctcgggcgcagccagtcggaaactgtgttacctctggagcgccagcgggctatcgccaacattgtctatagcaagcggttgggtaacaacagggcaactgatggctgggtttatcgagggcgcggactgattcaaataaccggactttctaattaccgggactgcagcgccgggctgcaggttgatctggtggtacagccagaattgctggagcagtcctcttacgcggcccgtagtgcagcatggttctatgtctcaaaaggttgcctgaaatatccgggtgatcttgtccgggtgacgcagattatcaacggcgggcaaaacgggattaataaccggcgcgctcgcttcctgaaagcaaaatcggtgctggtgtga

SEQ ID NO: 184363 - DNA, 282 bp, Klebsiella oxytoca
gtggtaataaatgacccggcagcgctggccaatgcggtgatatgtgccgttattgtctgcgctttgatgttttatcaacgtcgcggtgccaggcatcgccctggtatctccattcttgcttacttgctggtattgatttacgcgagcattcctttccaatttatctttggtctttacgtacagtcccactggctggtggtaatggcaaacgtgatgatatgcgccgccgtgttatgggcacggggtaacgtggcgcgtctggtcgatacactgaggcactaa

SEQ ID NO: 184364 - DNA, 396 bp, Klebsiella oxytoca
atgtccgatcctttaactggtaccggcctgatttttggtggcgggttaattggttccgtcgtatatggcgttatcactcataccgattttggtgtggtatttggtgcttttggcggcgcggttttttatgtggcaacgaccgcaaacctgacacgtggaaggcaaatagcttacttcatgacgtcgtttattgtcggtgttctggctgcaggattattaggctcaaaatttactacctggacaggctatacagatcgtccgcttgatgcgctcggtgcggtggtggcatctgctgtcaccatcaaggtcctgactttcattaacagccaggacttgagcagcctgttcggattactttcccgattaaggggaggaggttcgagtggtaataaatga

SEQ ID NO: 184365 - DNA, 846 bp, Klebsiella oxytoca
atgaaaaagttaatcatggccgcaatcgtggtcgcttcgctatgcctgagtaacgccgcttcggctgctggagttgtcattactaccggccagcaagggcttacctacaatgcggtgtacggcgtgaacctcgccagcgccctgagtgagtatggctatagctccacagtgatccccagcaaaggctcgctggacaatctcgacaaggtggccagcggtaccgcgcagatcggtttcacccaggctgatgctttccagttctggcgcagtcggcacagcaacgaagcgcagaaggtggacattatcggcgaactggctgatgaatgcgtttttgtcgcggtgaagaagggcggcaagatcagcgacgaaggggatttaaaggcgggtgtgaaaatcgcagttggtgagccaaccagcggatcgtatgcatcctggcaatatctgcagggactggaaaaggattatgccaaagttgagacctacgccaaaggcggtgtgcgctcgctggcgaaagtcaccactggcgagtatgacgctttcctctgggtctctgcgcctgacaggtcgaataaatttctggaggcagttaaccaggaaggcagcggcctgacgatgatcgacatgaatggctggcacgtagacgataagctgccgaacgggaaacctgtgtacgagctgaaaaaagcagtgactgagtcaggctggcttagcgattcgaaggtcaaagttccctgcactaaaacgctggtggtcgccaataccgatgcgggtgatgaggttctggaaacagcctcgaccgtccttctgaaaaacctgagccgggtgctcggtaccaacggtaaataa

SEQ ID NO: 184366 - DNA, 831 bp, Klebsiella oxytoca
atgaatatcgaatcaataccaaaattctttgccccgaaaggaatgcatatttcagatagcgggcgagcaactgccagcgaacaactcaccgtaactgacgttatggctgcgctggggatgacgcaggccgaagcggggatcggattatccatgttcctgggtaaggctggcatcagcgagaatgaccgcatggcctcaattcactggttggccgaatatgcaaagaagaatgctccccgctcagtcaggaaagccgccggcaagaaatttcctctttgcatgctgatcatcgccaggttcgcatatcacgactacgcctcatcagctgcggatactacggactgtacgaaatgcgcaggtaaggggttcgtgaagaaagttaaaatggtcgagaaaagccactacacaatgagattaccgcaatgggcaaaagacctcaggcagtcaccttcggattttgaggttaagcggcaggtgcaggatgtcgatcacgtgctttgtgtgaaatgccatggcaccgggaaaatcagtaagcgctgccagtgcaacgggacggggaagacacttgaccgcaaagaatccgaacttcagggagtgcctgtctacaagacatgtaagcgttgtgaaggccgcgggtttagcaggccaaaatcctccaacgcataccgcggcatcctttcagagttacctggcttgccggagcgtacctggcgttatagctggaaacctttttatgaaagcctggtgaccaaatgttttgtggaggagagttttactgatgctcaactccgcagagttacaaaaacgactaatttgataaatttcgcatga

SEQ ID NO: 184367 - DNA, 987 bp, Klebsiella oxytoca
atgagcctctttgctcaggggcgcgttctaataactccacagcccgagtacatggccggttttccgacggggaaagtgccagacgctcgccagccgttatccgtagatcgaagccttgttcctttctttaccgatccacgtgtcatcacagctgcaggaggtattgaggggctggagcgatggcttagcctgtctgtcagacaatgccagaatcatgatgagggatatcaccacatcgaaacagtcaccttaaggcaagatccaggctccgttttattatgctggcattgcgacaataagcttcgagatgagccggatccggcgatcaaggaaatagcaagccgtaatgttatcgactgggtcatcgatatggtcctgctttcgcttggatgcacccgggaaaggacattatccctggcagagttgtgctggtgggctgttcagtctgggatttctgatgcgataacggaggctatggctgaaaaggccttgcggatagctccagagccgcaccgttcggtatacagggacagcgacatcatcccagcaatacccgcggccgacatacttaaaagacgtctggataagagggaaagccatgccataacaggggatttggagacgggtgatcaggatgctgggagacctattctccggttgggcgtggatccggactgccctgaagcatttatgttgcgaccgaagcgccggcgctggatttgccctcaatacacccagtgggtaaaaacacaggaatgtgcctgctgtaggcaaccagctgacgatccacaccatataatagggcatggtatgggaggaacagcaaccaaagcccatgacctgttcgtgataccgctgtgcagagcgcatcacgatgaactacatgccaacctcatcgcatttgaagagaagtatggttcgcagctggagctgctaatccgttttcttgatcgtgcgcttggcattggcgtcatttttaaagaataa

SEQ ID NO: 184368 - DNA, 822 bp, Klebsiella oxytoca
atggctaaccacgttatgggctatggtgcgcccaaaaaccactctcatttggcgattgaaggtattttcgttcgccgggatgcggcaggtcgattttgtttaaatgactttcagcgcgcagctggtggagaagaacgtcataatcctaaccgctggctacggtccgagatggcagctcagttgattactgagctaacgccagatatggcgtttgcccctgtcgatgttgtgagaggagggatcaaccctgggacatacgcctgcaaggaattagtgtatgcctatgcaatgtggattagcgccgccttcaatctgaaagtcatcagaacgtttgatgcggtgcaaaatactatgacagcgctgacctccgatcgtattcaggctggtgtcattttgctggagtcagcatcccgaacattaaacctctccaattcttccaaacttggtgcttaccagaaattgcaacaggcggccgggcttccagatttaatgcctgcttatgcgattgatgctccagccggcgccatggatggatccagtcgtccaacactctcgcttagtgctctgcttaaaacccatgggatacggctaactgcaaaccaggcatatcacttaatggcgcgtgccgggatcgtggatcagaaggaacggcaaagccggagcggattaaacggagtaaaaaaattctggtctgtaacagccaaaggctgcctttacgggaaaaatatcaccagccctgcgaatccccgggagactcagccacatttttttgaatcaaaatttcccgagcttctgagactgctcggcattgtcacgcagtag

SEQ ID NO: 184369 - DNA, 399 bp, Klebsiella oxytoca
atgaaatttattcttcctttcccgcccagcgtgaactcctactggcggtccccaaataaggggactgcaaaaggtaaattgctggtcagcgaagccggccgcaaattcaaacatgctgtaagagcagcgattatcgaacagctgaaagcagtcccaaaaccctccgcttcaccagcggaggtagtcattgtcctgcatccgcctgattaccgccgccgcgatctggacaactacaataaggcgcttttcgacgcacttacatacgccggtatctgggaggatgacagccaggttaagagaatgacgatcgagtggggtgagaatgcaaagggagggagagttgagatcaccataacggcatttaataaagtgctggatgtttgttcagtgataggttga

SEQ ID NO: 184370 - DNA, 477 bp, Klebsiella oxytoca
gtgacgaaattgacactcaggcagcaggaggttctgaacctcctgatcgactaccagcgtaagcatggtttcccgcctactacctacgagctgaccggcatgctggggtgccggtctcccaatgcggcggcaagccacctgaaggcactggagagaaaaggggccatcacaatcacccgcggggtatcccgcggtatcagcatcactccttcgttttcccgaaaggaactggtcgttaacctcaacagcatcgtgaaagtgaaacttaatgaagtttccctcaatcatttggaaaaacaacacgaagagaaccgtatacgttatccggggatattcggagagtttgtaccgttggcgacagacgaaaatggctactcgtcaatgaccctatggcgccttatgtctgacctgggacagctttgctattgcggaggggaggttccctttgagctcaagttgattttggaggatgaatga

SEQ ID NO: 184371 - DNA, 1383 bp, Klebsiella oxytoca
gtgcatcgactgaacacgaccagcgaaggggaaatgctggtggatgaggccgaactcccaatcaccagaagccaatactgtgatgctctggatgcattacgtgctgcccctgcccattatctcaaggaggtgggcgaccagtggagaacgcccgatctgttgttctggggggttaacgctatgtatggcccgctggtgctggacctctttgcagacgaaaccaacgcaaaatgccctgcgtggtactcagcagaagataatgccctgacgcaggactgggcggggcgactggtagaactcggcggcgcggcatttggaaatccgccgtatagccgttctcagtatcacgaaaagcaggcgatcacaggcatgacccacatcatgagttatgcatccgctcagcgcgaaaatggcggtcgttatgtctttctggtgaagtcagcgacgagtgagacgtggtggccagaagatgcggatcatgtctgttttatccgtggtcgcatcggtttcgatcttcctacctggtttaagccggcggacgataagcagaagccgaccagtgccttctttgccggggcgattgttgtatttgataagtcatggcgaggggagcgctttagctatatcgatcgtgtggctcttgaagccaaggggcgcgcaagtatggccctggcccaatacgccgtgggtaaacaggcaaccgctccagtaatggatcagcctcagacagagcaagctgaaactgaaatcccacttcttcaggacgaaatcctcgcgaaaagcggcatacgatcctgggcctgcgtggttgcggcttttggagataaagccgagtacacctttgccgagtcgaagtttggtcatacctgggcggctgattcagtggataaaccggagtttacgccggttaactcagaaacgatcgccacagctcaatccctgatcatcaaacaaacagcgaaacaagcgctggtgggctggcttaacggtgttgatcttggatccacaattgcacgtgaagaaaccatagaacgtatgaattcggtgtatgcagagtttgtcgacacatgcccggtaactgagttcatcgatattgtcggctgcctggataaagcgagctggttcaacagcagactgatccgcactcatgttcgggaagctatctcagttgccaaacaggccttacccgaaagccggatatggccactggaagtaggcctggtgtttgagcgagtcgaaggggtgaacgatctgaacgagtctcagcaaaacaaactgaaggcacacatcaatcagatgtggcttgagcgtacgcccagttccgaaatcataactattgccagcgggctggtcagcagcatgcagggggttagccatgcgtga

SEQ ID NO: 184372 - DNA, 459 bp, Klebsiella oxytoca
atgaacattactcaaatggcctttgaattcattgctaaaaacccagatcagaaaatgcgcgatatcattgccgcctttcctgactgcaaacctgtttctgtgaaaagtgccgtatatcgcctgtacacagaagggcgcctggagaccaaagcaacctcatgcggttttatttatcgagtcatcaatgatgcatcctgctgcgatgaccttcaggacgactttaagtccagaggcaacctggaacaggaaaaagccgctaaaaaactcgaagagcgcagtctgtatcgccgggccgctactgtgtggcaccagctcagtacctcaagctgcagccagaaaactcttgagtattacattcgtcagaaaaatgcctgcctccggaaagcacgcatggggaaatcacacactgagtgtctgttagccgggaattactgcggaggtgatctgtgcatcgactga

SEQ ID NO: 184373 - DNA, 180 bp, Klebsiella oxytoca
atgcgcgaagttaaccgaaagttcagagaccactatggcaagcccgtcagagtcatacgctgggaacgtgagacgaatcgtgtcatttacctcagggaaggctatccgcacgagtgttttagcccactcgatcagtttcaccgaaaattcagggaagtagagggtagccatgagcagtaa

SEQ ID NO: 184374 - DNA, 372 bp, Klebsiella oxytoca
atgagcaatgatcgcatgaccaatgttccagatttcctgggcgaattggatgctggcgtgttcatcaacaagatcgccggggcgctcaataccgccgcactgggcgttttgaacaatggcagcaaaggcaaagtagtactgactttcgacatcgatcgcatgggcaattcgatcgaagaaaagcgagtcatgatcaaacacaaactgcagtacatcacccccaccccgcgcgggaaagtttctgaagaagacacgacagaaacgccgatgtttgttaaccgcggcggcaagttgaccatcctgcaggaagaccagggcaacctgtttactctgagcggggatccggatgcaaagctgcgagcggctcagtag

SEQ ID NO: 184375 - DNA, 201 bp, Klebsiella oxytoca
atggcacatatgaaagttaaagaattggtcgctacagcttacgctgcggcatccgatcttccaccggaaaaagcagagttaatgcgcaatatcgcttcacggctggatgtaacgttcatcgcccttaccgaagcaatggaccaaaacactgcgcaggctgcagtgttagcaggccttaatggggtgaaaaaccatggctaa

SEQ ID NO: 184376 - DNA, 450 bp, Klebsiella oxytoca
atgaacatctcaacagtaaacgagctcattaagtcgcttgagtcggcgggagagctgtcaatcaaagagcggaagtatctggagttggcgaaagcgtttaagcagctggctgcggagaatgtggagctgaaaggtgcattaaccggaagggcttacatcaacttcatcaaggctaacggctggaatgtttctgcaagcacggtaaacggcaagttcgttaactttgcggaccctgaagttgattttggctcgatggtctttgctcacgcgaaaaagcttgttgacgatatcaaaacccccgccaccgatcgcatcgtagccgggattaaggctgatgccattgatgacgctgcggtagaactcgaccgtgtcgatacagtggcaagtaccagagtaatcgggttcaaactccgtgagttttcccagcagctccgcgagggggccaaatga

SEQ ID NO: 184377 - DNA, 201 bp, Klebsiella oxytoca
atgatcaccgggactacgaattacgatgttgttcctgatgttctctgcaccttgtgcggcggttattacaaagccgacgatccggaaagtcacgaatgcgatgaagaagctcttgacgaaattgcgtgtgatatctgcggtttcaaaagcacagaccctgacggtgctcactactgctgcgaggataactccgatgactga

SEQ ID NO: 184378 - DNA, 726 bp, Klebsiella oxytoca
atgactgatatcaccgaactggcgctactcgtcagtaaagcgaaagcgtctgtatttaccctggaatatatctcgcagtttgagcctgctgatatcgactccgatgacgttgatttgcggtttgaggtagatggccgagataccggcaccaacgtttctatcgtcgatgagtgcgggcaagctgcaaaggttattggcacgctggtagaggcgctggagaaggcgcaggggatggaagcctactggaaaactcaatgccgtgggataacggaccattgcgaggagttgcaggcgcgcatcgccgagctggagcgcgaacaggagcatcttcgaccagtcggcgtgatgagcgagcaggcatttcaccgtcttgaaaacagagaatgtcgctttattgctctgtggccgcgccctggtatctttttgccgcgcaagcgccccgaggatggcgtgatcgtttatgcgcgtacagctgccgccgctggcatcaaggtggaggctgatagcctcgatgctgatgtgagcaacagaaatcagccggggatggttgtagcggtacatatcgatgtcggcgacttcgtgaaattcagaggtcgggtgtatgaggtgaaggaaaccgactttgacgaccacgacgtcactttatggttcgtttgtggcgaggtgctgaaatgcgcagcaggttgcccgatagaagtggtttctgcgccggtggaggatgagtga

SEQ ID NO: 184379 - DNA, 228 bp, Klebsiella oxytoca
atgggcgtaaaaaaaatgatatgcgtcagttccactacgccagtctggtttactccgggcgccgtatacgactcagaacctcgcggtaccgatatctgcatttgtggcgacaacctcgtttcagacctcaacaaagaggactggtacgaaatgagtcagcgcgcagatgggctgtggttcttaatcggttttcagcaggcaattttatttcggatagccaaccaatga

SEQ ID NO: 184380 - DNA, 1059 bp, Klebsiella oxytoca
atgaccagcaaattaaacagagagcgcctgcaggaaatcgctgaagatggattcctgaagcatggcgaaagcaaagagttggcctgcttggcgctggccgcaatggacagcgagccggtggcgtggacatggcactatcgtgagcaatggcatgttacaaacgatgaacgtcgcgcagaatttgtcgcaaaagatggtgatgtggctgtactgccgctctatcaccacgcgcagacagcgtcggaacgtgagcaggtacgccgccagcacgctgagtggtcacaggctaccttcggcaatgtcggcccggttggcccgcttaagcacctcagcaaagaagcactggaagccgctgaacagcccggcgacctgtcagaatgggctgatatgcagttcctgctgtgggacgctcagcgccgggctggcatcactgatgatcagattacccaggcgatgatcgataagctggcggtaaacaagcagcgcgaatggccggagccgaaagacggggaaccgcggttgcatatcaaatcgcagccagcaccggtaattactttctatcgcgatggcattgaagccgccgccaaatggatagatcagcagcgtgaggtatacgacagcgagcatggatggtctgatcctgataccggagtacttgagttcggcaatgatgcccagcgtgaatattcatccacccttgaagaattggctgaagggattcgagctctgcatccaaatgctggcaactctcaggtaattggcattgatctggcaataggtgctgacagaacagtggaagttcgctacgtagcacctcctggttacgtgatggtgcctatgagattaacttatgagaacggcgcgaagggtgcgctatccggcgagttttcagaaaccaagttcgtaaactgtccggaatgctttagtgatgatgaatgtgaaacatgtgacggtagcgggagaattgaaataacagtacctgtcacctggacgactatcaaagctatttgggttaaaggtgtcgagcattttgcaaccacagcgcaggagaataattaa

SEQ ID NO: 184381 - DNA, 564 bp, Klebsiella oxytoca
gtgaaccatttaatgatcgacctggaaactatgggtaataaacccaatgcccctatcgtctccatcggtgcggtattttttgagccatcaactggtgaacttggcgaagaattttatcgcgttgtgagcctgaaaagttcgatggatggtggtgccgtacctgaccctgacaccattatgtggtggatgcagcaaagtgaggaagccaggtcggctattaacgataagaatgcagcgatggctatctcaaccgcactcattcagctagttgcatttatccgcggtaattccgaacctggccgagttcaggtgtggggtaacggtgcaacttttgacaacgtcatcatgcgagccagctatgaccgagttgatattccctgcccctggcatttcgctaatgatcgcgatgtgagaaccatcgtcgaattaggccgggccataggtatcaaccctcgccgcgacatcccgtttgaaggtgataggcataacgctctagctgatgccaaacaccaagctaaatacgtgtccgcaatctggcaacaacttttacttaaacattgttga

SEQ ID NO: 184382 - DNA, 264 bp, Klebsiella oxytoca
atgaatactatgtttttgttaatggctgaatatggttctgcaactgtccaattaagtcaggtttgcgagaaatattttggtttgaaaccttctactgcagagaaacgagctgctatgggagaccttccgatccccactttccgtgtcgctgaaagccaaaaagcgccacgcatgatccacatccaagacctggctaatcatatcgacgagcagttgaagaaaggtcgagaccttcttgagaagatgaaaaccgccaaccactga

SEQ ID NO: 184383 - DNA, 435 bp, Klebsiella oxytoca
atggggaaatttatggccgtcggcttgacggatctgctggagagcgcgggaatgaacggcgtaccggcgtttgtcggcctggcgctgctatccgcctttttgtgtatgtttatcgccagcggttcggcaatctggtcgattctggcgccgattttcgtgccgatgtttatgctgctgggctttcacccggcattcgcgcagattctgtttcgcatcgccgactcatcggtgctgccgctggcgccggtatcgccttttgtgccgctatttctcggcttcttacagcgctaccggcccgacgctaaactgggaacctactactcgctggtcttgccttatccattaatattccttggcgtctggctactgctgctggttggctggtacctcgtggggctgcccatcggaccgggtatttatccgcgattaccttaa

SEQ ID NO: 184384 - DNA, 834 bp, Klebsiella oxytoca
atgtctcaggacgcaatttttcagggccagagcgaggctcggccaaggcttaatcctcccatatatcgctggcaggaggatatgccggagaacaaccagcctcagctggtgcctccccagctgatttggttaaatacaaaaaatactatctggatggaaattccgcgctacgaaggagttatttggggggggatgatttttggcggagtaattacttttgcagcagctttatttatgatggttatctcatttttcgtaataggtgatattgtcgataatttaggttttggcgtgagtggcacaggtttgatgatgttgtttttttttatcaatttcagtcttttctcaatggttatcttgttttttaaaatttatttatctgaacctagagatcaacccattcgcttaaacagaaaacgtcaaaaaatctataccttcgattataaaagaaaatggtggaatccctgggccaaatggccaaccactgtcaatgcctatcactgggctgatattcacggcgagatgcgtttttccagcgaccgctataccggaggttttcagctgtttgcttccgtctgtcagccaggaacgctgaacgtgacggaacgcttccagattgccagcggctctcctgcgcagttgcagcaactctggagctatctgtgcctgtatatgaaaggtgagcccgtgccggatgaggcagccaacaaaggtcgccctgatttctggtgcccacgaaaagcagataaatggcctgaagcactggaaattgaatcaaccaccgctgtagaaaaagtttttccctgcactgacagcgctctgctggctttctga

SEQ ID NO: 184385 - DNA, 822 bp, Klebsiella oxytoca
atgtcacaagacgctttttttcaggagcaaagtgaagttcagccaaagcttaatcctcccatacatcgctggcaggaggatatgccagagaataaccagcctcagctagtgcctccccagctgatttggttaaatacgaaaaatagtatctggatggaagttccacgctacgaaggggttgtctggggggggatgattttgggtgccattatgacattggctattattgttttcatgacggttctaggatggttaattgagcaggagcttaatggggagggaattttaattatttatgcttttggtgatttctttctcattacgctgatgtccatgtttttaaaaatttatttttttgaaccccgagatcagcctatacgactgaacaagcaacgacaggcgatttatactttcaattataaaagaaaatggtggaatccctgggccagatggccagccactgtcaaagcctatcactggcccgatattcacggcgagatgcggttttccagcgatctctataccgggggttttcagctgtttgcttccgtctgtcagccaggaacgctgaacgtgacggaacgcttccagattgccagcggctctcctgctcagctgcagcagctctggagctatctgtgtctgtacatgcaaggcgagtccgtgccggatgaggcggtgaataaagatcgccctgatttctggtgcccgcgtaaagcggataaatggcctgcagaaatggaacgtgaatccactactgcgccggacagggaactttctgctctccgcgcctgtagcgaaccatctgataagacgagttaa

SEQ ID NO: 184386 - DNA, 3120 bp, Klebsiella oxytoca
atggatatgaaagcacaggtaaataaaaacgcagcggcaattcagcaggcagcatccacaccttcaggctgtaagtcgtgtgagcgtaaaggagttgcgatatacccgttacgtgtggctgcagtcccggcttctctggtaaataccggctggcatcctgccgtccctcaccaggacatagagcttaaggggggcgagttcaaatacgccctgcgtatactgcgcgagggttatgtgtatgttctggctgataaacaggtctggtatgcctaccaggtcaccccgcagggctttttgcgcatgttcaatgcgaaggaaatgccggaaggagggaaagtggaacctctgagtgccgcctgcctgcagcagaatcatgatatccgcagcagctttatcaatatcgatccgaagcatactcatgcagccgtggccttcagcaatgacccgtggccccgtgaagtgctggcgaaatataaacaagccggtgcttcggcaccgcgttttacgcaagtgactattgctgatgggaaaacagtgacaattgaaggtgcggggcgcagcctggagcttgaccccacgctctcaactctgacaaagaacgtgctggagtttgcgacagaaaaatttccgggtattgtcggaaaagaagggcagcccgatggcgcgtatggtttttatccccgaagggatatcaggaagcagacggcgctgggtaataaggttgcggagttacaggagctgtacggtgcagtgcatgccattgtgctggatgataccatcgggattgttcaggaacttaatcacgcccgcctggatgtggtggatgcgctggcgaaatatcgttctaaacccgcgaatcttcatcagggcaccatttccgacacgattttgtcaattcaggaactgatgacaaagcaggtggatgcggataaaagcattaagcctgtcactatcccgccttttactgattcccccttcgatcagggaataaccttcagccgtgaagatatggttgccgccaccaaacgttctgcgctggagaggatgcaggaatattacagcgaacccagtcgcgctaaatttgcccgggaatttaaagccgtggtggacggctatcagcaaaaaataacggcggtggcgaaggatctggatgcctggtatcactcggctttatggctgacggtgatcaaacaggactattccccggtaaccagtgtaatcagctgggcggctcagcttaacatgctggccgccagtttgcagggggcgatggcaggaatggataaggacaaatcggcctggcatgactggatggaaagtccggacagtccgccatttttgtctctccttggcaaacagtctgggctaatcgcggcggtctacaacggttcagcaaactacaccaatatgaagaccctgctgaacagtcaggaagtctgtgactttgtggacagcatcaacttcagccagcccgtaagcagcctgacgatgtcgatgaacggcgcattcagcatgattggcgagaagatttccgccaaagcgaacgcaggattcgggcgggtgcttcaggcaatggcctatgctgcagaaggtgaacctgctgttactattttttcgggtgaaattaccgttcgtgaatttcagaatatcatgcttaagcagctggatgggcacggtcgtcccgtttgggggaccatgcggggaggcatcacgacctcccatgccggtacctggctgcaggtaactgatcccgtcatacttgagcgaaaaattcacgtacgctatgcatccttactgaaagatattgaatcaccggtctataagcaggcagcacgcaaggcgggttccagttcggcggccctgagtaaaggcacgatgctgaaagacggtagccatctttccggattcccgaatctgatcctcgcgcaggatgccgtagacgcttctcttacaacgggtagcatgagtatgacgctgggggatacgctgaaaatagcccgtcagcagtaccagctttcgcgacgggtattcagcagcagcggcctgggtctggtgctgggggccgctatgctgggtctgcagaaaagtgccctggacgccaaccttaaagcgctgaaggaggctgtgccgggggatgcgcaggcggaaatgaagctggcctccagcgcgctgatggtgacagcttcggcggtggaaatggtcggttttggtcatatgatcgcccgctggggcaccaatccctgggacgtcaagcccaatatgatagtgcgtggtgctgaaatctacgcccatccgctgatccgggttgccggggtgattggaggagtggcgtcgattgtggatgggattgctctgggtgtgaaagcctgggatgcagctaaatcaggtgattctacagcttcagctgaatactcaatcagtgcattcagcacttttagcgctggtgttcttggtatttatgctggtttggccggtgattttgctcttttggggcctgtaggtatttgtattggtttggccatcttaggcgcggtactggcaaccatggcggcagatgaagttcgttcaccgctggaagtatggctcagtgacacctgtttcggcctcaagcgagccgaacatgaaaaacactgggatgctaacagtcttacggatcttcaggccgcgatgaaagcatactacaccattgctagcggcgtctctgcagaaatccggcgtgaaagaatggccgaagtggtgctcaattctgccgggacggggctgattgccgtgcaggtgaagctgccggggtgcagtaagatgggttcggactggctgattgaactgacggccaaaggaaacggtggcagtcaactgctggctcagtcggcgtgttcagggaaggtgacaaacgtggaaactgcggctaagcagagttttgatatcaccccgatgggaatgggatcggccaccttgtctgctgattcagtaatgaaagaaagctgggagacaaatgggttactgctgcagggagagtttgcgtttaaccgcatgaaattcagcaatgtggagctcaacgtgacctactggccagataagcacaaaccggaagaaagtctgcagctaacaaccagcgcttaa

SEQ ID NO: 184387 - DNA, 330 bp, Klebsiella oxytoca
atgctgtgccaggagtggcagctgttccgcatcctttacccacagataccagccctgccgggtttcccggtgacaggagccggacacaaacagcgggctgttgtcgccgcagacgaggatcaccgccccctgaaaatcttccggcggcaggttttcatccactatttcccggatagcggtcgcacgtgcctgcgaagcccggcgctgacgccagaacatcaccccggagaccagaacgaccagcaggctgagtgccacacggctgcccgtggacagtggccagaatcccagaatgagccacagcgccagtacggcacccaggacagttaa

SEQ ID NO: 184388 - DNA, 684 bp, Klebsiella oxytoca
atgaaatacctctatttactgctggtgatggcaagcgtcgccgcagacgccatggaacccggcagccagtacaaaccgctggccgaagcgggcgacccgcgcgcgcagtactacctggccgacacttacgtcagcttcggcgattttccgcaggctgaatactgggcgcagaaagcggcagacaagggcgacggcgatgcgctggcgctgctggctcagctcaaaatccgcaatccgcagcaggccgactaccgccaggcgaaagcgctggcggaaaagtcggtgcagaccggcagcagggcgggagaaattgtcctcgcccgggtgctggtgaaccagcaggccggtacgccgaactatccgcacgccatctccctgttacagcatgccgcccaggatccggaaagcgattcagccgtcgacgcccagatgctgctggggctgatctacgccagcggcgttcatcccccggaagatgacgtaaaggcgacgcagtattttaaagagagctctgccctctcccgcaccggctacgctgaatactgggccgggatgcttttccagcagggggaaaaaggctttatcgaacccaacaagcagaaagcgctgcactggctcaacgtcagctgtcaggaggggtttgataccggctgtgaagagttcgacaggatcagtaaaagataa

SEQ ID NO: 184389 - DNA, 1095 bp, Klebsiella oxytoca
atgaaacgtgtttttttactgctgctactgtggctgtttccagtttgtagttgggcctgcaattactatataaatggcggggatatcaccattgccaacctgccgccaagaatattgcttagcgcggataactatacggccggaaccattctctatgactccgggaaaataaccgggccacaaacttcgatgaataattgtaatggtagtatttacgcacagtttaaatgggaatccacaatggtgggttctcagaccagcgatcatatctatacgacttcagtgccggggatcggtatcagaataaaagtgtggcttaatgtcacggggcaaatggacggttacagtactcaaattaaacctgactatagcgaacattatataggggatgcagattatctattggggcaggggagcttctttaattattataaccactctaactataatcctgcctatcaattgcaattgatcgccactggcggcgctatcgccagcggtagtgctctgaccttgggtaacccaacctcaacggtatccatcaaagatggtgatggcacgatggcagcttccagtttgcgcgtcactggcaccacgcaaatccagctggtgccgatggggtgcaatgttgatgtgaccagtctggtgtttcagatgggtaacgtcagcgcctctgaatttaataaggcgacaaaagtcggttctgcacaacaaaatctgacgctgacttgcgaaccaggaacgaatgtcacaatgaaggtctctgcctctccagcccagggagataatccagacaatagcgtgatatccctgggatgggctcctgatgcggcaacaggtgtcggcgtgcaattgaatcttaatggaaaggcattacccttgaatgctgatctcacattgttttcatccagcagaacgacagttttgaattcgggtgcagaggccagttacggtgtattcagcaatccggacaacccaggaggggcttcaggtacagagatactttcctttacgactaactattataaaaccggttccgatgtgaaggccgggcaggcgaatgccagcggaaccttgaactttacctacaattaa

SEQ ID NO: 184390 - DNA, 615 bp, Klebsiella oxytoca
atgatggataacaggatgattgccttgatacatacattaaaaatggaattgatgaggagaaataatggcgggcgattaatgaaatcgtacggggtatttattatcactatcggccttgcattgatctttgtaaggccagcctgggcttatgatgccaatagtactgttaatttcaatatcaccggtaagattgaagagcccgtatgtgaagtgtcggtaaagccctccagcgcgatcgatctgggaacggtttcctttcaacgtctgaccggtaaaccaggcgcgagtagtgatgccacggctgttgccattgcttttgaacattgctcaacgggtatgacctcggtgacgataacatttaacggtaattcatttaatagtacctatacaagtatttatgagagtgagctaattgatggcgcaaagaatgtggggttacagctgctaagcgctgtggatcagaaaaaccttgggccaaacgatacgtatacctatgccctcactgatggcgctgaacatgcttttaatatgatcgccagaatgtatacgcctaacggaaaaataacggcggggaaggtggcttataccgttactttcgacgtgacctataaataa

SEQ ID NO: 184391 - DNA, 912 bp, Klebsiella oxytoca
atggctaatctttacgatcttaagaaatttgatctgaacctactcgttattttcgaatgtatttaccagcatttaagcatcagtaaagcggcggaaacgctatttattacgccctccgcagtcagtcagtcgcttcagcggttacgcacccagctgaatgatccgctattcgttcgttcaggtaaaggaattacgccgaccaccgtaggggttaatctccaccatcatcttgaaaaaaatcttaatcaattagaacaaactatttatctcaccaatcgttctgagttaaagaaacgcctggttgtctatgcgccgcagctttttattaccccaaaaacaaccagcctgatccatatgttattagatgattcaaacttacacgtagaacatcacgatctgctggcgtccggagagtcggtagaaagcctgttggcctaccgtaaagccgacctgatatttagcaccacgcccctgtcatcgcgggctaccgtgtgtaaacgtattcaggagctgggcatttctctggtctgtagtgaaaatcatcctcggctggcatcgctaacaacgacgaaagccatactgcaggagcgctttacgtattatatttgcaacgatcagggaacgaagtcgtttcaaagccaggcggccggcatactgtctgacaggaaaatttcgttccgtagcgattcatacatagcgatccttaatgttattcagcaaactgatattattgggtttgtacccacctgtattttagaacacatcagtttccataataaatttaaggttatagaggcgccatttaagatcccttccatcactatttatatgatttacaatcgggtaaaccttgacgacccgaactttgcaaactttatcgacgaatgtgaaaagaataaaattattgaatag

SEQ ID NO: 184392 - DNA, 411 bp, Klebsiella oxytoca
atgcaacgacaattaatccaggatctcgaacgctatctgcaatcgctggaagatgaagaggaaaagattactgcgcttaacgcctttcgccagattctgcatgaatatagccccttcaaatcccaaccggttgactgcgtattgtgggtaaaacagggcgccgttttgcctaatgattacaacccaaataatcttgcgccaccggaaaaacgcctgctgtttacctcgctggaaacggacggcttcacgcagcccgttgtggtagtgaaacaggatcaggagcgctattccattatcgacggttttcaccgtcatgagctggcgagcggcagagcggcgctgaagaaacgactgaaaggctacttcccgtcacctgcctggaaaagagcagccccaggcgtgattcgctga

SEQ ID NO: 184393 - DNA, 1260 bp, Klebsiella oxytoca
atgttatgtaatctcaaaaataagaaaaaaatatacatagatctcttttcgggatgtggagggctttccttcggactagggcaagctggctgggagggcttgtttgcggtcgaaaaggatgagatggccttcaaaactttctcgcataacctaattgaaaacgcaaattcgcattttaattggccagaatggttaccgaaaaaatccactacgatacaagacctgatatctaactattcagaagaactttctaagctgaatggcaaagttgatttaattgctggaggtccaccatgccaaggattttcattggcagggcgtagaaatataaaagatcctcgtaatacactttccaatgaatacctcaagatggttaaaattattgaacctaagtatatcctacttgagaatgttcgaggttttagttcgtctttcaaaccaagtgaaggtgaaaaaataaaacggccttactcaatgatagtaaaggaaaagctgcagaaactaggatatattgtttactccgattttgtatgcagtgctaaatttggggtcccgcaaaaccggactcgatttattatggttgggataaagagaggtacttttaaagaagaaccagccaatccatttgaattactgttaaacttgcgtacggattttttaaatgaaaaaaaacttcctttagaaccaattaaagtttgtgatgcaattgacgatcttttgattagtaaaaataagatagtttatcattcaggaacagaagagaaaggatttaagaaaattgattatgtgatacctaatgagcaaggattgtatttaaaatacattcgaaaaggttgtgagaataaaaaaccaaatagcctcaggcttgcgagacacaaatcgcagactgttgaaaaattcaaactcatacaaagtatttgtacgccagggataagcctgaatgataacatgagggttttggttgggacaaaaaaacaagctataactgtcttaaacgcgaatgaaccttcaaaaacattaactactctgccagatgatctattacattataaggaaccaagaatattgacggttagagaaatggctaggatacagtcattcccagatagtttcgatattttaggtaaatatacaaccggcggagctagacgtactcaggaatgtccaagatatactcaggtgggtaatgctgttcctcctttacttggtgaggctcttgggtatttaataaaaaaaatagattctataattaaggattaa

SEQ ID NO: 184394 - DNA, 549 bp, Klebsiella oxytoca
atgctgattggctacgcgcgggtgtctaccggcgatcaaaacctcgatttacagaaaaacgcgctggttcgcgcagaatgtgaactaattttcgaagacaccgccagcggtaagaatgctaaaaggcctggattacggaaagcgatccgccgtcttcggcctggtgattcgctggtggtctggaaactggatcgcctcggtcgcagtgtccgtgacctcataacgttggtatctgaattacaggagaggggaattcattttcgcagcttgaccgactcgatcgatacttcgacacctgccggccgattcttctttcatgtcatgagcgcgttagctgaaatggagcgcgaattgatagtggagcgtacccgcgccggtttagcagcggcgagagagcagggccgcatcggtggccgccgccggataatgaccaccgaagttgtggagcgttgccggcgcatgctggagaacggcgcaacccggcagcaggtagcagatgtgatcggggtaggggtgaaaacgatttataaatatttccctataggttaa

SEQ ID NO: 184395 - DNA, 1359 bp, Klebsiella oxytoca
atgtctgctggcgacaaaatttctgtcagagagaaaataggctatagcctgggggacgcggccagtcacattgtatttgactcgtccgtggctattctggcttatttttataccgatatttatggcctgccgcccgccgtgatggggacgatgtttttgctggttcgtctgctggatgcgattaccgatccgattatgggcgcgattgctgacgccacctcaacccgctggggccgtttccgcccctggctgctggcgatctgcgtcccctttgcggtgagctgcgtgctggtgtattccattccctctttctccgactccggaaaaattgcctacgccgtggcggcttatatatttatgaccctgatgtatacggcgattaatattccttactgctcgctgggcgcggcgctgacctccgatccgcgcgaaagcctctcgctgcagtcctggcgtttcgctatcaccccaatcggcggcgcgctcggtaccgcgtttattttaccgctggctgactttctctatcccggcgaccgcgcgaccggcattcaggtctcgatggccctgtttggcgttatcggctgcctgatgtttatcacctgcttcgccaccaccaaagagcgcgtgcagccgattaaagaagagaacctgaacgtagcgcgggacgtgaaaatactgtttcgtaacgatcagtggcgtattctttccgtttacaattttatgatgctggtcgccgtagtgattcgcggtggcgccgtcgtctactatgtgaatagcgtgctgcataaaggcgccgacgtgataacgatattcatgctcggcgggatgtttgcctccatgctgggttcggtgctggccaagcccttcgggacgcgtttttgtaaggtccgactctctttctggattaacctgctcaccgccgcgctgggcgtggtctgctttatcgttccggtgcaattctggattgcggtgctcggcgtgcatattctgatttctattattcagggcggcaacggcgcgctgcagtggtcgatgattaccgacgtgaataactatggcgaatggaaaacccagcggcgtattaccggtatgaacgttgcggcaaatatctttgttatcaagctgggcgtcgccgttggcggggcgatcctcggctggatattggcctattaccattacgccgctaacaccgcggtgcagccagcttcagcggtgcagggcgtggtgctgttgttcaccctggttccttctgttttttatgttattaccgccgtctctattaaattctacggcttaacggaaaagagaatgaacggcatcgtcgatgatttaaaccacggaaccttcgctgaatcctga

SEQ ID NO: 184396 - DNA, 1392 bp, Klebsiella oxytoca; identical to SEQ ID NO: 180354

SEQ ID NO: 184397 - DNA, 294 bp, Klebsiella oxytoca
atgaacatcaagttagtcactatttccgtacttgctgctgctttcgtctttgtgtcagatatggccatcgccaaatcgaaccagttaactgatgaccaagttaagcaaagaattatcgacgactctatagcatcctacccaggtacctgcgcttgcccattcaatacggcacggaacggaagctcatgcggccgccgcagcgcctggagcaaagcgggaggatattcgcctgtctgctataagaaagaggtcacaaaggatatggtaaaagagtggcgcaagcagaatcagtaa

SEQ ID NO: 184398 - DNA, 936 bp, Klebsiella oxytoca
atggttatccatgattctcaacgcgcgatgagaaagttatctcaggttggctattatcgcctttctggcttctggtatacctcacgaattatatgtaccagcgacgaaggactgtcattcaggagtgacgattttcttcctggcacatcatttgaacaggcttacgatctttatctatttgataaaaaacttcgaatgctgatgatggatgcccttgagcgaattgagattcacatccggtcagtcatcgcccatgaggttggtaggtatgatcctcttgcttacagaaaggaatcctacatcaaccaacgcctcttaaatgatggtcggaatgggaaacccagtacttttgaaaaatggcgtaataaactggatctgaaaattcaggatagtagagatgagtgtattatgtggcatctcagccaacaaaaagaaatccctttctgggttgctgttgagacttgggattttgggcagatgtctaaatactacgccatgctgaatggtggtatgcaggcaaaaattattaaacgccttcagctggataataaacaaaccctgacgaagtggttacaatgtctcaatttacttcgtaatcgctgtgcccatcactcccgtatctggaatcgtaagcacgcagttgttccaattccgaaatctatttttttcgatgaactaaagattgacgccagagcctgtgaacgtctatacagtgccatatgcataatgtggtacctagtcaaaatgattggccccgcgtcaacttggatcagacaagttgcagagctcttcgataaaaaacctaatatgcccggctgttcatatgaatcgatgggcgttccgaaatcaggcttccctagagccagattcggagacgcgctcggattcgtgcatgcagacaacgacccgcttcatgagggccaggaaggggcgtag

SEQ ID NO: 184399 - DNA, 951 bp, Klebsiella oxytoca
atggataaagatctgaggcagatgctgctgacgctgcgtaaagagcgtgaagatttttgccagttgaggcgcgagcttcgtaagcagggtaatgactggctgccgtaccctgaacacttacgggctattccatgtggcgcgacaacccgtgcgggcactccgtgcaaaatgactacgatataccacaatggtcgctgtaagttacacggtgggaaaagcaccggggcaaagaccagggccggccgtaaacgtcagcgcgacggctatagggcatggctggagaaacagcgagacagcaaggcgggcaggaagcgaacgcgcgaatatacccgcgatatggccagaatttgtgcatcaaccttatcggagattgtagccagcgaaacggacagagtgttacaaccagtcgatggtattagcttacgcctttcaggtggtacgctggtggcagtgctgccgcatggccatagcatcgcggtaacgctgacgaccactagcccacgatatggtggcgcccgatggtggtatgtttgtccggattgcgggggacggaaagcctccctgtatcttcacaatgaatcactgtgctgtcgacggtgcgccggtcttcattacgccagccagagtgaagatgagatatctcgcttacggcgcagtgtgttgaagcagaggcatgatttatggggggatgattacccgcctgcggacagcctgctaaatagcccgctcaagtttccgaagcctgccggcatgagatgggataccttcgagaaaaagcgctctcgcctgctaaagactgaatcagcttactggcggttgaaagaaccgagggacgctaaagggtttgcccgggtgatgcgcaaagctgaggcgtcaatgcgttcatttgaacgggcatcgaaaaaggctaacaccaggctatcagtagagcatgtcagggcaaaaagctga

SEQ ID NO: 184400 - DNA, 522 bp, Klebsiella oxytoca
atgttaatgagtaaagccgagtatgcacgtcatcgcggggtaagccgtcagacggtatatgactgggtggcgaaaggtgaggttgtgttgtcgggtactaaaatcgatgtagacgcgacggaacgccagcagcaacagcactcagtccccaaaaacgaggcacccactacagacccatggccacatcgaacacgggagctaacttggtcggaatgctggaaagaaataacatcaggggacggtaaatttcttgccccagataatgatgatgacctaatggaagctgtttctgccgcggctgatgagttgggatatgatgtggagtttcttgaagaaggaggtattttccttgatacgcaggatgcggaattttacttccaacgttatgatcttaaggaaaatgcagaacaattactgctgacgctaaggcgcgaacttttctataccgctaccgaataccctgatgagatagccgattggagtcccgaagggataaaggcattgtctctttggcggaagtaa

SEQ ID NO: 184401 - DNA, 534 bp, Klebsiella oxytoca
atgaaagagttcttagctccatcatggagcacgattaaatcggtgtttgtttctggacaattaaaccccattttttcagctcctgccgacatctcggataaatctcgcactatcgccgatcggttcaataatcccggtaatttgcgttcggcttatgggtacgatactcataataccaaaagcggtaagtttgccgttttccctacgctggatgagggcgtgttagcggcgactaagcagcttcagatttatggtgcccgcggtatcaatacgattgatgaaatttccaaacgctgggctccgtcaaaggaaaacgacactcaagaatatatccgtcatgtcgtaagaactaccgggtttaatgaacgtcagcaacttaaccttaacgacccgaaagtactggcaaaacttatttcggcgatggcatctaaagaaggtgccggcagcagggtgacagagagcgctgttattcagatttacaacaatactggtggtaatgcgatagtgtctgctgctcagcttggtgcccggtga

SEQ ID NO: 184402 - DNA, 861 bp, Klebsiella oxytoca
atggaaaatccagccagcctgttgcgacgtctgaacccttactgtgcccgtgcgatggaagtggcagcttcgctctgccagacccgcgctcacgcggaaatcctgcctgagcactggctgctgaagctgctggagctgggagagggggacctgacggtgctggcacggcgctacgaatgggatatggacgccatctggcaggatttgctggcatttctcgacacgctgccccgttcggtgcgcagccgtccgcagctctcagacagtattcagaccctgatgcaggacgcctggctgcatgcctcgctggcgggtgaagagcacatccgcagcattcacctgctgatggcgctggtcgataaacctaaactggcacactgcgatggactgtggccgctgctgaccctcgggcagggccaacttgagcgtcttcgcccgttgctggatgcacagtcagatgagcgcccggaagtgcagcaggaagccgaactggcacaaaatcacggtggtgaagtggaatttgtcggcagtcaggtcggcgcggggataaaagaaggcgagctgactccggccctgcagaacgcactggataaatttaccattgatgtcaccgccaaagcgaaagagggcaagattgatccggtctttgggcgcgatacggaaatccgccagatggtggacattctctcgcgccgccgcaagaacaacccgatcctggtcggtgagccgggcgtggggaagaccgccctggtggaagggctggcgctgcgtattgccgaaggcaacgtaccggaatccctcaagcctgtagttctacgtactctcgacctgggcctgcttcaggcggggactacggtgtaa

SEQ ID NO: 184403 - DNA, 642 bp, Klebsiella oxytoca
atggacagtgcaaaagatattgccagagatatgcttgaggctattcatatcgatgggtccgggtttatcggtgccgtggcaaaaggcgttatttccttacccgtcagccttgcctatcttggctatgattttatagacactgaataccgcagagagaatcaggatgataaatttcggttagctgcactggttaaaaaagtaacctttaacgatgaaactatttataaaattattaagccatttatagatgattttgtttcttatgtagatatgggtaaagtcgcacatttttcaaaaaatatatctggaagtgttataggtaaagtaatgttctcccagcttacgggtgttaacctcggaagggtgattatatctcagggggttggtgcttttttttctggttctgctgctggtggtgttttgggaattggtgctgaagcatcaagatctatttacacatcacggtacttgcgtgaaagaaaccccataatgtatgagaaattaaacagtatgggtgactttgatcttttttattatcttgttgaggatattgttaggccttatgagacagcttgtgaaattgcaaggataaatcctgaggagtttaataatgtctgcaaatacttctttggaggtttatga

SEQ ID NO: 184404 - DNA, 228 bp, Klebsiella oxytoca
atgaatataaaagattttatacttatcattgtttcacggatcgtagccagcattgggatgacgctaggaactatcagtatggtttactctttctactgtttcttcttttctgacaatccttaccgctttattctaggaggggcaggtatagtcgcctttctcataggttatggcctttataaatttgccctgaaatatatttatgatgagtgggatcgttatagatga

SEQ ID NO: 184405 - DNA, 2616 bp, Klebsiella oxytoca
atggaaaatatatttaaaatgacagggggggtccttaatcgctataaactagatattccttcctgcccttatccattggatgtggaacgttttgatggtttagaacaaatgagtgctctatatcattacaccattcgttttaccagttcacatccggagcttacggctgaaatgatgttaagtaaaaccgctacgctgagcataggggtgggagaactatttaattctactgtcggtaaaattgttcatggcgtggtgacaaatttccgacgcctgatcggttcacgcgatcaggttacgtatgaaattattctggaaccctttatatccttactggataagcagtttcgtactcaccgtttcttcgtcaacaaatcagtgccggaagtggtagcgcaaattcttggcgagcatggtttgaaagggtgggaatatgaattcaagcttaaacaaacctacccaaaacgggaacagataaaccagtaccaggaaagtgaccttgagtttattgaacgcctgctggcagaggtggggattttttacttcttcaccctgcagcctgacactcagaccgaagtggtgcacttcgcggacaagcagagtgcctggacgtttggtaagaaactgccgctgaacagcccgtcaggggagaatgacaatgcggccgactcggtgtggggcgtacaagtctggcataacgtggtggagcgttcggtcaccgccagtgactacaaccaccgcgaagcccagagcgtcctgatgtccgtaccggctgacatgacccgcggcgacggcgaggggaacacctacggtgatgtgtaccattatcgcccgcgtcaccttgaacgtggcgacaaaattacaccgccggcagaaaccggtaacttctgggcgcgtctggagcatgaacgcttcctgtccacccagaccacggtgaccggcagcagcaccgaccacacccttggaccggcgcaggtactgactattaccgaaatggctatcccgccaacactgccccgtgaaacggagaacggtgttgttattatccgcactggctactacgccagccgtaagaatgccctaaaagtggcatgggtagcgataccctactacgaaaaccgttgctggcgccctgcggctaaaaagcgcccggtggtcagcggcaccctgacggcacgagtgaccagcgccaaagataacgatatctacgcctggcaggatgcctcgggcatgtatcgggtgaaatttgatgctgaccgcgatgacaagcgtcagggcatggaaagtatgccggtgcgttttgccaaaccttacggcggagacaaatacggcttccacttcccgctgatacagggcacggaagttgctattgcattccacgaaggcgatccggatcgcccgtatatagctcacgccctgcatgactcccgtcacgtcgatcacgtcactgaagccaacagcacgcgcaatgtcatccgtaccgctggcctgaacaagctgcggatggaggacaagcgcggcgaagagcacatcaagctcagtacagagttcgggggcaagacgcagctcaatttaggtcacaatgtagacgcttccagggagcttcgtggtgaaggggcagaactgcgcaccgaccggcatgtttccattcgcggtggtgctggtgtgtttatcactgcagataaacaaccgtttgccggggacaagatgctttccatgcaggaggcgatagcccagcttgagaatgcactgagtattgcccgcagcatgtcagacgcagctgaaaccgcgcaggcgctacccgctgatattcagagtcaggtgaagttgactgatgccctcaaagatctggtgcagccaggaatggtgttgaatgcacctgaaggcgtgagcatcaccagcccacaggcggttcgcatggcgtcaggtagtgccagcgttgggatcatgtcgcaacagaatacagacattagcgcacttaaacgatttaccgtagcagcaggtgaagccgtgagtatgctggcccgaaaggccggaatgaaactttttgctgctaagggaaaagtagaaattcaggctcaggatgatgcgcttgatgcgatagccaaaaaggatgtgaccgtaaccagtacagaagggcgggttgagatcacggcggcgaaagatgttgtgcttaaaaatttggatgggtcgttcatccagttgcagggtaagaatattattctgggctgtgaaggtaatatcctgtggaaatgtgccaatgcgcagaaaatgggtagtgtaagcatgagtagtgttatgccccagtttccatctggatatagtgggaaatttacggcatcgtctgatgcaggagttccagttgccgctgcggcatacatgttgacatcgagtaatgggcagaaattatttggtagaacagacgagaacggtgaaacagttccagtttactcatcaaacccgaatgagccttttgaagttgaaatgattcaaagtgattattggtacgatagtgaaaatattgtggaaagagtacattgttcatcattttcagatatgtcattccaggacgatggttgccaatgcagtgattgtgagggaaataaaagtgcgtga

SEQ ID NO: 184406 - DNA, 216 bp, Klebsiella oxytoca
atgaaatgctatgacaatgaaaatattgtgatcggataccatctcgggctggatgaagaggagagcgtaaagggttcattgttgtcctatattgacgccccatttattgatctttcagggaactttatcacaggcaacaaactttctgagcttagatctcgagaaatgaaaaacccctacgacaatacacgcatagactttattagcaatcgctga

SEQ ID NO: 184407 - DNA, 1905 bp, Klebsiella oxytoca
atgtctgatttatatgagtatttgaatgccaaaaagggaaagacatattttgatgaccagattaaaccattttctttaatctcactctatccggatatagatacatcccgaaagctaagaggtaacagtcgtacaataggagatgctgataaagatgtccaggatgctattatagatatgataattaccatagctgtccgctatggattaagttataaagagatatcttatatattattaaccactaaggttgagtctggatttaaccccgatgcggcagcggggactactagtgctgctggtttagcacaaggaacggttggttttatcaaagatgcattgacacaatctgaagacattcttggttttcagctagatcttcgtaatgcggaagtttttgacgctgaaaaaggatgctatgcggttatttattcctttttacttaacaaatcgaaggtgatggagagttacacatcagatcaaagtgaatactgggaatggctttatttgttgcatcatgatggtgcctatagtttaggaaaatatctcgatggtacgcgtgagaaaagcgcagatggcgagaagtgggcgctttatataactaagcatttatcagttgtggaagggttactaaaaaatactgaagttaatactaaatttaaactgtctacgggaaataatacagcattcaaaaacaaaaattatattgctgcaatctctccatttccaagttcaacatgcccaaatttagtgtcagattatgagaaaactctagttcttatcaaaggtgtgactgatgaaaacgggatgactgaatcagtcaatgctatcgcaggttcagaagttgtgtttactattcttgctgataattacaaagaattagctaaagcaactgttgaaaaaaataccaatgaaaagcataagactctaacttatatcgttaagaaaggtgacaccttatcagcaatagcgaagaaatatagtgtatcagtagagaaattggcaaggattaataagatccataacgtaaatatgttgcgcattggtgcgaaattaaaaatacctgatagtaataaaaaccatggatatgttagccgctatgtttctgagcagaccaagaaagagattctcaaaagcgttggggttgaaaatgctaatgttaaagcagccatagagtattcgagaagccatattgttttgccaaaaggaagcaagtccgcagactcggaaaaggaaagcaatgtaattcatattaaaactacgacgacggatcagtctgttgctggtagaagtaaaaatgaaccagagaagcatcagactacttccgaggggaaagctaaaaatgtttctgttgataaaaattttgagccggtggtggatttttctaaagatattcctctcagcttgaaaaatctggtaactaatcattctcttgatattatgaaagggataatgaaatccgcaggtgtccataagattatgatcaccagtacgttgcgcaccgcggaaaaacaagtcgatgcaatgtatatgaacatgaaaaacaaggggatacaatcccagcttgattattatgctgctgcgggacgggaggttgtacaagcagctatcgctgtgggtggcatagataaaagtaaggagaatcaggttaaaaaagccatggttgataaagtcaattctttacaaaaagatgggcgtcttgtttcaaaacactgcgtttctcttgaatcgtatgctcagagaaatgtatttgatataagtaaaaagttattgcctgccgctttgcagcgggcttttgataaggctattacaaaatatgcaaaagataacccaagtaaaatgaaatatatcagcccgtttgaaaatcgcggtgagccagcattccatgtggagattgtacaatga

SEQ ID NO: 184408 - DNA, 681 bp, Klebsiella oxytoca
atgaaaaaaatattgttttttattgtcgttgttcctttttttgcattctgcaatactattaaggtaaaagatggactgtattatggatattgggtttataaagaacatggtgctatgaaagagtatggcgttttagctaacaaacccaggaaaaatatgggtaaatatatcttaagtcctgttcctaagtttactgatgataatgaaatatatgttgaagttaaaggtggtgttccgactgtgtatttttatcagaaaagtgttgagtctgatttgaatacggttggatgggctggcgctagatttgctgaggggaatatggttatttcttcaagcactattcgaatggtcacagaggataccacagaaaatatatttgttggtgagagaatttctgggaaaaagttaaagtttgaaaaggatgagttggtcccgttgtcattaattgatgataatggatttaacgtaagctgcaatcaatacttggatgttaacgcttatagagagaatggccttccctattattctgagcctgaccctgaagggcgaaagggaatagaaataggttaccctacaacgattttcgcagtcggtgaactcggtatttgttctgcatttctcgatgatgatattgttcctcaaattaaaaacggatggattcagttccgtcgcctcaattaa

SEQ ID NO: 184409 - DNA, 1161 bp, Klebsiella oxytoca
atgagctgggagcgtcagaaagccacaattgctgcagaacctgatgagccttcactggtcatctggctgattgcaggccttgttgctgttattgccggagtgttgctctttgtacttcacgccaatcagtttctgggtgaattgcaaaaatttaacctctggattgttgccggaggccctctttttatctggttcgtaacgatttgtattcgcggctggatgtataaccacgcaatggatcttcatcagtttgaatccgatgaggcagactatgcacagcagcaatggacttcatgggccggtcgttatctggcggttctgtatagccgggtaatcctgcctgatgaattgacaccatcaacatttctgcaatcccccaaagatctcgagcagagtagctctctttctcggggaataacgttacctgctggcgaagatgctttttcagcattgattgggggactgaacatatcagaattacagcgcttatcagacctccctttccacgcaaccttactgactgattcacacgatcctgatgagacattgcagagagaattttcagcatgctggctccagttagttggaatggcctatcccgtaccgttactgacgattcttaaaggccgggccttcgattgggtgggcgaacgccttaaagccccgattctggatgttgagcttttgttggttcaccagactcagggagggaatgaatatagtgattccctctcggctttaatgctgacttctgatgatgtagcaacgaagtatcagctaaaccatcacgctcgcctgcttcggcctatgtcgcttgaatcaacccaaatgctgagtgaagagctcgatatctttttctcgacccaatcacaagcgatcgctgcgcgcgcaattgtgggcgacagcatggagtggggggaggatttatccactattttggccagtgcaaaacaatatgaaggcagctggaaaccccagcagtgccattggctggagaaatatgccggacttagcggtcctttctcaccgtggattatcgccgccgtcgttagtgacataaccgcgctcacaaaagaagattgcctgatgctttcgggtgacaaagagcagcgatttgtgaataccgtaactacagggagtctgatgaatggtgaaggataa

SEQ ID NO: 184410 - DNA, 3420 bp, Klebsiella oxytoca
atggtgaaggataactcagtgtggcgtggtaactggggacgcatcagtattactgcactgattgctgccgcgatcggattagctatctggaaaaagggcgatgcgttcggacttaccagtaatagccttaaactgctggtatctgtggcggtgataattcttctgctacttgtccgccatggcaaaactattagcctggcgattaaacaacagtggtcgcgttttcaggcgaagcgtaaaagtctcctgcctgctgatgaaggtcgcgttaagcagacaccgccacgcaatgtcaccgttgataccatccgtgcagccatgcgtaacctctatggtcgtcgctggggccgtaaaacacgcatcctgctggtcactggcactgtatctgaggtggagcaactgaccccagggctcacgactcagctctggcaggaagatcgcggcacgctgttactgtggggcggtgacctcagtacgccagccgacagtgcctggcttaccgcgctgcgcaaactgcgccgccgtccggtggatggcatggtatgggtcacttcagcgtttgaccagctctcagcgccagggctggagcagccgctgccggtaccttcagacagcaccatggatttcctgtctcacgccatcagcatacgtatggaagcgcttggctggcagctcccgctgtatgtctggtccctgcacccacgcgccggtaaaccggaagggcgcattacgcaggcaaccggctgtttgttacctgccggttgcagtaccgaagggctggcagagcaactgtccgccctgacgccagatttgacttcacaggggctgcagcagacctgcggtgaagtgaaacataacttcctgctgacgcttgccgaccagctcattcgtgagccggaaagcgtgaccgcaccgctgtcggtgatactcaatccgtaccgtccgcttctactggccggcgtggtgttcagtcagccttcagccggtgccgaacgtgccgtgccgcaccactggggcatggataagcgctgggatgccctgccggagtctgtccggacactccctgccggactacgtccgtacaagcccggcattccgtggcgcagggtgatggcgtctgttgttgctcttacgatggtcggctgggctgcgtggatgggcatcgcgtatgtcaccaaccgcagccagattgacagcgctaatgtccaggcggcacttgccgcccgacagaatcagcccctggagcagcgcctgcacgcgctgtctgaactgcaaaaaacgctgtcccgtctgcagtaccgctctgagtttggcgtgccgtggtacgagcaggccggactaagccagaacaatgcgttgctggacgcactctggccacgttaccaggacagcgcattgccgctgctgcgggatgccgccgctgaccatctgcagagacaacttaatgcctttaatgtattgccagcgggcagcccgctgcgtgagcagatggcaaaaaacacttatgaccagctcaaactctacctgatgctggcgcgtccggaacatatggacgcggcctggttcggctctgcattgctgaatgactggccgatgcgtgacggtgtaaaaaacggcgtctggctggggatggcgccttctctgctgtcgttttatggcgtgcagctggttgcgcaccctgaatggaaactgcgtgctgatgaaaatctggtcagccaggcgcgttccctgctggttcgtctgatgggcgtacgcaacagcgaatcgaccctgtaccagaagatgctcactcaggtgtcgcacctctatgtcgatatgcgcctggaagacatgaccggcgataccgatgcatcccgtctgttcagcaccacggaagtcgtgcccgggatgtttacgcgtcaggcctgggagcaggccgtgcagcccgctatcgagaaggtggtgaaggcacgccgggacggactagactgggtgctgactgacagcaagcgtcagatgaataaacaggacgagacctcaccggaagctctgaaacatcgcctgacggaacgttactttgccgacttcagcggggcatggcttgagttcctcaacagcctgcgctggaaccaggcgaccacgctgtcggattccattgaccagttgaccctgatggccgacgtgcgtcagtcaccactggtggcgctgatgaacaccctgaatgtgcagggacgcaccgggcagacaggcgaagccatttcggattcgctggtgaaatcggcgaagaatctgctcggcggtgataaccaggatgccattgatcagagcgctggtgttcacggcccgctggatgcaacctttggtccggtactggcgctgatggacaaaaaccggacaggtgcacaggagttgagtctgcagtcgttcctgacccgcgtgacgcaggtgcgcctgcgcctgcagcaggtgaccaatgccgccgacccgcaggcgatgacacagacgctggcgcagaccgtatttcagggtaagtcggtcgacctcaccgaaacccgtgactacggcagcctgattgccgccggtctcggcctggagtggagcggcttcggccgtaccgtgtttgttcagccgatggagcaggcctggcagcaggtactgaccccggcggccgaaagcctcaatgcccagtggcagcaggccgtggttgctgagtggaacagtgccttcggtggacgctatccgtttaacaattccagcagtgatgtatccctgccgctgctggctaaatacctcaatgcagattccgggcgtattgcgcagttcctgcaaacccgcctcagaggcgtgctgcacaaagagggcaaccactgggtgccggacagcatcaactcgcaggggctggcctttaatccggcgttcctcaatgccatcaacaccctgagccatatctcggatgtcgctttcaccgaaggcagtgccggcatgaacttcgagttgcgtccgggcactgccgatggggtaatgcagactgacatgattatcgacagccagaagctgatctatgtaaaccagttgccggcgtggaagcgcttcgcctggcctgcagataccgaggctccgggggcgaacctgagctgggtaagcacgcaggcaggaacccgtcagtacgccgatatccctggcgcctggggctggatacgtctgctcgataaagctgtggtcagtgcttatcagggcgttggtagcagttacagcctgagctggaaagcacaggacgggcgcacgctcaattacaccctgcgtacagaggcgggcgaggggccactggcgctgctgaaactgcgcaacttccgtctgccggagacgattttcagcacgactggcgtggccgaatcaggcctggtcgccagcgaggccagcgaagtagaagaggtctactga

SEQ ID NO: 184411 - DNA, 363 bp, Klebsiella oxytoca
atgagcatgctgaatacattactgagcgcctgccagacagaacaggaaccattacttgtagcaacccgtgagcgagtggcgcagtgggacagctggctgcagccgctgtccgggcaatcggccgctggcgaagacccgggctatgacgatgactttcagcagatgcgcgaggaggtcaacaaactttccggtgcggatacagaactcatctgccggctggcagagaagctgctgaccacgaccgcgaaagacattcgcgtcgcgacgtactactgccgggcgaagctgcaccgcgaaggtgaacagggactggctgaaggacttgaactgctggccggtctgctggagcgctttggtccatag

SEQ ID NO: 184412 - DNA, 735 bp, Klebsiella oxytoca
atgaaaataactaaatttgtagcatgcattgtcatggtgctattactgtccgggtgtactgcaattttgtggggaggaaataaagtctcaggtagtcatcgggtgaatgttatgaaaatgcaggatagtgtcaccgatatttttcagtatgaaaatatctccgcttctgttgttcaggataagaccaatatacctctgattattccttcggaaggtatcgcatttttaggtgaaagaaatgtctatattctgacaaggggggctgatgagttactgtctttaaacaaattaacagacaaaatcccactgattgcaggtaaagaagaaaatacgctcaagcttcagttggctcgttctgtaaaaggggatgctgtctttcgctttaaggattcgttacgtgtctgggttaataaaagcgaaggtgagctttcagaatacgatatagatgtcattaagcattcaggcttccagaactcgaaggggggatactggaaagatgtcaatattgagggcatagttcttccaaggaaaagtctcaattatacattcaccaataccgagtcactggggcgaaagtataaagttgaattttacgcgaccgacaatgaaaccgatttttatccgaagaatcttgctaccaacattgtgctcacacctgtggcccttgctgcagatatcgtatttttccctgtctccctcacatttctacgcttaatcatcgggcaacaacactag

SEQ ID NO: 184413 - DNA, 339 bp, Klebsiella oxytoca
atgcgcgtgcatcccggtggcggtttccggcttcagcaccgccttgagggcgcggaagcgatcgcgaatatcgttcatgttcatcgccccgccggaatccaccacgtaaatacaggtggcgccgtaggattccatcttcagcgcctgctgcgccagctgttccggggaggtcatatggctcatcatcaggaagccgacggtgtccatgcccagctcgcgggcgaaggcgatatgctgcgcggaaacatccgcctcggtgcagtgggtcgccacgcgcaccacccgcgccccggcctgatacgcgtttttcaggtcgtgcagggtgccaatgccgggtag

SEQ ID NO: 184414 - DNA, 720 bp, Klebsiella oxytoca
atgcttaagaatttagcaaggatgaaacatgctattacggaatgggccattaaagagagcatattggatgatgctacttttttaacccaaaaggaatggaacgaccgtggagaaaaaatccacaacgatgcattaatggtcctagtaattgacggaagtgggatatttagtttgttgaacaacggttgtgacacaaccgaatttgatgatctggttgagtcatttggcttctggtatgaacggggctatagctggagccttggcttttaccctacggacaattatgactacagaaggctgaatggtaactatacatccaaacttctagatccgaggtggttaaggaaagcagcattagttaaggcagcagctggacaccagtgcgaggattgtggaaagcaaggacgccttgaagctcatcactgctattacacgacgatgagtcttggttatgagccatgggagtatccacttagtgcatttcgggctttgtgtcctacctgccataccacacgacctattcctgaaataagggcaagggcattccttgcacgactgaatcagtcccaactctcaagactactcgatggcttagataatggcttcaaccgatttgaagccgattcctttattgactttatgcggaaagctagttttcataaaacgcatatggatgaagctcttttacttctgaaaaaaaacaccgatatatatgactaa

SEQ ID NO: 184415 - DNA, 675 bp, Klebsiella oxytoca
atggagcagaacacttttgttgatcggtttttccacagcagcttggagctaacagatttcaggaaaactggtgagcgcgatattaatacattattcagctttctaaacaatttacattcattacaagacagattccgtgagcagtttcatagtaatatttcacagcacccggagtttaaattactgcggatattaagaaactatcatcatcatgtcggtgacgttgatgaatttagggtttacaatgttaggaatgaatttacacttagccattccgagatgattattatcccattatatatagttgccaaagcgatactcaacgcaaaaaaacggcataatgcagaaagagaaatacaatccatatcagagtttatcgatgattttgagtatatctcagcgaacgattcgtttttttcggaaaggcgccctatcattaacaatggtaaaacgtactatccaggatttgatatttataaatgtgtttacaatattacaaatatcattgctgacatctgtcgaaaaattcccgagctatcacaaaaaaaatgcattattaatttagacgacacatacactagtaaaaacaacatagaaaaacgtaatttattatgtcatgccggagaggttccattccttactactgaaggctatataatacctgaacaaaactaa

SEQ ID NO: 184416 - DNA, 837 bp, Klebsiella oxytoca
atgatatatcattacacagatttaacagcagccaaatctatagttgaaaatgaaaaaatatggcttacggaatgtcgctatcttaatgataaagaagaatttacaatgggactattatttttcaaacatgctctagaatcatacaatggctataaaaatcactacccgatcgagttctcagaaaaactagaaaactcaattagttacttaataaaatctgaattaacatcacctgacgctgcagaaaatcttttcgtcgcatcatttagtaacacgcctgattctttgagtcaatggcgtagttatggtatgtttatgcttggatttgaagaggattttatttctacaagtttaatcgaagatgaattttttgcgtttgaatgtttttacgccatggattttttggaaggcttagcacatgctaattctttgttagaaaacattataatcccacgactttattctctatctaaacacaacaatatccaaattatggattattggcttagattattaatagaaatatacgcactctcatttaaaaataaagcctttgaaagcgaacatgaaaaaagattagtgattgcatgtaaaaatgacgatacaatcattaacttccgtattaaaggtgatttattaatcccatatatatcattcgatattaacccctgctctcttatgtccataacagtaggacctatagaaaatcagtatttatcagtttcatcgcttgaaaaattcgcgacaaatataaccagcaaaattaggaaggcacactctaaagatgactacaccctatatataaacagctctagcactccttatcgtaaactgtaa

SEQ ID NO: 184417 - DNA, 1098 bp, Klebsiella oxytoca
atggctttcttcaccatagagaaaagattacgcagtgatggaactgcccgttatcgctgtactgtagccgttaaacaaaatggtaagtacgtccaccgggagaacaaaaccttctccaagaacacccttgcgaagtcctggggtgctaaacgtgtagcatacattgaagagcatggtatccaagaccccgcccgcaatgcgcagacgaacgctgttataactgttggtgacctgcttactcagtatgagaaccacccaaacataacgcttggcgcatcaaaaagaagctctctccgcacacttggtcgttccttcctggcagacatcagactttcggagttatcggcaaagcatattatcgagcattgccaagccagaaaagcgcaagggcttgcaccttctactatttctcaggacgtatcctatttaagcgttgcgcttgaagctgccaggcctctctttggagctaacgctaatgtaaacgaattgtcagatgccaaagtttggttgagaaatatgggtatcataggcccatcacagcgacgcactcgacgagcaagttctgtagaagttgatcaattatatgaagtactcaagatgaaggctgaaacggcttatacaggtgcaccattacatcaaatatttatgttttccattcttacctgtatgagaataggtgaagtgtgtcgcattctctgggatgatgttgatgaaacccaacgttccgtactcgtgagagaccgtaaagatccgagaaagaaagcaggaaaccatatgttagttcccttgcttggtgatgcatggagaattcttaagatgcagcctaaaactgatccacgggtattccctttcaatcctaaaactataacagccatgtatagacgtgttcgtaaagaattaggtattgaagatctgagatatcacgatttacgccgcgagggtgcaagtagattatttgaggcaggtttcagcattgaagatgttgcacaagttaccgggcaccgttctctttcaatactatggcaggtttacacgcagttgtttccaaagtctctacatgagaaatttaatatgttactcaaaaatagagctgattaa

SEQ ID NO: 184418 - DNA, 1446 bp, Klebsiella oxytoca
atggaacacgtttatcaatttgtcgatgacgttattgaggggcggcgcaacgatttttgcgccattgccgatgatatctgggaccatccggaaacccgctttcaggagttctggtccgctgcgcgtttggccgatgcgctggaagcggaaggctttcaattgacccgcaatgccggcgggatccccaacgcctttatcgccagcttcggcgcgggccaaccggtgattgccctcctcggcgaatttgacgccctggcggggctcagccagcaggcccactgcgcggaacccacgccttcgacgccgggagaaaacggccacgggtgcgggcataatctgcttggtacggcggcgttcgccgccgcggtcgccgccaggaactggctgcagcaacagggcggcgccggcacgcttcgcttctatggctgtcccggtgaggaaggcggctcggggaaaaccttcatggtccgcgaggggttattcgatgacatcgatgccgccctgacctggcatccggaagcctgggccgggatgttcagcacccgcacccttgccaacattcaggcggcgtggcggtttaccggcaccgcggcgcacgcggcaaactcgccgcatttgggccgcagcgccctggatgccgtgacgctgatgaccaccggcagcaacttccttaacgaacatattatcgaaaaggcgcgggtgcactacgccatcaccgataccggcggcgtctcccccaacgttgtccaggcgcaggcggaggtgctgtatctcattcgcgcgccggaaatggccgacgcgcagcaaatcttcgcccggatcgagaaaatcgcccagggcgcggcgttgatgaccgagacccgcgtcagctgtcgcttcgaaaaagcctgttccagctatctgcccaaccgcacgctggaagcggcgatgtatcaggcggtttgccattacggcacgccgccctggagcgcggaagagcgcgcattcgccgccgaaattcgcgcaaccttgagcgcgaacgatatcaataacagcctgaaaaacattgccgacaccggcggcgaggacgggaaagcgttcgcccgccgccaccgcgaaacgcgcctgatcgatgaagtggcgccgtgggcggcaacggacaacatccttgcgggctctaccgacgtcggcgacgtgagctggaaggcccccgtggcccagtgcttcagcccctgttttgccgtcgggacgccgctgcactcctggcaactggtgagccagggcagaacctccatcgcccacaaagggatgctgctggcggggaaagtgctgggcgcgacggccattcgtctgttcagcgacagggcgttactgaccgccagccagcaggaactggcgcaggtcttagccgaaaggccctaccggtgccccattccacaggaggtcaagccttcgattttaaaataa

SEQ ID NO: 184419 - DNA, 543 bp, Klebsiella oxytoca
atgaaaagctacgataagctggaagagtacgtgctgcagaccgcccacacctatcaggcggatatcggcgaaatccagcaccggattaaatcaccggtagtggcaggctttttgatcggtaaaattcagcgcgctaaggagcggggttttaccctcactctcgccgaagagagcctggtgccggactgcccgaatgaaaaacaggtcaccgtactggttacggtgctgggtaatttaatcgaaaacgcgctggatgctatgagcggccaggccgaaggcgaagtcggcctgctgctgcattaccagaacggctggttaagcggcgaagtcagcgatgatggtcccggtatcccggaagcgtttatcgatgatatttttaataaaggcttctccaccaaaggcgaaaaccgcggcgtcgggctgtttctcgccagccagcagcttcgcgaactgggcggatcgctggccgtggaatccgaacccggcgtatttactcaattttttgttcatctcccgtgggacagtaaaaggaaaagtgcgtga

SEQ ID NO: 184420 - DNA, 741 bp, Klebsiella oxytoca
atggcgagatttagcgcaaaaagagttcttatcaccggtgcgacaagcggaatcgggcttgccggggcaaagcgcatcgatagcgaaggcggttgggtgatcgccaccgggcgcgatcccggacggctggcgtctcttcgccggcagctctcggatcgggcgcgggtcattgacaatgatgccagcgatccgctgaccggcgcggcgctggccgaggcgatcgattcatccggcgggcttgatggcctctggctcaacgccggatacgcagcggttggggagctgtcgcaggtggatgccgtagcctttgatcgcatgatggcgaccaacgtgcgcgggccggttctccagatggcggcgctcgccggaaagcttaatgcgggagcctcggtggtggtgacggcgtccacttccgcttatgaaggggccgcggcggcaagcctctattcggcgactaaaggcgcgctgatttcgttaacccgctgctgggcctcggcgttaggggaacgaaatattcgcgttaacgcgctgattcccggcccgattgacaccccatttcgccattttatgcgcgacgaggtgcgccgcgaatttgaagcctcggtggtgagccgcctggcgcttcaccgccaggggacggcggctgaagcggctgatgtggcgctgtttctgctttccgacgcggcgtccttcgtgagcggtagccagtatgtcgtggatggcgggctgacgttgcgctaa

SEQ ID NO: 184421 - DNA, 906 bp, Klebsiella oxytoca
atgagcagtaagccaaccgcttcaatgatggaacgacgccaccctgaaaccacccatattgatagtcttgccaccctcgatatgctgacgctgctgcataaggatgataagcggattgccgatgccgttgaggcctgtttgccggcgatcgcgcgcctgatggataacgcgacggcgacgctcagccggggagggcggctggtgattgtgggggccggggcatcgggtcaagccgccgcacaggcggtgaatgaatttaccccggagggaaaacattcgcttgtcgcccttatcgccggaggagcgaccgccgcgcggcaggagatggaaaccgccgcgagtcattacgatcttggggctttcgaacttgaggctctgcgattcagcaaccaggatatgctgctggcgctgacggttagcggcaaaacgccgtgggtctggggcgcgatgcgccacgcctggtcgctgggggcgccgattgcggttgtgacgcagcagcccgccagtgaagccgcgcagctggcggatatcattatcgccccgcaaaccgggccagaagcggtggcgggtttcgggaatccgaaagcgcgcatcgcgcagcggcagatcctgacgatgctgaccaccgggctggcgattcgcgaaggacgggtttatgaaaacctgcgcgtcgatctgcaggccaatacgccgcacgaggccgagcggcagatagcgatcgtgatggcggcgacggggggctcgcgcagcgaggccaaagccgcgctggccagctgcaatcagcactgccggacggcaatactcatgctcctcagcgggctcgatgcctggcaggcgcgcgagctgctggcagagcataacgatcatctgcggattgcgctacgcgcggcgcagacggttgcctga

SEQ ID NO: 184422 - DNA, 621 bp, Klebsiella oxytoca
atgtcatcaacgccgcgtcctcatgatttagtctggttgaataatgccgccgcgttggaggcgattgaggagtcctgggtcgcacagcactggcatattagcctgccggtggtggtacgacgcgacgttgatgctaacgcccgcattccggtgggcgtacgggggatgaagcgcgatcagcgggccgcaggctgggtacagagggaaaatatcgtccgtaccgtcagcccggaaatcctcgccgatcgccaacagctcctgcgctcgccgtttgtctcccagccgccggtgcaggcggcgatatcactgaccttacacccctggccgtggcgctggggcattaccggcagcaccggctacgcgctggccaccgagattccggtacttcacgccgccagcgatctcgatctgctgatccgcgcgccgcagccgatcgctcgcgaagcgctgctcgcctggcagtcccgcgtcgcgcagctgccctgccgggcggatacccaggtcgaaacgcccgcaggggctttcgcgctaaatgagtggctgcgcgatggccgcgtcctgctgaaaacgtcccgcggcgcgcgcctgaccgctgcgccgtggaacagggaggaagcatga

SEQ ID NO: 184423 - DNA, 258 bp, Klebsiella oxytoca
atgggacagctcgttagcttagaagactgggcttccggtcctaatgggtttaagcatccgccatccagagcgtcgctgcacagaattgcaaaaacgggacaaacgatcccaagggcgctaaagcttggtcggcgatgggttatagatgaagatgcaaaattcataggcctaatcacatcgccggttctacccccccgcatgccgaaagcggttaaaacgctaatggagcgagtaattaatggcagccagatcacgtga

SEQ ID NO: 184424 - DNA, 240 bp, Klebsiella oxytoca
atgcgactgataaaccgaagcaaacaatcgccgctggggcgccaggcatgcgatgcggcactggcgaggcacgttgaactctacggcaattatgggcgccagaaaacaaagcggacctacaccgtgatcgtccagggttcaaaaatcactgtagagattgttaatcgtaaatccagttatgtggctaccgccatgaactgcgcgcgcaggttgcgtcatttaccgggccaattctcctga

SEQ ID NO: 184425 - DNA, 228 bp, Klebsiella oxytoca
atgattgtcagaacctggcatggttgtgttcccgttgagtttggcgatgcgtttgcggttcatttgcaggcgacaggcgtacagcattcccagggcatcagcggcaacgcggggcatttgtcagacgggaaacgcagggggagtgggaacacttcttcctggcaacgtactggcacaatctggatgcggtcatcgcctttgccggtgaagcgtatcatgtcgcagtga

SEQ ID NO: 184426 - DNA, 1251 bp, Klebsiella oxytoca
atgaaactctctgaactcgcgccacgagaacggcataattttatatatttcatgctgttctttttcttctactatttcattatgtcagcctacttccccttcttcccggtatggctggcggaagtaaaccatttaaccaaaaccgaaacggggattgtcttctcctccatttcgctattcgcgataattttccagccggtgtttggcctgatttccgataagctcggcctgcgcaaacatctgctgtggacgattacgattttattaatcctgtttgcccccttctttatttttgttttctctccgctgctgcagatgaatatcatcgcgggcgcgctggtgggcgggatctatctggggatcgtcttctccagcggctccggggcggtagaagcctatattgaacgcgtcagccgcgccaaccgttttgaatacggtaaagtgcgcgtctccggctgcgtcggctgggcgctgtgcgcctcgatcaccggcattctgtttagtatcgaccccaatatcaccttctggatcgcctccggcttcgcgctgatcctcggcgtgctgctgtgggtctcgaagccggaaagcagcaatagcgccgaggttatcgacgccctgggcgtcaaccgtcaggctttctccatgcgcaccgccgccgagctcttgcggatgccgcgcttctggggctttattatttatgtcgttggcgtcgccagcgtctatgacgttttcgaccagcagttcgccaacttttttaaaggcttcttcgccagcccgcagcgcggcaccgaagtgtttggcttcgtgaccaccggtggggaattactcaatgcgctgatcatgttctgcgcgccggcaattataaaccgaattggcgccaagaatgccctgttaattgccggggtaattatgtcagtccgaattttaggctcctctttcgcgacctcggcggtggaagtgattatattaaaaatgctgcatatgtttgagatccccttcctgctggttggcacctttaaatatatctcgtcggcatttaacccaaaactttcggcgacgctgttcctgatcggctttaatttatcgaaacagctgtcgggcgttgtgctctcggcttgggtaggacggatgtatgataccgtcggcttccatcaggcttatctgatcctgggctgtattaccctgagctttaccgtcatttcgctgtttaccctgaaaggcagcaaaaccctgctcccagccgcagcataa

SEQ ID NO: 184427 - DNA, 336 bp, Klebsiella oxytoca
atgacattactcaatgaaatcgctgccctgcagcgcatgcgggaaaataatggcagcaccggtgaagtggttccttttatttatgcgcttatcagccgcaccggcaatgcagccatttatatcgactggtattcactgtatgcgcacctcggcggcgagcgattcagggctcgggccctgcatgctgagtttgacgtggatttatgggatgacatgaaacggggatttgtgttcggtgcaggcaatacccgcgcccgctttttctggcatctctattaccgggtgcttcgcatgagaatcagggggttacgtaatgattaccgaactgattgctga

SEQ ID NO: 184428 - DNA, 948 bp, Klebsiella oxytoca
atgtctgaagtgaatattaccgatattcgcgaggttctgcgcaaccttgccgcagagaaaggtatcagtttcgctgccatcgcaaaagaaatcggcctgtcatccggtgcccttagcggcttcatgaatgaaaaatatgttggcgataacgagcgtgtcgaaagtgcgctttcccgctggattgaagagcagcagtacgcttctgaactccctgaaacgccggagttcattgagacccagaccgccagtcagatctggacagcgctgcgttatgcccgccagatgacctgcatcagcattgtctgcggtaatcccggcgtgggtaaaacagaggctgcgcgggaatattgcctgcgtaacgataatgtctggatgattaccgcttcgccctccagcgccagcatccttgaatgcatcaccgaactggcggaggcgctgggtatcgataaagcaccacgccacaagggcccgctggtacgtaccgttcgccgccgtctctcggggacaaaaggtctgatagttattgatgaggctgaccacctcggtatggaggtacttgaggagctgcgtctcctgcaggagtcggcttgcgtgggactcgtgctgatggggaaccataatgtctattccaacatgaccggcgtcagccgcaccgtcgagttcgccaggcttttctcgcgtattgccaaacgcgtcgccatcaacaagaccaaaaaagccgatgtgtctgctgtcgctgaagcgtggcatatcaccagtgaagaagagcgcacgttgctgcaggaaattgccgccaaacccggagccctgcgcaccctcagccatactcttcgcctcgcggccatgacggctcacggcgcgaaaaagccgctcaatgagacgtttatccgtaaggcatacaacgatctcaatctggatgttgatgtttcaaagttattgcgggggtaa

SEQ ID NO: 184429 - DNA, 2079 bp, Klebsiella oxytoca
atgtttgccacggtgaatgaattagtgggtcttcccggtttgccgggaacaccacagggcatcagagccatgatggggaaactggtcaaagataatcaggctctggtgcgtaagcgtcagggaagcaaggcgttcgagtaccacatcgacagccttcccccggttacccagaaagcattacgtgaccgtcaggttaaagagttgatgaaaaatcaggatgcagcgttaccttctcctgaacgctccgctgtgatggaaaagagtaattcccggttatcgctttaccgtgatcaccctgtactgatggagcaaaagctcacaggcttaactgctgatcagcaaaagactgctgatgcccgtattgcgctggtatcggaagtcctgaagttgggtgaaataccagggttcagttgcgccaaagccatcagggaaatcgtccggcagtcccgcaacggcgagttgcctgagcatctggctacacaggtgacgttggccaatgccaaaaaaggttcatcgcgtaccctgagcgaaatatccctcaagcgctggatggctgatttcaaaaaagccagaacgtcaactgagcgtctggtactccttgcgccgggtaagcgtcagcgcgtggagccggaggaaatcgcctggctgcccgattttctggcgtattaccgtaatcccaatggtgtgacgatggctgaggcatatgacgattttattaagggctggtatacgcgatatgcggatcagccggagatgcttttctctgctccgtcctataacacagtgcgctacgcgatggataagctgccggaagtggtgaaacagcatcgccggatcaccggcagtgaagcccgccagcttgagggttttgtgcgtcgtgactggttgtgcctgccagtgaactacgtctggatcggggatggtcacggtatgaaaatgaaggttgcacatcctgaccacggaaaacctttctccccggaagtgacgttcatccttgacggcagttgccgcttcattgtcgggtggagtctggcgctgtcagaaagcgttattgcggttgctgatgccctgcgtcacgggatcagaaataacggcgttccttatatttattattcagataacggtggcggcgagaccaacaatacctttgacgctaatatcaccggtattttgccccgcctgggtgttgatcaccgtctgggtattcctgagaacccgcagggtcgcggcattatcgaaatcctcaacaaaacgctggggatgcgtatttctcgtcagtttgccacctattacggcaccggggccgataaaagtaccgtgcgccgggtatcaaaatcccttactgctgcgctgaacgcagtggataaggggcgcgaactgaccgctaagcaggaacagaccctgcgcgaatttccgtcatggaatgagctgattggggaaattgaagccgggatcaagtggtacaacaatcgccctcatgaggcgctgccgctgaaaggaaatggtgagcattttaccccggctcaatttcgtaagtacaagcttgaaaaagaaaaaactgagattgagtggctttctgatgccgaactgcgtcacgggttcatgccccagattgagcgcaccgtcagtcgctgcgagattcggcttttcaataacctttattattccgaagcactacgggatgagcataaccgtcaggtgctggtcaattacgatctccacgatgccacgaagattattgtgagccgcatggatggctcgctgatttgtgaagcgttctgggacggcaacaagaaggctgcattccctgtcacagcggaatactggcaaaaacagcagcgtatcaaagggatgcgcgaacgtggagaggagcgggtccgtctggccgaagccgagaacgtgcataccctctcggcacctgtggccccggactgggttcacagcaatatttatcaccctgttatcaagggcacgcccgctatgcaggtcgtgtctgaagaagaggaatatatcgaggatgaatatctcaataacgccctcgatatgctggaaaaaaacgagcgtaaaagtgccatttaa

SEQ ID NO: 184430 - DNA, 225 bp, Klebsiella oxytoca
atggaaagaaatgaagtgcgtgactggcatcgcattgacattgtcgccgagcttcacaagcgcggcgtgacaatgcgcagcctttccaccagtgcggggttaagtcccgacacactgaaaaatgctctggctcgttcataccctaaaggtgagcgcatcatcgcgaatgctctcaatctggagccgtcatcaatctggcccagccgctacaacaaggatttgtga

SEQ ID NO: 184431 - DNA, 639 bp, Klebsiella oxytoca
atggagaatcaaaaagaaaacaatttttcttttgagcacaatgcaaaagcaagcattcaggacaggttgagatatctgtttaaagggagatcaatgaggcaggcatccattgattggggactcccgtattctactttgaataattattttgctaaaggagcaactcctggtcttgatgtagtcatcagaatctcagcatatgaaggtgtatctattggctggctggcaaccgggatgagtgactggggaacaggaaagactacagatgcactggatatgttgtatggtgatgaatccgcaaaaccctcatacagcaataaggagcgttttgatgaagaaccatcaggacatccctacaagcaagaagacgccctcttacttacatggggagctatttttgatgcacttaatgccaatgacaaggcaaagctaattaatatttttgtaacctttggtgctcaaggaattatacgaatgttcaataatttcaatgaagtagattcagaatggactgaattaactactgaggagaaagagcgtctaattagactaaatgagcaactgaaaaaagggtcacttgaagcaagtgaagatgtagccaagccaggcccgtcgagttccagtaagaaggccagttga

SEQ ID NO: 184432 - DNA, 204 bp, Klebsiella oxytoca
atgaaaccgacagtgataagccaggatacgccgtggcatgaaatccacacattgctgctgcctgcttatggtgaaacctggctgatggttgccattgtgatgctgtttgtggtgacccttggcggcgtggtgggcgtggtgttattcaacgcctcgccgcgaggattatttccgcgtcccgcgctttaccaggtgcttaactag

SEQ ID NO: 184433 - DNA, 594 bp, Klebsiella oxytoca
atgctgattggctacgcgcgggtatctaccggcgatcaaaacctcgatttacagaaaaacgcactggttcgcgcagaatgtgaactaattttcgaagataccgccagcgggaaaaatgcgaagcggcccggattaaggaaagctattcgccgtcttcgatctggtgattcgctggtggtctggaaactggatcgcctcggtcgcagcgttcgtgacctcatcacgttggtatctgaactgcaggagagggggattcattttcgcagcttgactgattcgatcgacacttcgacacccgcaggccgcttctttttccacgtcatgagcgctctggcggagatggagagggaattgatagtggagcggacccgcgccggtttagccgctgcgagagagcagggacgcatcggtggtcgccggagagtaatgaccgcagaggtcgtggagcgatgccggcgcatgctggagaacggcgcaacccggcagcaggttgcagatgtgatcggggtaggggtgaaaacgatttacaaatatttccctgtcggaacccatgccctagcacatttatgtaacgtatcccttgctgacgattaa

SEQ ID NO: 184434 - DNA, 810 bp, Klebsiella oxytoca
atgaaaatcgaaaaaagcagattcaattctgaggctgcccctcaacccaacgttaacccgggcgtaattaatggtaacgactttgccgctattgtccctgttatttccggtcagattggtgggcgtgaaaccaatattgcgagcgccagagctttgcataaggcgctgggggtgggccgcgacttcaccacctggattaaagggcgcattagtcagtatggttttgccgctggtgtggattacatcatcgttgaaaatttgagctcacccgtttcggggagcgcaaaatttcgccagcaaatcgagcatgattaccttctgtcgctggatatggctaaagaagtggcaatggttgagcgtaatgaacaggggcgcgccgtccgccgctatttcatccagtgcgaggaagcgctacagctgagcgtgccggaaatcgccgcgaagtaccggcgccagcttaaggcccgaattggtgccgccaacctcttcaagccgatgtgcgccgctctggatgctgcccggacagaacaggggaaagagacgcaagtccggcactacagcaacgaaagcaacatgatcgcccgcatcgtgctgggtggcatgaccgctaagcagtgggcacaggtgaacggtatcgacggcgaaccgcgcgacagcatgagcgccggccaactggagcacctcggctacctggagagcaccaacatcacgttgatcgatatgggcatggagtacggccagcgtaaagcggaattaacccgcctctctcagcgttggctggctaaacgtctgggggctaacgatgaataa

SEQ ID NO: 184435 - DNA, 180 bp, Klebsiella oxytoca
atgaataagcccaccagcacaccgttaccaaatcacgcctaccgcgacgctcatggacagattgtgagcgtggccgctgtagcgcataaccgcgtgacgttctatcgcgagggttatcagttcccatgcgtacagtctattgagcgcttcatgaaggagtacaaggaggtgacgcaatga

SEQ ID NO: 184436 - DNA, 789 bp, Klebsiella oxytoca
atgattaccgtctcccatggtaaaagcctccctctggctggcctgaagaatgcaaaagttaacgctgtgctggtggtgtgccacggcgggaacctgtcaaaatctgtcactttgcgggccgctgatagtggctctcaaaacgccagggagagtttctggaaaagttcgagtatcgatgagcgctcgggatctaactttctgccagatatccagtcccgcgctggtggatgtggagtccatcacaccgcccgctataaattgccgcaccgtaacaaaaagggcttgcggcctgacggtatcccagtctatggttatagcgcaccagcaaaatctggtgccaggattggcgtcctgacaactctgaaggcgacacatgacgcgccaagcgtctttttttgtgccgttagtctgactcaccctttttttgagcgttggtatataatccagcgcctttcaagagcaatggtggctcaggcgggggcttcttcggaagcgccggtatccttcagagccggttacgccaaccctgtctgggctaccaccagtgaaattggcgtttccggtggtggcgttacccgctatctgaaggaggctgccgccatggctactacccctaaccaaaatccgcaatttatttggattatcgccgctgttcgccgcgattgcccgacaattacagcaaaaatccaccatatcgcctcagaatcagagcaggaagcacgccgcacactggcacgggatcacgtgtgtttctttgcaggccgtatccgtctggaggtggcagcatga

SEQ ID NO: 184437 - DNA, 306 bp, Klebsiella oxytoca
atgagcctgtataacgatttagtacggcatgatctggattcctgctcacaagatgagattgttggggttcaaaacagatccagtgaagcagttaacgacttgatgatgggtgttaaatcaattggaagcctgatgttttgggcttccgacaatcaagagtacagcgaggaaacagcgaaagaggatatgtatcgtttaggcgccatgttgggagtggttagtgatgtagccagagctttacgtgatacatctgagaatgcgatgtatctcaggcgggtcgctaatgaaaaaggggggaaatcatga

SEQ ID NO: 184438 - DNA, 2115 bp, Klebsiella oxytoca
atgaaactggcaccgaacctgaaacatttgccaaaagaaaaatttactgaagcagttatttttgctggaaccgatgcgtatgcacatgcaaaaggttgggaagagggcatgggtaaacaagtcgctgaggacagaacacctcccatttatcttgggccgaagcagttggcggaactggagaacctgcaaataattgataaagggcgtcgcagtgctcgtgtttatctggctggaagcattgagccaataatgattaatgccattggggaaaaactagcacaggcaggtgtactggaagcaaaattatataaaggaattcctgaccaaaaaccggaaaactggaggcaatatctggccaggctcagagaacagggcgagcacacaacgacatcaattctgaaagccaataaatctgcgaatagcgaaaacctgaagccacatgttgaaagccgagctgacggtatttattgggttgaacccaaaacagacaacgctaccggtgaaattattaaccgtgaaagctggctgtgttctgctctggaggtcataggtactggcatagatgacagtaaaacccggtatctgatcctgcgctggcggccattcggttcgaagggggatactgtccaggcaataccatttgctgatatcggtgaacgcgaaggctggcgaacgctcaaggctggtggggtgaacgtcacaaccaaaagtggtttacgtgcaacgttggccgactggctgcagagctgtgccaatggtgaggtatggcgcattgcgcatgctacgggctggcagtgtggcgcctacatcatgccagatggcgagattataggcactcctgagcaaccggtgctgtttaacgggcgaagttctgccgcatccggttacaccaccatcggtactgttgagagctggcgagagagcgttggacgtctggcctttggcaactactcgatgatgactggcgtggccgcagcgctggcagctcctttgattggccttgccggcgctgagggttttggtatccatctctatgagcagtcgagcgcgggtaagactaccactgcgaatgtggcctccagtctttacggaaatccagatgtactgcgtctcacctggtacggtactgcgctggggctggcgaatgaagctgccgcacataatgacgcgctaatgccgctagacgaaatcggccagggcgctgatccggtggaggtctacaaatctgcctacgcgctatttaatggtacgggtaagctgcagggcgcgaaggagggggggaaccgtgatctgaagcgctggcgtactgtggccattagtaccggtgagatggatttggaaacattcatcgccagtgccggccgtaaggctaaagcaggccagttggttcgcctgctgaacattccgatgcgacgggcagtgcgtttccatgagcatattaatggtaaacaccatgccgatgctctcaaggatgcataccagcataaccacggagtgtccgggcgtgagtgggtgaaatggcttgctgaccaccagctcgaggcggttagtgctgtcagagcagaggaagagcgctggcgtagcctgatcccatcggattacggggagcaggtccatcgtgtcggtgcccggttcgcaattctggaagccgcactactgttaggtaaggtgatcactggttgggatgagcaaacgtgtcgggatgctatccagtacagctataacgcttggttgcgcgagtttggtaccggcaataaagaacatcagcagataattgagcagaccgaggcattcctgaacgcttacggcatgagccgttttgcgccgttcccgtatgacccgagcagtctgccaatctccaacatggcgggataccggcagaaaggcggtcacgaggctgacccaatggtgttctacaccttcccggcagccttcgaaggggagatcgcccgcggctttaactcccgtcagtttgcggaggtattgaagaaagccggcatgcttacaccgccgacttcaggccgggggttccagagaaagtcgccacgcattgatgggcgacaaattcgggtttatgtcctgcagtatctgcctgacgatgaccagccagagtaa

SEQ ID NO: 184439 - DNA, 1374 bp, Klebsiella oxytoca
atgtttcaagcagctcaatggttacaacatgagttcagatctttaataatacttcctttgagagaggagacttatgacaattatagagatcgcccacctcttgacacagccttaaaagatatggtttttcgcattgaaccacctttatttaactatgtgcttcattcgcgagtacaactagttcttaaagaaatgtcaagggtcagcagtagtaatactttatcatattcacttcctaatggctttaatgttgaatatagtaaggatgaacgctcctattatttgacatcaattgttaattctatttttgtccatgatgctcaaataaggagaatgatcgttggtctttcaggacgaaacattagaagagcgctggagatttttttggagttctgcacaagtggacatattactgaaggggaatttttaaaaataagacaaagcgaaggccgctatgcacttccattacatattgtcaccagagtactactcagattaaatcgtagattttatgatagtgacaattcgtatctaaaaaacattttttcgactgagaaagatgatgaaaaaggcaatcactttactcgatttgcaattttaaaatggtttcataataattttggaacaagtggcccaacagggcttaaagggtatttccctttgtctgagttaaaaaaaggtttggttaaatttggtttttcgccaaaagttattacccgtgaagttgattatttacttcagggacagtgtttagtctctgaagactttagggaaacagggataacagacgaggacttgctcagattatcctctgccggttttgttcatctagacatgctctcaaacattagctatctggccgcattagctgaagacacgctattcccttcagagaatattgcaaggagagtttctgatagaatggggtcaattcaaaaccaatacaataaagaaatggtgagtgctaacgctaaagagttagtgtatttcctagaaaatcaacgtgctaccattgccgatttttctggtgaattcattgctggtgatgactaccgagagctaactgatataaaacctgcaattgatgccgttaaatcattcgtagaaaaaattagtgacccagaatgggcagatttcgaatctaagtatcagtcaggggatacgctggaaggtgttgtcagaaactgtgattataaatatggggtttttgttaatttcacaggaaaaatcacagggttaatacataaatcaaagctccctgcagattttaatagaatgagtgagtattctaaagggaaaaagctattagtacgcattgaaaacgacttcaatgctgttgaacaaaaaatcagtttatcgcttgtagaaagataa

SEQ ID NO: 184440 - DNA, 1056 bp, Klebsiella oxytoca
gtgaatcaaaagaatccatacctacagctttctgacattgagtcagtagaaggtctttcgccggagttcatctcctggctagaaagccaatcccctaaagaatcaccccagcagctgcctttaaatgaaggtgctgaaccagcgcgcaaaacccgccgtcgtcgcggtacgcactcaacggcgtgtctctgcccggaacccagctggtaccgaccggacaacttcaaaaagctccctggccagcttggccatgcctacaaccgccttgttcgccgcgatcgtaaaaccggcgcgttaagtctgcgtatgcggatcagccgccacccgtacttcgtgcagctgcgtgagcaggccggccggaagcgtgacttccgcccggagcgggagaatctgcttgatgccatcgtgccgcttatggtcagcaccgttgaccgggcaacccatatagacactatcaacctcagcaaaatggcgtggcagctcagcgaaaaagacagcgaagggaacgtgatccggaaggtgacggttccgcgggtttgccggctgctgcagcacatgatggagtacgggttactggcgctgcctgaaggtgtcacatgggacccgtttaaccgcaagtggttccccaagcatgtcgtgctgacggaacggctctggaagataattggcgttgatctcgataaactgtatgcggagcaggccgaacaggtcgccgctgaagcggcaggatggataacccgcgatgagcatggccaggcggaagaaatctctgtcaaagcggcgcgccggcgctggtatgagaacatgatgcacgccacgctggttcgccggcgtgaagccgccctgaaggggaagcgcgagaagaagctgaaagcgctggcagaaaagccctttgacgaccgtgtatatgccatgtccgttcatctgatgcggacgctgccgaaagacgaactgcacgcgctgtcgcctgaacagttcacgcagcgcgtattcagccacctttatcagctcgatctggggctggagagggaagcaggcccccctgcttatcactga

SEQ ID NO: 184441 - DNA, 2088 bp, Klebsiella oxytoca
atgcaacaggaatctgtagacagtaaaaaagtcctccgcccagatggttcgttcatggagtggttcctcactccgaacgtacagtttggcctgctggccatactgaccgtgctgggtctgtttctcccctttaccatgctgctgagcatcctcatccttccgccgctgatggtggcattcacggatcgtaaattccggccaccgctgcgaatgccgaaagactgcgaaatgttcgacgacaccctgaccacggaaacccaggcggaataccgtctggggcccattcgcatcccgcataaggtccgggagcgaaagaaagcgaagggaattttatatgtcgggtatgagcggggacgcctgttcggccgcgagctgtggctgaacatgacggacctgctgcgccacatggtattttttggtaccaccgggtcgggtaaaaccgaaaccttctatgggtttatcgttaacttcctgctgtggtgccgtggctactgcctctcagacggtaaagcagataacaagctggccttcgccacctggtcgctggcgcgccgtttcggccgtgaggatgattattacgttctcaacctgctgaccggcagtattgacaggttcgtgaacctggtgaagcaggaaagcatccccgcgcaatccaactcagtcaacctcttcagcgttgccccgccgaccttcatcatccagttgatggaatccatgctcccccaggtgggcggggattcggcacagtggcaggatacggcaaaagccatgatgtcggcgctgatcaatgccctgtgttataagcgcgcccgcggcgaactgcttttgtcacagcgcactattcagaaaaacatgtcgctgccggcaatggccgcgctgtacgtggaggcaaagaaaaacggctggcacagcgagggttacgccgcgctggaaagttatctggaaaatacaccaggcttcctgctggccaacgcggaatacccggaaacgtgggaagcccgcgccttcgaacagcataactacatgagccgtcagttcctgaagacgctctccctgttcaatgaaacttatggccatgtttttccggaagacagcggcgatatccggatggacgatattttccacaatgaccgcattctcatcgtcatgatcccgtcgctggagctgtcacgcggtgaagcggccacgcttggccgtttatatgtgacgctgcagcgaatgaccatcagtaaggacctgggctaccagctggaagggaaaaaagaggaagtcctgctcactcacgcgctgaataatcaggcgccatacgggctgatttatgacgagctgggccagtatttcaccagcggtatggatacgctgagtgcgcagatgcgttcactggaaaaaatgggcgtattttcctcccaggatcacccgtcgctcgcccgcggcgcgaacggcgaggtggattcgctgatcgccaacacccgcgtgaaatattttgagtcgattgaagaccggaaaacctttgaaatactgcgcgaaaccgtcggccaggattattattctgagctctccgggcaggaagccgaacacggcacgttttccaaaacggtccgggaaggggatctgtaccaaatccgtgaaaaggaccgcgtgaacattcgtgagctacgtaagcagaccgaaggtcagggggtaatttctttccaggatgccctggtacgcagcgccgcgttttacattccggacaatgagaagttttccagcgaactgccgatgcggataaaccgctttatcgaggtattgccgccatcgccggcaacgctgtacagcatttatccggaacgcaaggatgatgaactggcggaaaccaacccggatgcaatgcgattcccgccgatcaagctgttcggctacgacaaagcggccaacagcctgctggaaaaaattgaggtcttctacgagctgcagtgtggcgcaatttcaccggaggaaatgtcggtgtgcctgtttgaactgttcgctgaatggcttgatggaacggaaacggacgacgtgctttaccaccaggaagacgatctgttcccgatgatcgagatgtaa

SEQ ID NO: 184442 - DNA, 951 bp, Klebsiella oxytoca; identical to SEQ ID NO: 119358

SEQ ID NO: 184443 - DNA, 1308 bp, Klebsiella oxytoca; identical to SEQ ID NO: 119359

SEQ ID NO: 184444 - DNA, 396 bp, Klebsiella oxytoca
atggttgatgccccgccctcaatcccgctgccaacctgcatggttgaagcagcacagatttatcacattcctctccgtggattcctcgccttgtggctgactgaaggcggaaaaccgggaatgaaaaataaaaacaaaaacggcacttacgattacggcgcattccagataaacaccatctgggcgaataagctggcgtccgattttggagtaaaagcggagcagctgcagcatgacttctgcgcctctgcaatggccagtgcctacatcctcaaatacaacatcattctcgaagggggggatttctggcagggtgtcggccgctatcactccaacacgccggcgcgtaaggcttggtatatcgggaaggtttaccaaaattctctgaggttctga

SEQ ID NO: 184445 - DNA, 351 bp, Klebsiella oxytoca; identical to SEQ ID NO: 119361

SEQ ID NO: 184446 - DNA, 390 bp, Klebsiella oxytoca
atgattcagtcacgtaataaatatctgcagtttatgctggttctgctggcagcctgggccatagcctggggggccatgtttgtcatggggcaggctgttctgctctatgggctggggaaaaatacgctgttcttcagtcatggtgctgtactggtgtacctgctgtgtgttttcctggtataccgccgctgggttgctccgctaccggtcgttggccagctgagcaacgttggcgcactgtggctggttggcgcgatggccgtggtgtatgtcggtgaatttctgctgggtaaagtgctggacctgcccgctgagccatttatgacgaaactttttgccgataagtccataccggggtctgacgctcagtggaacgaaaactcacgttaa

SEQ ID NO: 184447 - DNA, 558 bp, Klebsiella oxytoca; identical to SEQ ID NO: 7707

SEQ ID NO: 184448 - DNA, 297 bp, Klebsiella oxytoca
gtgatcctgacgttgctggccgtctttatccttgccccgctgaatgaggaaatcctgttccgtggtgtcatgctgaacgtcttccgttcgaggtacaactggacgatgtggctgggcgcgctgataacgtctttgctgtttgccgccgtgcatatgcagtatcagaacctgctgaccctggcagaaatgttcctggtggggctgattacatcagctgcccggatcagaagtggcggcctgctgctgccggtattgctgcatatggaagctaccgcgctgggtttactgttgggctga

SEQ ID NO: 184449 - DNA, 258 bp, Klebsiella oxytoca; identical to SEQ ID NO: 119363

SEQ ID NO: 184450 - DNA, 333 bp, Klebsiella oxytoca
atggaaagaggggaaatctggcttgtctcgcttgaccctaccgcaggtcatgagcagcagggaacgcggccggtactgattgtcacgccggctgcttttaaccgcgtgacccgcctgcccgttgttgtgcccgtgaccagcggaggtaattttgcccgcacagcaggctttgctgtgtcgcttgacggcgccggcatacgtaccaccggcgttgtgcgttgcgatcaaccccggacgatcgatatgaaagctcgcggcggcaaacgactcgaacgggtgccagagactatcatggacgacgttcttggccgtctggccaccatcctgacctga

SEQ ID NO: 184451 - DNA, 435 bp, Klebsiella oxytoca; identical to SEQ ID NO: 119365

SEQ ID NO: 184452 - DNA, 1305 bp, Klebsiella oxytoca
atggggtgtggttacgttcactgtcatgagacaccgcccgtgtacgccttaatcgatgtcaattcgatgtactgcagctgcgaagaagcgttccgccctgatttacgaggtcgccctgtggtcgttctcagcaacaacgacggggcgcttgttgcggtcaatcgcgcggcgaaagcgcttggcgttcgccgcggggagccctatttccgctgccgccgcctgctggaacagcataacgttgccgtattcagttccaactacaccctttacgcctcattctccgccagatttgcaaccgtggtggagagtctggcgccgcggacatttgtttactcaattgatgagctctttgcggatgcctctcatatggagggagtgatgacgccgcaggcgtttggccagcttttgcgggctgaagtgctgcgccagacaacgctcacctgtggagtcggcgtcgcgccaacgaagacgctggccaagctgtgcaaccatgccgcaaagacgtggcctgctaccgggggggttgtggcgctcagtgatcctgtaagactgaaaaagctgatgagcctggtggcggccggcgatgtgtggggcgttggccatcgtaccgaaaaagggctggcggcaatggggatcaaaacggcgctggcgctcgcagagatggatatccgtcttgcacgccggctgtacggtgtgacgctggaaaggaccattcgtgagctgcgtggcgaggcctgctttgccctggaggaaggaactggcgcgaaacagcagcttgttgtatcccgttcgtttggagcacgggtcacgcaactggcgcagatgcagcaggcggtgactaaatatgccacacgggcaggggaaaagttgcgccaggaaaaccgcctggcgaaggtggtaacggtctttatccgcagcagtgcttatgacgccggcggtgtgccctacagtaaccaggctacggaagtgcttcccgtgccaagccaggatacccgcgacatcatcgccgcggcgcagctgggactgtcgcgtatctggcgtgagggcgtgcggtatgcaaaagccggcgtgatgctcagcgatctgcagggatatgaaacccagctggatctgttttcgccggctgctgtgcggccgggcagcgaaaaactgatggccaccatcgacaaaataaacagggaaggaaggtcaaggatcttcttcgccggagaaggtattgatccggaatatgccatgcgccgtgaaatgttgtccccggcctacaccacgcagtggaaggatattcccgcggcgtttatgcgataa

SEQ ID NO: 184453 - DNA, 273 bp, Klebsiella oxytoca
atgaaaacgacctgtcatgcggccggcatcacggcggcgccgctttccccgcaggagtggcgggcgctgctcagggcgaaaggctggaagcagaaggagctggcccgccgctggaatgtgtcagaaacctggatcagtaagctggccaataaccccgaacggggcacgcactggaacgatgcctgccggggtctgcccgatattcgtgcccggcggcccggcgaaccgcgcgcggcaggcacagacgcaccagagccgggaggccctgaatga

SEQ ID NO: 184454 - DNA, 1275 bp, Klebsiella oxytoca
atgaccggtttttttgaacgtaaaaagcgggccaaaaacgcccagctgaccgtgcgtctcgatgagcagctgaagaaacgcgccgaactgcgtctggaggcaatgggcatgaccgccacggaagcagtggagcagctttaccgcttcatcgccgatcacggccggatgcccgtcacggagcgtatcgtcacatttgacatccagtcacagcgcggccgcgccatcgccctcaatcccgccgacgctgtgaccgaaaacacccggcggtttctgcagtcgctgggagctgtggaagtggtctgctgcgatcccgctgcatttgaacaggcggtactggagtacttcagcctgtatgtggccgaccaggctgcctgtttactggccggtgtactgaacgtcacgttcatggttaatgccgccagtcgcgtgaaagatgactggcatgacaggctgctgtccctgttacagcgcgactttgatttcagcgaagaacagtcagtgacgttcattaacagcatcgtggacagcgaacatgtcgatcctgccatcgtcagtcgaaataatacggcctggcggagcggaaaaagcaccgggtccggcgccggcgctgaacaggccttactggataacaccaacgtcagggtcttctatccctccggggaagcgcccgtctccggcgagatcggcgccgccgtcctgcagcgtttcctgacgttcctggcggagcggggcgtcagctgctgcgatccgcagagactgaccgaaagcgccggccgtgcatggggcgtgcgtgaaaatatgatcgggaatatgccccctggcatacagcaggccataaacgatggcgtcatttttgaggccagcgctgacacgccggacttttcccctgagctggcggcggcgtttggcttcacacaggcccaggcagaagcggtgctgaaacccgccctgaccgccagggatctccccggtttcctgcagcgctttctggcgttcctggccgaccggggtatcagctgcagcaatccccggcggtttactgaaaaggtcacggaatacgccagccatgagggaccgcaccggcttattgcaatgttgatgtcgcgcatcagggatgagggggtcagttttgtctttcacaatgaatccccggacgaactgccgcgcctggccgcgtcactgcccggcgaactggccgataccttcgggtttacgggatggcaggcaacaacaatactgcgtcaaatccagccggcacggccggggcaggattag

SEQ ID NO: 184455 - DNA, 357 bp, Klebsiella oxytoca; identical to SEQ ID NO: 119373

SEQ ID NO: 184456 - DNA, 579 bp, Klebsiella oxytoca; identical to SEQ ID NO: 119374

SEQ ID NO: 184457 - DNA, 408 bp, Klebsiella oxytoca; identical to SEQ ID NO: 119375

SEQ ID NO: 184458 - DNA, 546 bp, Klebsiella oxytoca; identical to SEQ ID NO: 119376

SEQ ID NO: 184459 - DNA, 462 bp, Klebsiella oxytoca
atgataaagaaaccacttattgccggcatcatgctggttgtggcgcacaccgccggcgctgcgcagggtgatgataccaatctgcagcagatttataccgaggcgggcattcaggggatatgcagcgccgggatgctggctgtgccggaaggggccagggatgaagttgtcccgcagaacgtcagacacctcctggttcagtgtgcctatttcgacgagcagcagttgcgccggcgtgccggcctgccggctcagacatttagccactggcgtgaccgcaatgcggtccttaatctgtcgtctgaccaggtatctgatgcgctctggctgtcagcgtggcgtgatttccgggcacaactggcctcggcctacccggccccggcggaaaaaaaggcacaggggaaagaggccgtacccgccggcacgaagcccggcactgagcatgggagtgcggcggattga

SEQ ID NO: 184460 - DNA, 249 bp, Klebsiella oxytoca; identical to SEQ ID NO: 95962

SEQ ID NO: 184461 - DNA, 588 bp, Klebsiella oxytoca; identical to SEQ ID NO: 119379

SEQ ID NO: 184462 - DNA, 486 bp, Klebsiella oxytoca; identical to SEQ ID NO: 119380

SEQ ID NO: 184463 - DNA, 249 bp, Klebsiella oxytoca; identical to SEQ ID NO: 119381

SEQ ID NO: 184464 - DNA, 741 bp, Klebsiella oxytoca; identical to SEQ ID NO: 119382

SEQ ID NO: 184465 - DNA, 975 bp, Klebsiella oxytoca
atgcgtatttttgttgacgacggttccaccaacatcaaactggcatggatggaagatggtgcggtcaaaacgttgatcagtccgaacagcttcaagcccgaatggtccatgacgttgctgacagattcatcagtgccggcttccgccaactatgaaattgacggggaaaagtacagctttgaccagctgagcccggatgccgtgcgcaccacggaaacccgctatcagtacagtgatgtgaatgtcgtcgctatccaccatgccctgatgcagtccggcattgaaccgcagccggttgatgttgtggtgacgctgccgctgggcgagtacctggatgaaaacgatcagcctaatatggccaacatcgagcggaaaaaagcgaacgtgaagcgcgcggtggccgttcaggggcgtgagagctttaccgtgcgtaaagtcagcgtactgccagagtcggtccctgcaggcttcagtgtgctgaaggatctggacgatctggactccctgctgattgtggatatcggtggaaccacgctggatatcgcgcacgttcgcagcaaaatgtccggcttcaccaagacgcattgcgatcctaaaaccggtgtatccatcatcaccgaagccgtaaaacatgcactggataccagcgtgagcacccgtaccagttcgtattttgccgaccgtctgatccaggcgcgaaatgacgaaacgtttctttcccgttacctccagaatgctgaccagcgggcccaggtgatgaaggtactgcatgagcgggaaaaagccctgacgcaccgtgtcaccgattcagttggccgctttgccggtttcacgcacgtcatggttgtcggtggcggcgccagcctggtcgccggcgcagtgaagcaggccacgggggtgagtgacgatcgtttcttcgtcagtgataacccgcaattcgatctggttctgggtatggtggcaatgaagggctga

SEQ ID NO: 184466 - DNA, 444 bp, Klebsiella oxytoca; identical to SEQ ID NO: 119384

SEQ ID NO: 184467 - DNA, 564 bp, Klebsiella oxytoca; identical to SEQ ID NO: 119385

SEQ ID NO: 184468 - DNA, 507 bp, Klebsiella oxytoca
atgcaatcattccccctgttcgtttcccgtgtcgtacctgtgatcaccctgagccattgcctgcggcagcggcgctggtccctgcacaacacgccatgccagattgacctgagatcaggttgtcacctgcgctcacagcctttcggcacgctatccagacgggaaataagcgaccggccaccggctatgccccgcggttactggttcaggcaatgcagccgggatgtcatgttaacggggcgcatcgatcaggcagatcctatgaaacaggtctattacaacgaaggctggagcggtccgaacaagtatacgtttgaagtttatcagctggagaacgggcgttaccgggcgctggcccgcaaatggaatggcaaaatcaacaaggtgcagcaggaaacgcagtacctgtctgatacgcgggaggggctgaagcaccaggactatccccgcacgcgccaggtgaaaatttttctgaattcagacttttgggagaagggtaatgattaa

SEQ ID NO: 184469 - DNA, 480 bp, Klebsiella oxytoca; identical to SEQ ID NO: 119387

SEQ ID NO: 184470 - DNA, 411 bp, Klebsiella oxytoca; identical to SEQ ID NO: 119388

SEQ ID NO: 184471 - DNA, 264 bp, Klebsiella oxytoca; identical to SEQ ID NO: 83557

SEQ ID NO: 184472 - DNA, 363 bp, Klebsiella oxytoca; identical to SEQ ID NO: 119390

SEQ ID NO: 184473 - DNA, 450 bp, Klebsiella oxytoca; identical to SEQ ID NO: 119391

SEQ ID NO: 184474 - DNA, 267 bp, Klebsiella oxytoca; identical to SEQ ID NO: 119392

SEQ ID NO: 184475 - DNA, 180 bp, Klebsiella oxytoca; identical to SEQ ID NO: 95978

SEQ ID NO: 184476 - DNA, 861 bp, Klebsiella oxytoca; identical to SEQ ID NO: 119394

SEQ ID NO: 184477 - DNA, 339 bp, Klebsiella oxytoca; identical to SEQ ID NO: 119395

SEQ ID NO: 184478 - DNA, 231 bp, Klebsiella oxytoca; identical to SEQ ID NO: 95981

SEQ ID NO: 184479 - DNA, 411 bp, Klebsiella oxytoca; identical to SEQ ID NO: 119397

SEQ ID NO: 184480 - DNA, 306 bp, Klebsiella oxytoca; identical to SEQ ID NO: 119398

SEQ ID NO: 184481 - DNA, 441 bp, Klebsiella oxytoca; identical to SEQ ID NO: 21629

SEQ ID NO: 184482 - DNA, 285 bp, Klebsiella oxytoca; identical to SEQ ID NO: 119400

SEQ ID NO: 184483 - DNA, 222 bp, Klebsiella oxytoca; identical to SEQ ID NO: 119401

SEQ ID NO: 184484 - DNA, 435 bp, Klebsiella oxytoca
atgtggaaacgtggcgaaaacaaagtgattctgatggggcgtgctggcaaagatgcagaactgcgttacaccccaaacggaacggccattgcgagcctgacgctggctacagaaatcagctatagcgacaacgaagggaaggagcaaaaagaaacggaatggcatgatattgtcatttttggaaagaaagccgaagcagctgggaagtacttcaaaaagggtatgatgctgtattttgtcgggcgcattcgtaataacaaatggcaagggacagacggcaaaatgcgcagcaataaggaaattgtgatcgataataacggcgaaatgcagatgctgccgggagctgggccacgtaacaccagtgcagaaggccagggaggcattgaaaatcatgatgaaccgccgttcccggatatgaatgattacccgcagtga

SEQ ID NO: 184485 - DNA, 312 bp, Klebsiella oxytoca; identical to SEQ ID NO: 119403

SEQ ID NO: 184486 - DNA, 537 bp, Klebsiella oxytoca
atggcgaccttatacccttttgaggtttatacccttattgtgtcagaattaatcgtaagccattttaatgatgtcgctatggtatatccgggaagcgaagaaattaaaaagaactatgacagtgaattaagtgctgtacaggtagttaatggcatcagagaaaaactgattgaagatggtgttatacagtgcgaacagtgcccactgctatccgagtgggatgagaacaaggttatcaaccagctaattaaagattaccgcctgattctcaatcgtgactatgaactaaaccgtgttcgtcagcagctggccccggagctgatcgcacagatagaaaactggaaagagcagaagtattccgattctgcgaaggaatacgaggtgctctatgaaaccatcaacatcaacggaaaggaggttacaggcaaactaaacgtagttgcagtaagtcgctttgatgctgttttcatcgtagggcagcgtcacgctaacgataactttttggttctggatgtgaaggaggtgatgaatcattga

SEQ ID NO: 184487 - DNA, 141 bp, Klebsiella oxytoca; identical to SEQ ID NO: 21635

SEQ ID NO: 184488 - DNA, 366 bp, Klebsiella oxytoca
atgcctgcaaaaaagaaagcattttatagcagtgaggacatcggaaaattcaaaagcattctcgacgacttgcctgatgtgacgtcagaaaggcttgagaaaaagcacgtactcgatgagcttaaatctgacattaagaagctgaaagattcgaaaggatatgaagataaagagatactgaaattcctcaacgatgcgggtttttcagacgttacattacgtgatatcaaggacattactgccggacgagttggaaaaaaaagaaccagcaacagccgaaaaaaaatcactggagttgacgaagagcagcgcacacaaaatggctctaccggtcagaattctgacgcttcaggtccgcagtattaa

SEQ ID NO: 184489 - DNA, 318 bp, Klebsiella oxytoca; identical to SEQ ID NO: 25804

SEQ ID NO: 184490 - DNA, 1980 bp, Klebsiella oxytoca; identical to SEQ ID NO: 119408

SEQ ID NO: 184491 - DNA, 501 bp, Klebsiella oxytoca; identical to SEQ ID NO: 119409

SEQ ID NO: 184492 - DNA, 780 bp, Klebsiella oxytoca; identical to SEQ ID NO: 119410

SEQ ID NO: 184493 - DNA, 1164 bp, Klebsiella oxytoca; identical to SEQ ID NO: 119411

SEQ ID NO: 184494 - DNA, 261 bp, Klebsiella oxytoca; identical to SEQ ID NO: 83582

SEQ ID NO: 184495 - DNA, 3216 bp, Klebsiella oxytoca
atggcgaaacctgaaattgcaactgaaagaacccgtctgagtattccctttgacgatcgccaacgtgcaatacgtgcggccggcaaactggctgatggcagtaatgctctggactacgtgaaggaagaaaaggtgtggtatgcacagccgggggccaacctgagccggctgaaagagtggatttttgaccccaataaggtgatcgaagaaccgcccctggatattcaggccattgaagatgaatttacggcgtggcttgaagagcgcggtgccattatcaaagaccccatagagttcgatggccagaagcattatgtcgatacagtggacggtaaagctggttcaagaaagggggtgtatgccgctttcctggatggccggcctgcagggtggtacagggactataagaacggtggtgaaattcagaaatgggtatctaccggcgcagcccctaaccctgaacaaatggccatgctccgtgctgatgctgcggcaaggcgtgaacaaagagctgcagcgcaagcggataagtttgatcagaccgctaaccggttgatggaagaatataaccggcttccggatgccacgggagatctggcatacctgaaaaacaaacaggtcattgccgctaacggccttaaagctgatgagcggggcaacgttgtgatccccctgtttaatgctgatggcgagttcaggacccttgagcgcatctggtccgacggtagtaaacaccttgaaaaagacggccaggcatgggggagttttttcgttgtgggtggccaactgaaggatggtgacaacctgctttatgccgagggatatgcgacagcagccagtatcagcgaagccatcaatcagcctgtgatcatgacggttaatgccggcaacatggtggaagttgctggccgcctgaaagacgcctttccaaacagcactcattacttccttgctgacaatgacatttataaagacgagaacgttggactagaaaaagcgacagaagctgcagagctgactgccggccatgttctggtccctgcctttagcaacccgaaagaagggcttacagactacaacgatttgcatgtctctgaagggctggagcaagtcagattgcaggtagaaggagccattaatcaaataaacagggtagacactatgccgactgataacccgaacattactgacgttaatcacagctcgactgacagcgctgccgttgcagcccctgaaaatgccgcgccggtggccagcgcccctgcagctgctgaaccggtggaagccgcgccggtggccagcgcccctgcagctgccgaaccggaggaaaccgcaccggtggccagcgcccccgcagctgccgaaccggaggaaaccgcgccggtggccagcgcccccgcagctgccgaaccggaggaaaccgcaccggtggccagcgcccctgcagctgctgaaccggaatacgccgcaccaacagatcgagacggtgatgatgaaaagagtaatagcgccagtgatcttgaggcgtatgccgctatgatggcctttggcggtgaaacaactgacaccgctcagcaaaagcctgaagggatagcgcccagcgaacctgtagctaataccgccccggctgaaaatgaaaccgaggagaagaagaaaaaaacaaacgaagaactggaaaacggcatacgctgggcaaccaacgataatgcagaaacgcccccaaaagaacgtatagacctggaagggttaattgcccggtttgggtacagagcagagaaagactatacggcgtatacgcttgatgggcaggatgcgttttacgattacggctcacatctgcgtatggctacccctgaagccagccagagtgacgagatgatcctggcggccgttcttaccgcggataagcaacatcatcgtggtattgaaatcaccggcagtgacgaatttaaagagcgagtgtttaaccttatcagtgaatacaacattgaggtgaaactgactaacccagaacaaagggttaaattgctcgaactcaaaaaagcaaatgaaacagcaaaagaaacggcaaaagaaaatgttgctgattcaaaagcgaataagcaggaaggggtaaacgaaaaggcaaattcatcagttcagcaaaatggaatgcgctgggaagaatcggcctctgtacaaccgaagaagcagaatgcatctgatactcaaaaggaagataaagctgcgggtgaatcctgggagaatggcgttatcgtcgcgcatggacgtgctaagtatgagtggaaagatgatgaatccatgaactactttgtcaccctcaaaaatgaacatggagagaagacactctgggggaaagaccttgagagagcggttaaagatgctggtgtagacaccgaacgtcttgttacggtcagaaagctgggatttgtggatgttgaggtgaatgcacctgtccgtgatgaaagcaacaagatcgttcgttatgaaactatccagaccaaacgtaatgagtgggaagtaaaacctgtatacccacagccaacagcagggaatgaacaggcctataagccttctgaactggttccgtatgatgctgcaaccttccagaagctccgcacaacaattcagcagattaccggtgttgatctcagccgtgaggccgtgcctgaaaaagaactgtattggttcctgccgaatggtaagccagctcctgaaagcatgacaaaacccacaggctataaactccctcaagagtcaaaaaccgcgggtacacctttgctggtcgcaccgcataaaaaaggcgaacgacctgattattaccttgttgagtctcgtaaaggattcatgcaggggatcgcaaaggataaggaatctggcgagtaccatagcgtaattggtaaagtgaacaagcgtattgataaagatggaaactggaaaacgtatatgacactttcagcaatcaataaaaattctgaaagtggaattgttttgcacggatacggccatgttgatcagggaggtaaaaacctgctttacaaaaacacaattgcaaatgaaaaacagcctcagcatttacaacctgcctcagatgaggtaaaaaacaaaacagtaatgaagcagctttttcatccttctaatgctgcaaaaagaaaagatgatgaaaggagagaacagactcatgcaccagtcgcaaagtcagcgcctcggccataa

SEQ ID NO: 184496 - DNA, 513 bp, Klebsiella oxytoca; identical to SEQ ID NO: 21569

SEQ ID NO: 184497 - DNA, 198 bp, Klebsiella oxytoca; identical to SEQ ID NO: 21570

SEQ ID NO: 184498 - DNA, 411 bp, Klebsiella oxytoca; identical to SEQ ID NO: 119416

SEQ ID NO: 184499 - DNA, 714 bp, Klebsiella oxytoca; identical to SEQ ID NO: 119417

SEQ ID NO: 184500 - DNA, 159 bp, Klebsiella oxytoca; identical to SEQ ID NO: 147216

SEQ ID NO: 184501 - DNA, 432 bp, Klebsiella oxytoca
gtgcttctgaaggggctggccacgccggtcattattaacgtgaagggggcagaaccctccgttaaatcaaaaaccgttgatgttgattatcgtctggatctccgtatcccgaagcgcagtcctgacacaccggtttataccgctacgcctgagaaaaaaatctcactgtatgacaagcagctgcagagcgtgctcgatggcatcccgcctgaagatgctcagcggttgaaacttaaaaacgcgccagggagtaccaaagtctggcagatcggtgatgagctctacgtcagaagtaacatgcagctgcaggatgagtttgaaaaaacgctttccgctatcgatggcacacatgtttacgtgctgccggcaacaccagtgctgactttttctgttaatggtcaggcgcgtgacgttgaagttgagctgaattaa

SEQ ID NO: 184502 - DNA, 1350 bp, Klebsiella oxytoca; identical to SEQ ID NO: 119419

SEQ ID NO: 184503 - DNA, 705 bp, Klebsiella oxytoca
atgaatctgtttgaagatgacaataaaaacgaagcagctcctgcccaggaaccggtgtctgctaagcctgctgaaaagccaaaaccgacagtgacgccagcagcaaaagcgagcaaaaagccgcttaatatcagtgactatgcatggattggtggtatcgctgtcatcgctatcctgcttttagtctggttgtttgggggctccgatagtgatactgcgccagcgacggggaatggggcgatccagtcttcagcgcaacgtccgcgcgtacagtctgcccctgccgggcaggattctggtgacttccgcgagcagatttccgggattctgctgcagcaaaaggaacggctggacgcgatagaatcaacttctaaaaatggaatgatgatcctttccagtcagttacaaagcgctaatgaacaaattaaaaatctgaacaatcaggttcaggaactgaaaatgaaagccgctggttatgggccttcatttggtaatcagagtggaacaatttccggttcaacgtcacaggcattacctttgttgagaggtttttcaattaatgatttatctggcgatcttgcttgggtaaaatacaaaaaccagacgtatgctgtgaaggtcggaagtcaacttggcggagtcaccattacgggtatcgatactgaaaatagaatcgttacaacaagtaaaggcctaatccgctaa

SEQ ID NO: 184504 - DNA, 531 bp, Klebsiella oxytoca; identical to SEQ ID NO: 96007

SEQ ID NO: 184505 - DNA, 390 bp, Klebsiella oxytoca; identical to SEQ ID NO: 119422

SEQ ID NO: 184506 - DNA, 495 bp, Klebsiella oxytoca; identical to SEQ ID NO: 119423

SEQ ID NO: 184507 - DNA, 3051 bp, Klebsiella oxytoca; identical to SEQ ID NO: 119424

SEQ ID NO: 184508 - DNA, 1209 bp, Klebsiella oxytoca; identical to SEQ ID NO: 119425

SEQ ID NO: 184509 - DNA, 651 bp, Klebsiella oxytoca
atgaccgacgaaaataaaacaggggataaagacacagccaaatcagggaaattaaaaaaaggccttgatgttgtaacaggcgtcaatgacctcccggaagggaaggctaaacgaacgatatattatattacaggcatcagcgatatatattttattatcgcgtcagtaaagcaaacattcagcctgctctttcagcgggcttcattcgttaagaagcgaataaaaaaccttgatggcccacctgttgattctgatgcaaatcagccgttcgccgaagttatgaaacggagcaatagacctatttcagaattgttggataaggccagtttatacaagaaatactggctttgttgtttttttgcattagtcctcattctgctttttttaacgtctggttatgccagattgcttctaaatggctcaccgaacatgagcttgttaagagcaactctcacctgtggcgtcctgtttgctgcggggatctttgctttcattaaggctctcacatgtgagtttatggggtggcagttacgaaaccaggctcactctgatgcagagcaaggtacgttacgttatttccttaatgatgggggagtgcgtaatacatttaatttttcgcaggctggtcaagagcgggggccacatgagtaa

SEQ ID NO: 184510 - DNA, 2181 bp, Klebsiella oxytoca; identical to SEQ ID NO: 119427

SEQ ID NO: 184511 - DNA, 654 bp, Klebsiella oxytoca; identical to SEQ ID NO: 119428

SEQ ID NO: 184512 - DNA, 1059 bp, Klebsiella oxytoca
atgttaacaaaattcccagatgaaaaatacatatctgacagaaattcatcgtttattaaaagagtatatttcttacgtcagataggtgtcgttctttgctttcttcctatatattcagtcctccaggaacagtcacatcaaaaaataacgatagccctgttaattttgaatgcactcatctggccatcggttgcttatctggcaagcatgatgtcgaaggatatgctgagtactgaaaaaaagaatatggtactcgattcattctgggctggtatctggatagccgtaatgcaagctagcccaattccatcattattcataatctccgttcaaatagctgatcgctatgctgctggtggatggaaaattttaaaaccagcattaacgtggatgatgattagtttcgtgatagtttggttagcaaatgatttcagatatactatagaattcagcacccgaacggtattgctttctttaccgttggcaacctgttatcccatagtgttgagtgttgtttcaaggcacttatctataaagttgaggaaaagaagggagttactggaaaaacaggcgctgatggatcctagcttagatctgccaaatcgccgattttttgagcaaaaaatggaaagtgcttttcgtgcgacgcgtaaaaagagaattcattcttatcttatgctcattgatgttgataattttaaaaaaattaatgatacatatggtcatgaagtaggtgatgcggtgttatctcgtatatcaacaatattacgagagtgcgctggcgagaaggatgtgccagcaagatttggtggcgatgagttggctattattgttaacaacagtaatagcaagcttgttatagccatggttgatataattcaggaaaaaattaaagatctttcattgccttctcataaagatatgtactgtactgtcagtatcggtatttcttgtgcagaaaataaagaatcaattatcgagtggatcaaagaggctgatcaaatgctatatgaagttaaacgtaatgggaagaatggatattgcatgccgaataattga

SEQ ID NO: 184513 - DNA, 1428 bp, Klebsiella oxytoca
atggcgatgtatgaagtcggtaccgtcacgggtgccgcgtcgcaggcacgggtgacaggtgcgacaacaaaatggtcacaggaggcgctggggatactgcccgggtcgattctagtggtctaccgcagcggtagtgctgacctgtatgcgatcaaatccgtggacagcgacacgcaactgacgctgacccggaatatcaccaccgcattttccggtgccagttacggcattattaccgctgaaaccgccagcacctcgtcgtttgctaaccagctggccagcgcgtttgcattctggcgtagtgtagtggagggctggtcgatggccctgaccggcagcggcaatatcaccctgactgacccgatcacaggaaagcaggtgaccgtgccggcgatagccgggatggcgaaggcctcggatcttaacgcgctggcaaaactcaccggaggaaacaaactcgacggctcgcaggttataaccagcgataatgccggttttatactcggtaagaactcagatctggctctgctcaaaaaacaggggcaaggcgggacaattgccgttggctcgggaacaccgtttagggttcagcgttcaagagcgaccactgtatcaccggcagacacctttgatgacatcctcgttattggcaccaataaccagacgacgttgcccggagatttggttgtcggtggtggtttcgataatacggcaaagggcaagctgtattcccaggcgttagagctatcgatgagcacgccatacatcgactttcatttcaacggcagcatcgccgactttaccgcccgcattatccaggaccggcaaaacagactaaatattcagggcaatgccagcttgttagttaccgatggcaatttaaccgctggctcaacaatgcccggcaatatcgcagtcggccagcaggtcaccgccgcacctgtgcggtctcagatgttgggaagaggcgcttacggcgacccggacggcgcatacgtgcaaatgtacatggaggagaaggtcggcactgagcaccggatcgtgctgtactctgacggtttcggaagaaccgatgcctggctatttcggcctggcggcacaatcaccaccggcaaaggtgacgtcatgactaccggttctgacgttcgtctgaaagacgggtttacagaacctcaggaaggggcctccaggcgcattaatgcgctgggggtatgcgagttcaatatgaaaggcgaaacgcgccggaggcgtggttttatcgctcagcaggctgaaaaagctgatgacttgtatactttcctcggcatcgagcaggagatcgatggcgaaaaattcagggtgatgaatgttgattacacggccatcatcgccgatttggtaacagtggtgcaggatttgattaggcgagttgacgcactagaaagttga

SEQ ID NO: 184514 - DNA, 12705 bp, Klebsiella oxytoca
atggcaaataacataattaaagggcgcaagggtggcggctcaaagcagcgtacaccgacggaacagccggatgatttacagtccgttgcgaaagccaaaattctgctcgcattaggtgagggtgaatttgcaggtggtttaaccggtaaagatatttatcttgatggcaccccgcttgaaaatgctgatggttcgcaaaacttcagtggcgtgtcctgggaatttcgacccggcacgcaggctcagacttatattcagggtattcccggcactgaaaatgaaatcagtgtgggaacggaagtttccagcaagacagcctggacccatacctttactaatacccagctttctgccgttcgtgtccgcctgaaatggccgtccctgatgaaacaggaagatgacggcgacgtggtgggcaataccgtcgagtatgcgattgacctgcagaccgatggcggcgcctggcagacggtactggaaaccgctgtcacgggtaaagccacctccggctatgagcggagccatcgtatcgatctgccccaggccggcagtacctggacgctacgcctgcgtaaaatcactccggatgcgaacagtgtcaaagtcggcgacgtgatgacgctgcagagctacaccgaagtgattgatgccaaactgcgttatcccaacaccgcgttgctttatatcgagttcgatgccagccagttgaatggcagcattccgcaaatttcctgtgagccgcgtgggcgcgtgattcgtgtgccggataactacaatccggaaactcgtgaatataccggggtctggaccggcgggtttaaatgggcctggacggataacccggcctggatctattacgacattgttacagttgaccgttttggtctcggtaatcgtctgagcagcgccaatatttcgaaatggacgctgtaccagattgcacagtactgcgatcagctggttcctgacgggcgtggtggtgacggcatggagccgcgctatacctgtaacgtctatgttcaggaacgcaacgatgcttacaccgtgctgcgagactttgccgccattttccggggcatgacctgctggaacggtgagcagattgttgtgcaggctgatatgccgcgtgatgtcgattttacctatacgcgcgccaatattatcggcaaaccccgttattcgagcagcagcagccaggttcggtacaccaacgccctggtttcctggtctgatccggataatgcttatgctgatgcgatggagccggcgtttatcccggaactggtttcccgctacagttttaaccagctcgaactgaccgcgattggctgtacgcgccagagcgaagcccaccgtaaggggttgtggggcatactgaccaacaacaaagaccgggtcgttgagtttgatgtggggctggacggtcgcattcctcaacccggttatatcattgccctggcggatgagttgctggccggacgggtcaacggcgggcgaatcagcgcggtgaatggccgggtgattactctggatcgtgatgtggatgccaaacctggcgaccgtctccagctaaacctgccatccggtatctcacagagccggaccattcaggctgttaacggacgccggcagattacggtcacaacggcgtacagtgagacaccagaacgggaatgcgtctgggccgttgaatccgatgacctcttcctgcagcagtaccgggttacaggggtaaaagagaacagcgatgccaccctcacgatcaccggcgtggcacatgacccggataaattcgcccgcatcgataccggcgctattatcgaccagcgcccggttagcgtattgccggcgggcaaccagtcacctcctgacgatattgtcatcacatcccgctcggtcgtgaatcaggggatcagcgtcgaaacgatgcaggttaactggtcagctgtcagcggcgctattgcctacgaggcacagtggcgccgtaacgacgggaactggattaatgtgccgcgcagctcgaccacctcgtttgaggtcagcggcatttatgccggtcgttatctggttcgcgtccgcgcgatcaatgcggcggagatctcgagcggctgggcgtattccgaagagaaaaccctgaccggcaaggtcggcgagccgctggcaccgctggcgctggcaacccgttctctggttcatggggtccaggttagctgggagttcccgaccggctccggggatacgctgcgcacggaactacagtacagcaaaaatcaggacggcagtgcgccgatgccgttatcagacgtggcctatccggggaaaagctatcagcagatgggcctcagtatgggcgcagaattctggtatcgggcgcgtcttgtggatcgtcttggcaatgaaagcccgtggaccggctgggtccaggggatggccagcgataactttgatgactactacgaaaacctgaccgacgcgatcaaggatacggctgcctgggaggaaacgcagcgcaccattagcgaaacacaggaaggtatccgcaatacgcagcaggaactggagcagaccgctgaagctctgcgtaaggaagccgaagaccaggcgaagcaggtcagccaggatattgatgcatcggcgaaaagcatcacggctgatgttgacgggaagatctccgccgtgaataaaaccatcacggatgagatcacctcggtcaatgaggctctcgattctggtctggctcaggcaaacaaaggcgttcaggaggcaaaatccgccgtcgcagatgcgaacaagcagatcgcaactgtgaacaagtcgctgaccgacagcatcacccaggtaagacagtcagtcaccgatacggctgcggaaatcaacgccaccatcgacctggagattgccagggtcagcaaaacgctggccgacggcgatgccgcattgaatgcgcagataaagactgccgaaaatggcctgaagcagtcgctgtctcaggtcaacaccacgctgaccaatgcggtgaagcaggagaccgcggatcgtatcgccgatgttaacgcgaaggcgtcacaggccgctgatgaactgctggcggcaacgcaggggattgaggcgagtatcgagagcctgactcaggtgatgaagaccgccgatgaaaatctggcgcgggaaatgtccagcctcgctgccggcgctaatatccagttcgattcgcaggttatctggcatttcaacaatcagacgaccgagggctggaccggcagcgccggcgtaccgggtgtgtcacaggatggctggttacgcccggcggacagcgccaccgatccgtacattacctctcctggcgggctggctgtcgatggtgcggcgtaccgtttcatcatgctgcgctttcgtaaaaccggcaaaccagtttgggcaggtgagatccgctgggtgtctgccggcgaaaacttcaataacacgaagcgatacattgttgctgagccggaatatgccgatggggtggcaaccctgacggtgcgtgatattccgtggacagggaacattgatcgtattcgcctggacctgacgaaccagcaggatgccagcaactttatcgaattcgactggatcgccgttggccggccagcacccggcgccagtacggcggctctgcaggatgtgcgcagtacgctgagtaacgcgctgaccgccgaagcacaggcacgcagcacgctggcggcgcagatgcgtggctcctatgatgggagcgatctggagaaagtcacctccgggctgctgtaccaggaaaaaaccgcgcgcgttaccgccatctcggcggaagttaaggccagagagtccctgcagacgcagtttaacgacaacaaagctgctgtttctggtgaactgagttctctgacgacagagcagagcgcgcaggcgagccgtatcggtggcctggaaaccagcctcgggaaaaaagccgatgcggccgcgctgacgtccctgacgcagaaagttgagcaacagggcgccacgctgacatctcagggcgccgcgttaacatcgctcactaaccgggttggccagacggaaacgggcctggctggtacgaatgaggcactgagcgggctgcagtctgttgttacccagcagggcgacaggataaccagccagggtcagtccatcacgaaactgacgagcgatttgggcacgacaaatgccgcgctggcgaagaaagccgaagcggctgcggtcactgccttaacgcagcaggtagagcaaaacggacgggatattcgcagcaatactgacagcatcaccagcctgtcgaatcaactggtcaatggccagccgaatcgctggtcccgtcgactctatccggtgcagctggctaacgccgggacagtcccgtcattcagcgatgttcgcgctgtggcaccaacggtagtggatgaggtggccgacgcggccaaactggactttacgtccgccggcagctatctgatcgcgctgtattcctgccaggtgaaagtggccgcagataccaccatcacactggcgcccggcgccagggtttttgatgataccggcgccatatttgtgaatggggttcaggtcgcctggggtaacgccagctggaataccgtcagttttgaactgaaagccggctggaacaccgttgagtttctggtgaatcagtggaccggccaggcgtatatcaacctgggcctgaagctgtcagacaaggttgccgagatgtactccggtctcggggtttccgcgctggcaaacgcagccggcgtgctcagctcgaatgtcagccagattggcaacgaggtggtcagcaattcgcagagcatcacccaactccggaatgcgctgacgcagacagacgcgaacgtggccagcaaagcggatcagacggcgatgaactcgctaaccggacgagtggagaagacggaatccgggctgacggctgctaacgccaacattacctcgctgaaatccgctgtacgggccggaaacgcatcaggcggagatttaattcccaacccgacatttgacccggcttacgaccagatggggtttagcgtcgtatccacgacggctgaggaggtccctcctagctgcccgtatggttatgcggccagaattgccagccgggatcaccatcctaactttgccgcgttcccggccacgcttaacgatgtgattgagatcagcgcactggttgcctgcggcgccggcacggcgaattttaatctgtatgttggcaccgccgttcggccagatacgagcaccggtgcgccactcatggcggggggcggaaaatcaccttccgcgacctggcagagaaccacctggcgcttcaaggtcacgcaggcgatggtagacaggggttatatccgcccgttcctgcagatctcgcagaacagcccgtatggcaccgtatggttcgttacggactggcatatgcgaaatgtgacagcggcgcaaaaggttcaggatactgcggatgccacggcggcggcggttgactcgctgaccaccaccgtgacgcaacagggtaatctgctgacctcgaccggcaaccggacaacccagctggaaaacgggctggccaccaccaatgccgcagtggccaaaaaggctgatgcgacagcggtgcaggatttgaccaataccgtcacacagctgggcaacgatctgactgctgcgaacagcgccatcacgaaactgaccggaaatctggcgaataccgataaagcgctggcgcagaaagccgatgcgactgcgctggccacgctcgacacgaaagtgacgcagcagggtaaaacgctggagagccagagcaattcgctgacgaatctgtcgaacagtctctcgcaagttgcggcagatatcgatgccagcggtcagataccgggtaacctggtcgtgaatccctcatttgaacgcgggctggatggttataccgggcggtcaaccgcgaccagtgtggtggaggtttccgctcctcacagcgggacgcgggcgctgaaggttgatccggggagcgtgtctccggggcaatacatcccgtttgttcaggggcgaacctatgaaatcggggtgtgggtcaaggaacccggagcgacgacggataatggcgcggggaacaacaagttgcggatcggtaactctgccggccagccggtctttgagcgtccgtacaacagcggcacggtggggacaaactggaccctggtttccggtcgctggaaagcgacggagacagccagcctgccggtgacgctgagcaactatctgattagtggcagccgctacttcgatgatttttacgtcactgacgttaccgaccgggtggacatcgatgccaccgccggcgccgttaccggactgacgagccgggtcagcacagcggaaggggctatcacctcgcaaagccagcagctgacgaacctgcagaacagcctgaacacgaccaacagcaatgtgtcgaagaaggccgatgcaacggcactgacttcggtcgataaccgggtgacagaggcggaagggaaactgaccacacagagccagcagctgacaaatctggcgaatgtgctgacggccacccgcaacgctggcgacaacctgatcccgaactttgattttctacagggcagcactgcctgggatattcagtatccagccggtgtgacttttggcgatttcggggacgggaaagcgggggtccggctgaaccggacgactaacaccagtccggggatcttctccaacaacaacaagccggtgccgctgaatggccagcgcaagtaccgcgtggtggtgaaggccaaaggtgtttccggcgcgatgagtctgctgatccgtcgccagaacaaaatcggccagacggacagtacgtatgaggataaaacggtcacgctgaccactgactggcaaaccatcacctgggaaaccggattgacggctgccggcgcggacgggcagaacttcaaactttattctcatccgacaaacggtgaaatctggctcgattccgtccgggtttttgatatcaccgatgaaaccaacatcaaggcgaccagcgatgctatttcgtctctgaccgggacggtgacgaaccaggggaacaccctgacatcacaggggcaatccatcacggcgctgaataacgcgctggaaggggtcaaaggcgatgtggcgaagaaggctgatgcgtcggcggtcagttcactgaccaaccgggttacccagactgaaaaggatatccgtagccaggccgacagcctgaccaggctgaatacatcgctgaagcaacaggcaacacggggagccaatgtactgccggacggcagttttgaatcctatgccgtcggcgatgttctcagtaatgcccgcgctgttatcaccagtgaagctgcgcacagcgggaccaaaagcctgcgtgttacgcgcagtacggagtacaacccgaacgcgacggataataacgatacccatatcttttctggtatgcaggttcgcgataatgcggtctattacgtggaggcgtgggttaagttgccggctggctcgaccgccgatccgaccgtttatatggtgctaggattttccttccaggattctgccaatggctggtcgtggcctggcctgaacgtgaaagtctccgagttgtcggtggacaactggacaaaggtcagtggctatctgaccaacaaccgaaccgcactgaaacaggcaatggtgaggatctccatcccgaatacaccaaaagttcgcctgggtgacgccttcctgattgatgatctgatcatcactgacgtgaccgatgcgaaagcggcgctcgatgccgccgatgcgaatgcgcaggcgctttccagtctgtccgcgtcagtcacgcagaacgggaagaatattacgtctcagggcagcgcgatcacgaagctgcagtcggatgtgacgcaacttggtaaggatatcagcggcaaggccgatgccagcgcgctgacgaatctgacgacccgcgtgacggctaccgaaggcagcctgaaatcgcagggagacagcctgaccaacctgcagaacagcctgaacacgactaacagcaatgtggcgaagaaggctgatgcaacggcgctgcagagcctgcagaacaccgttgaacagcatggcagggatctgaccacgcaaagcagcgcgctgacgaacctggaaaacaacttttcctccctggccgttggcgggaccaaccttatccgcaatgcggacacactggagggatggagcagccgccacgccacagagacgtatctgggcgaccgcgtggcctacacccggctggcgaaaggtgcatccggttatatccagctggatgaacagacgctggatgttaccgggcgtactgaatttgtattcagcttctatgcgaaaggtgcctataacggacaggaaatggcgagttatttttataacccgtcgaacactaccaccacggaaaccagccagggggttaaaggcggggccggtgacggcaaggcggtcacgaaactgaccaccgcatgggcgcgttactgggtgaaatgggttattcctgccaccagtggcaccaaacggctgattgccgcgcgtctggaaagcgcgacgtctgccgacaaagaagtctggctctgtcgccctcagctggaaaccgggaccgtgatgactgactggtcaccgagtccggatgatgcggccagcggtattaccgcgaacacatcggccattaacagcctcaccagtcgggtgacgaatgccgaggggcaactgaccgcgcagtctcagagcatcacgaatctgcagaacagcctgaacaccaccaacaacaacgtggcacaaaaggccagcgcgcagtcggtgagtgatctcaccagccgggtcaccagtgcggaaggcaaaatcacctcccaggggcaggctatcacgaagctgcagggcgatttgagcagcaccaccgataaggtcaacaccaaagcggatcagacggcgcttaacgcgctgactggccgggtggagaaaaccgaggcaggcctcacggcagccaacagcaacatcgtcagcctgacggcggcggtgaacgccgggaatgctgccggggatgattacatcccaaacccgtcatttgatccggcgtatgaccgcatgggttatgacgtggtggagaccactgctgcaggtgtgccggctgactgcccgttcaggtatgccgtccggctggccgggcgagaccatgtgccaaaaatcaacaacatcgctgtgacgccgggcgacgtttacgaaatgtctgctctggtagcgtgtggtaccggcagcgctgactttaatttctacatcggtcgggccaccactgctactggtggtattggggcgagagcgtccgggggaaacaccaagaccaccaccgcgtggaaacgagccacctggcgctttactgtgccggcagacacgaacttcctgcgaccgttcctgcaggttaatcagagcagcccgttcggcactgtctggtacgctgccgactggcatatgcgtaacgtgacggcggcgaacagtgcgcagaaaaccgcagatgcgaccgcaaaagcggtggattcactgaccaccacggttagccagcagggcgatacgctcagcagcatcggcacgcggaccacctcgctggagaacagcctccggtcgacaaacgatacggtgagtaaaaaggctgacacgacagcggtgacgcagttgcagggcacggtgacgcagcaggggaatgacatcgcggcagccaacagcgcgctgacaaaactcagcagcgatctggccacgacgaatgcgaatgtgaacaaaaaagcggacgcaagcgcgatgaacaccctgcagaaccaggtcactgagcagggcaaaacactcagtgcgcaaggggattctctaacgcaacttagtaacagcctgagccagacggcagcggatattgacgccagcgggaaaatgccgggcaacctcattgtcaacggcagttttgagcgcggcgcggcgggctttaccggctggagcagtaccgcgacggtggccgatttacaggttccgcattcgggtaacaaggcgctgaaaatgtccgccggccagtcgaacctggtcgggcaggaaatcagtatcacgcagggtcgtacctaccgcatgggggtatgggcgaagcaggacccgggaaccacgattaaagatgcgggtaacacgaagtttcgtgtggccgacagcactggcctgctggtcggctcaaactacggaccgtttagttctggctggcaactggtaacgtttgactggaaagccacgaagaccacgacggccagtttccagctgacgaccttcctcagcgcgggggcaatgtatttcgatgatttccatgtcctcgatgttacggatgaaaaggatatcgcagctaatgccggggccatttctcagatgaatacccgcgtcaccgctgctgaaggggctatcaccacccaggcgcagcagctgacgaaactcagcggcgatctggccgtcacgaatgcggcggtcagtaagaaggccgagcaaagcgctgtcaccgggttgaccacccggatgacgtctgccgagggtaaactggattcgcagtcgcagcagctcaccagtctgcagaacagcctgaccacgatgaatactgagctgggtaaaaaggctgacacgtccgcggtgagttcactgaccggtcgcgtaagccaggtggaaaacaccatcaccagccagtcgcagagcatcacgtcgctgaccagcaccatcaataccatccgcactcagggagctaatccgtgggttgacggtacgtttgaaagctacagcgatggccaggtgctgggcgggaacggcacagccgttgtggtggcgtctcagaaattcaccggcaataagagcctgcaggtgagtcgaggagcgaacaataacggcaacagcgataaacagcttgggagctggcagtcagtccgtgaggatgcgaagttccggtttgagttctgggctatgatgccggcggatcaggcgccatcctccgggtggacaacgctggtcggcattaactcactgaatgctgccggtcaaaactcctggcagtcggcggtcactgtcagcgaagccgctcttggtgcgcgtgataagtgggtgaaatttacgggtattgccagtaacaacgggggtgggagaacacgcgcagtggtctggatctctacccgtggcgcctccggcagcggcacccccggttattcgctgtatatcgacgatctggttatcacggatgttaccgatgcgaaagctgcacaggatgcctctgacgcgacggcgagtgccgtgagcggtctgacggctcgcgtaacggatgctgaagggaaaatcaccgcccaggcgcagcagcagacggcactggccacgaaagtggataatgccaactcccgcgtcgataacatggcgaagacgctaagcgacagccagagcacacaggccagcctgaatacctcgcttcagtcgcagattgacgcgcaggcggccgccaacatcaaaaaccagacgacgctggacaacacgattaaatcggtggccagtatcaccagtacccagcagacgcatgcaacggcactggaggcgctggcaacgcagcagacgaccctgacatccagtgtcggggatctcagcgcttccgttcagaacaccgccaaaaccgtggcggatgtgaatggtacggtgagttcgctgtggtcgatgaaggttgagacggttaacgggaagaatgttggcgcggggattacgctgggcagcaatggtgaaacgagcgacatgatcctctacgctgaccgcttctcgctgtttaaccgtaataatgcgacggctgttccggtgatggttgccgaaggcaatgagctgtatatcgatacggcacgtatcaaaaacagttccctgacctcaaccaaaatcgcggacggttccatcacgaacgcgaagatcggcaacgagatccgctcgaatgactttgttgacgggtcacgcggctggcgtatcgccaaggatggctcttcgcagttcaacaacgtgatcgttcgcggtgcggtttatgcgactgacggctggttccaggggacggtatatgcgagccacatcgagggcgacatcgggtcatttgcgatcaacatcgctcagcaccgcacgcgcaaggtgccgaaggctacatggcagtggtttgagctggcccggttccggcggcagaatttcgaccaggtgatcaatattcgcggtggactcctccagacggatagcatcactatcgacggcggcgcgaaactcagagcggggatgtcctacgcgccaggggctgacggcggactgaatcctggctatctgtcgtatgcaatgcttcttcgtggcacaggcgctacgtctggtggcggcagtatggagctaggcattgagcttatgtatgaaacaggtggagcaacacgcctgttaacggcgcaagagtcaatgaacgtagacaacatgtcatttgtcgtccctgccggtactggcgacgctgttctgcgatatggctgttacctggaccgtaacggacagatggtattaaccatcctctcaagattcgacgccttcgccgcgcgcaataacaacgtaattcgcggttcatcaacctga

SEQ ID NO: 184515 - DNA, 3336 bp, Klebsiella oxytoca
atggcagacgtcgcatctttagcggtcgggctgcacctgaacgcagccagttttaaatcccagctgctgggagcgtatggcgatgcggagaaccagtcacgacggtttaaccgtaatgcccaggcggacgcgaaaaagacggaagacgcctataagaaggtcggtctgtcgatatccgggatggccagccggctggcggggctggcaggagccggcctttccatcggtacgatcgtcaccacgtccagacaatatggacaggcgttatcagatctgcaggccatcaccggtgcgactgcagctgaaatgaaagcgctggatctggctgcgcaggaaatggggcgcacgacagagtacagcgccagccaggccgccgaagcgttaaagctgatggcgtcggctaaaccggagcttttaaaaacgtccgatggactgcagaaggctacgaacagcgcgcttatcctggcgcaggccgccggcacaacgctgcccgatgcgaccagaacgctggcgctctccttaaaccagtacggggcgagcgcgcaggaagcggatcgttatatcaacgtgctggccgccggcgcgaagtacgggtcgtcggagattgtggatacagcggccgccattaaaaatggtggcgttgcagccgcacaggccggcgttggttttgagcagttgaatgccgcgattcaggtgctggcagagcgtgaaattaaaggcggtgaagccggcacggcgctgcgtaacgtcatcctgaacctggaaaagggcacagacaagagcctcaagccatccgtggttggtctcagccaggcgctgaccactctttccgggaaaaatctatccacggcccaggccgtaaaactgtttggcgtggagaacctgaatgcggcgtctatcctggtccagaaccgttcaaagcttgatgagctgaccgcttccctgaccggtaccaaaacggcgcatgagcaggcatccatcagggttaacaacctgaacggcgatttgctggggctgagcagtgcgtttgaagggatggtcattaagatcggccagagcagtaacgggccactccgcagcgggattcaggttgccacggaggcactgaacagcctggcagacaatttcaacaccgtctccagcgtggcgctttacagcctgatccccgtgttatccacgaaactgactgcagggctgcgggagaatatcgcggcctggcgggaaagccaggcggcggtaaaagcgcgggcgcaggctgatgcggatattgcccgcaaaactctggattcgacagctgccatcctgaaacagaacgacgctgagtttggccactaccggcagatggagcggacggctaaacagtacgggatgaatatcagttaccaggatgagtttacccgcctcatccgacaggaaactgaacaaaccaatctggccagccaggcgaaactgaaactggcggcggcaaaccggcaattgtcgatatcagcccgcgcggcctccgttgcggtggggctggcaagaggtgcattaaatttaatcggtggtccgttcggcgccgcgatgctggccggttcgggcctcctttactttcatgagaaagcaaaggaggccaggcagtcagccattgatttaaaagatgccgtagtcgaaaccagtgaagcgctgatgcgcctctcgcttaaccagctaaatgtgaagcagttcgacctggaggatcagtacgaaaaccaggtcgtgcagcgtaaccagctgatgaaagagattcaggatgccgacagtcgtatcgacagcctgaaagggtttgaccccttcggccagctggaaggggtaacaaaaggccaggcgcgtgcacgggcggatctcgatagcgttaacgagggactccgcaaaaccgaggaaaacattaagcgtgtcagtgatgcaaaaacactggctcagctgggtttatcgggaaaaataacctcccttacggacgatctgaaaggggcgttaagcacgccccccaaagagaccggagatggaaatccctggggcggcgatggcggtaccggcacggggaaaggcagtaagtccaaggtcgaccagttcaaaacgctgcggcagcaaattgaagaagcccatgcgtccagcctggccagaattaacctgcaggaaaaggacagtaacagggagctgcaggaagcggcgaagaaaaatggcgccagtgatgctgacctgcagcgcgcgctgttaatgaacgcagagaattaccagaaacagcgactggatctggccgcgcagtattcccccgcccaggaaactctgcgaaaagagcaggaagccagccgggacctggctgagcttttcaaagcccgccttcttgatgaaaaagagtaccaggccgcacgaataacgctggccagagatactgcgaaagagctgctgcaggcgcatgccgatgaaatcgctgcgccggcactggatatcgccggcgaagttgatccactggtctcgctgcgcaatcagcttgcgcagcggcaggcattgctgcaggcgtactaccagggcagcgcgatcagcaaagaacagtacgaaatgctgatgcagaaggcgacgaaagaatccgccgatgcgcagtatcagacgtcactggagttataccgatcacagggagaattccagagcctggccgtcgggttatttgaaacggcccatgagcgctcaagcaacttcctgacgagcatgctgacgcggacgagaagctttaaggagaacatggctgacctgttttcctcgctcacgcagtcgatcataaaaaacctcgttgatatggccgctcaggcgctggtcaccagttccgtcatgcaaaccattatgggcgtggtgggcgtcgggaccagcgttgtcacgggcgctgcgggcgcaggctcggggacggcgatccagaatgccgccagtaacttccagttcaacgccaaaggcggcgtttacgactcgccgtcgctgagcgcatacagcaaccaggtctacgactctccgcagttcttcgctttcgcaaaaggggccggcgtatttggcgaggccgggccggaggccatcatgccactgacgcgtgccggcgatggttcgctgggtgtacgcgctgtcggtggtggtcagaacgccggcgcgtcggaagggccaaaagtctatatcacgattgaaggcggaaacacctcaacgcaggcgccgtctggttttgagcagtttggccagcagatcggctcgtttgtggagaaaaaatacagggagctgatggcgcaggatatgcgccctggcgggatggtctggaatgcagttaaagggcaacgctaa

SEQ ID NO: 184516 - DNA, 261 bp, Klebsiella oxytoca
atggctgcgaaaaataaagcagtggagccggaagaaacggtcgcacaggacaaccatgcgaccgtggtcgcacaggcagagcgtaaatccgttgtgttccttgggccgcaccaccgttattcccgtggagatatcgcgtgctttgaaggaacgcgcgccgaagaactggttaagcggcgtatcgcggtatggccggaggatgccgaacgtgcgctgaaaccgaagccgggagacagcgattttgatactgacattggatga

SEQ ID NO: 184517 - DNA, 1287 bp, Klebsiella oxytoca
atgccacatattgaagaattgcgtcgtcagcgtgcgggtatcaacgaacaggttcaggccctggcaaccattgacgccagcggcagcacgctgactgcggagcagctgacggagtttgcgaacctgcagcagcagttcactgatatcagcgccaaaattgaacgcctggaagccgccgaacgtgctgcggcgctggtcgcaaaacccgtgaaagcgactcagcaggcccccggcattattgttaagcaggagctgaaacagtacaccggtgctggcatgacccgactggttatgtctgtcgccgcaggcgcagggaatctgcaggacgcggcaaaattcgcttcagaagagctgaatgaccagtccgtatcgatggccatttccaccgcagcggcgtccgggggtgtgcttattccgcagaacctccacagtgaggtgatcgagctactgagcgaccgaaccatcgtccgcaagctgggtgcccgtcccgttccgctgcctaacggtaatatgacgctaccacgcgtggccggtggagcaacggcaagctacacaggagaaaacaaagacgccaagacatcagaaacacgctttgatgatgtaaaactgacggcgaaaactctgattgcgatggtgcctatttccaatgcactgattggccgcgccggattcaacgtcgagcagttggtcctgcaggatattctgaccgccatctcagtgcgtgaggataaagcctttatgcgcgatgacggtaccggcgatacaccgattggtatgaaggcgcgcgcgactcagtggaaccgcctgctgccgtgggaagctgatgcagcgatcaacctgaatacggttgacgagtacctggacaagatcattttgatggcgatggacggcaacagcaacatgatcagcagcggctggggcatgtcgaaccgtacctatatgaagttgtttgggctgcgtgacggcaacggcaacaaagtctatccggaaatggctcagggattacttaaaggatatccggttcagcgtaccagcgcgatccctgcgaatctggggaccgggggtaaggagactgagatttactttgctgacttcaatgatgtggttatcgctgaagacggcaatatgaaagtcgacttctcgaaggaagcctcttatatcgatgccgatggcaccctggtatctgcgttttcccgtaaccagtcgctaatccgcgttgttactgagcatgatattggcttccgtcatccggaaggcctggtgctgggtaccggcgtcctgttctaa

SEQ ID NO: 184518 - DNA, 1722 bp, Klebsiella oxytoca
atggcaacctatccgaacgtcaatgcagcgaaccagtatgcgcgggatatcgttggcgggaagattctggcgtgtcagttaacgatacttgcctgtcagcgacatctggacgacctcgaacgagcaaaggatccccactggccctaccgcttcgataaaaacaaagcagaacgatttcttcgttttgcccagaaaatgcctcatacctcaggggaatgggcccggcgtaaactccggattgaatttgaagcctggcagaagttcgctcttggcgtaccgtttggatgggtacacaagaagacaggcctgcgtcgtttctctgaaatctatatcgaggtgcccagaaagaacgggaaatccgctattgccgctgctgtaggaaattatatgttttgtgcagatggcgagcatggtgcagaagtctattgcggcgccacgactgaaaaacaggcatggaaggtattttctccggcgctgcaaatggtgaaaaagctgccggcattgcggcaaaaattctcgataaaaccctgggcaaaaaaaatgacgcgccctgacggttcggtttttgcgcctgtgatcggtgacccgggggatggtgattcgccatcatgcgccatcattgatgaatatcacgaacatactactgatgcgctttacaccaccatgaccaccggtatgggggctcgtgaacaaccgatgacactgatcatcaccaccgccggctatgacattacatccccttgctatgaaaagcgtactcaggttgtcgagatcctgcggagaacccgtaatggcgaggaaaatgaaaccatatttgggctgatttatggccttgatgatgatgatgactggacgactcctgaggcattaatcaaggcaaaccccaactatggcatttcggtaaaagcagattttctccgggcgaaacaattattgggtatgtcgacgcccgggcagacaaacaagattctgaccaaacatttcaatcgctgggtaagtgcaaaatcagcttattacgacctgagaaaatggatggatgcggccgataaaacccttaagttgtcagattttgaaggggaggaatgctggctgggtatcgatctggcctcgaaagttgacctcaatgccgtggttccggtttttcgtcgtgaaatagacggaataacacatttttactgtgtttctcctctgttctgggcaccggaagaaaccatttactcgcaggagaccgcgctgaagagtaccgcagaacgttatcagtcctttgtccggcaggggaagttgatcccgaccgatggcggtgaagttgattacagactgatatttgaaacgatcctgaaattgcggaataccgtaaaaattgcccaatgccccatagacccttatggcgcgacttcattacgtcacatgctcgaggaagaggggcttgagcctgtcgagataagacaaaattttacccatatgagtgatcctatgagagagattgaggctgcgctcatctcggggagattccatcatgacggacaccctgtcatgaactggtgtatttccaatattgtcggccagtatcttcccggaagtgacgatattgtgcgtcccgggaaggaagggcggcagaacaagatagatggtgcggttggtttaatgatggggctggggcgcgccatgcttaacagttcagtgatgacatccgtatatgatgaggaagatatagcatgctaa

SEQ ID NO: 184519 - DNA, 435 bp, Klebsiella oxytoca
atggccggaggaattcgatcgtccggtggtggccgaaaacccactttacccaccgggcaaaaaagcaaattaacacgtattgcgcctcccgctgagttaatgggggaggcggcaataagaatgtggaagacgcaaagcaaaatactcatcgaccgaggggtgtttgagctggaggacgcacctttgttgctggcttactgcaatgcttttcatctgatgctcgaagccgaaaaaatgctggccagcggactgacctcagaaagtgaaatgggggggctgaaaaaacaccctgcagttaatgtccggaatgactcggtttcccagcttgcccgcctgggctctctgttggggttagatccgctcagtcgtcttcgcatgaccagcggacaaaaggatccggacgatgacgggaatgaattcgatgagtttgactga

SEQ ID NO: 184520 - DNA, 162 bp, Klebsiella oxytoca
atgaagaacttaaaaattgcatacatagacgagaagctggtggcgattgagtgtgacggattgtcatgctcatcgctgcccttttcacagtttcccttcgacagtaccgctttaactctccctcaactcatgctcgaggatgcttatgccgccacgagctaa

SEQ ID NO: 184521 - DNA, 519 bp, Klebsiella oxytoca
atgaataatccgtcagttattccggccttcgattttcgtgaaatggtcacaaccctcgataacaaggtcatcaccacttccctcaaagtggctaactattttggtaagcgtcataaagacgttctgcgagcaatcagaaaccttaaatgctccgaggatttcacccggcgcaattttgcgcccattgattttattgataaaaatggcgatgttcagccgatgtataacatcactcgtgacggatgcatgatgctcgtgatggggttcactggcaagaccgccgccgcagtaaaggagtgctacattaatgcctttaactggatggcggaacagctaaaccgaagagctgtcatgggagaagaaatgcagcaccggcacgccatcaaagaaactcgctcaaaactgaaaggcacaatcggcagtcggttgatgaatgagcggaagaaggaaaagtgcgtccttaagctcgagtatgagcacatcatgcaggtgacgcagcccgagctgcttattgactga

SEQ ID NO: 184522 - DNA, 462 bp, Klebsiella oxytoca
atgagccgagtaaccgccattatcagcaccatagtgatctgcctgatagccagtcttggctggctagccaatcactaccacacgaacgccaccgagttcaaaagtcagcgcgataaagcgactgagcaacttagcctggcgaacgaaaccatctctgacatgcaagtcagacagcgtgacgtcgctgcgctcgatgccaaatacacgaaggaattagccgatgcgaaatctcagcttgaagatctgcagcgttgcgttagcgctggcaagtgcgggttgcacgtcaatgccagatgtccctcgaacggagcgcccggcgccagcggcgtgggccatgcttccggcccccgacttactgacgccgctgaacgggattatttcactctcagagagagaatctctttagtgacaaggcaggttggctatctgcaggaatacatcgacacgcagtgtttaaaatag

SEQ ID NO: 184523 - DNA, 531 bp, Klebsiella oxytoca
atgggaaacagagcgaaacttagtgccgcaatgctggccctcatggctgctggtgcatcagctccaacattgatggatcagttcttggatgagaaagaaggaaacagccttacagcgtatcgcgatggcagtcaggggatctggacaatttgccgcggggccacgcgtatagatggtaaacccgtcactcagggtatgaaactgacgcaggccaaatgcgatcaggtaaacgcgatagagcgcgacaaagcgctggcatgggtggatcggaatatccatgtccctttgacccttccacaaaaagtaggcattgcctcgttctgtccatacaacatcgggcccggaaaatgcttcccgtctacgttctatcagcggattaacgccggtgatcgtaaaggcgcatgtgaagcgattcgctggtggataaaagacggagggaaggattgccgggtgcgctccaataactgctatgggcaggtaacacgccgagatcaggaaagtgcgctgacatgctgggggatagatgaatga

SEQ ID NO: 184524 - DNA, 237 bp, Klebsiella oxytoca
atgtatcgcatggacaaactaacaaccggcattgcctatggcgcatcagctggaaacgccgggttctggatgcttcaggtgctagataaagtcagtccatcacaatgggcagccattggcgtgcttggcagccttctttttggtctgcttacgtacctgacgaatctgtatttcaaaattaaagatgaccggcgcaaagcggcacggagtggtgatgggaaacagagcgaaacttag

SEQ ID NO: 184525 - DNA, 603 bp, Klebsiella oxytoca
atgacaccacgtcaacgccgtctgcaccgtgcaggattagcaacagtggccgccgccccgcgcaaaagctggctgggccgattcactccccttaatggcattcagtccgcctggataaaatctctgcttactgtttggggggaagggatgagaggaggtgctgccccgcgtaaaccatcaggacattcatgctggcgaggcatgaagggtgatcactggtcagataaagcattagaacgctttacggcagcaattgagcaggcaagaagtgaagggtatcgcgggcggcaggcattaagcagggcacatgccattttgtggccgaaacctgcaactgtcgccattgacgctgcgatcactgaggatgatgttgaatttgttgagcgatgtgtactggcgatctttgaaacgggtgatccggtttatctcgttggcgttaactattacaccacccgcaaaaaaatctcagacataacacgggaaatacagctggtggctccatggttaacagacagtgaggcccggaaaagagtgcgctggtgccttgaaatattcagagcaaaagctttcctttctgttcataaggcgattcatgcggattag

SEQ ID NO: 184526 - DNA, 1032 bp, Klebsiella oxytoca
atgcgagctttgcttaacgtggatattgcacgccatcttggaattgtgctgcttaagccgggtagtgaattaatgccgttattcggtgccggccgagttcttgttgaaataccgccggcaagcatgaaaaagatacccagtggacgtcttcctgatgcccggcagccgttgcgggatgatatggggatcagaccttttttcatgaagaaggcagttatcactgcagctggtggggttagtgccctcgagtcatggttgcgtaggcaggttaaaaactgtcagtggacacattccgattaccatcaccatgagctcgtcccgtttcgccattcgacgggtgtaataatcgcatgctggcactgtgataatgagctgaaaaaccaaacggaacaaaccctcgatcaactggtaggagttaataacgctgactgggtaatcgacactgcccgcatcgcgcttggtctggacgctcagcgctcattgtcactggcggagctatgctggtgggcggtaggcgccgggattggcgatgaaattacagaagaaatggcgcgccgatccctgcgtattaaagacgatggcattaaatctgtttacagggagagtgagatcgttccgtcggtaccggccaccagcattctttctccccgtatcgaaaaagcaatcaggccaacggcaaaaacaacgccgggcaaacctctggttcctgtgaacgtcgatcctgttgcaccggcgacactattcgcgagacctaagcggagccgatggttatcagctgactttatctcatgggttaaaaaacagccgtgtatgtgctgtgggcagcctgcagatgatgcccatcatcttattggctgggggcagggcggcgtaggcaccaaggcccacgatatttttacgatcccattatgccgcaagcaccaccgtgctttgcaccatgaccctgccgcttttgagcgtgaatacggcacccagccggtattgattattaaattgctggaccgggcatacgcgctcggcgttctggcgtag

SEQ ID NO: 184527 - DNA, 393 bp, Klebsiella oxytoca
atgacgcaaacccccgaagtatcaaaatcccatcagactggtgctccttcatcgagcgccggtttgctttcgtcttcaaaactaacttttcgacagcaggaagttttcgatctgctggtggcctacatcaatcagcatggctacccacctacgctatctgagctggccgatatgctcggcgttagctcgtctaatgctgtcctgttgcatctgcgtgcgttagagagaaaaaattttataaaactctctcgccgtgtttccagaggaatttccatcgtcgggcgaaaggagcctatgctcgccgtgcagctgctgcaggaaatgatcgctgaagaacccggcgcgcgtgaaagagcgattgagtttttgcgactgttcggtgatcagccatga

SEQ ID NO: 184528 - DNA, 258 bp, Klebsiella oxytoca
gtgagtaaaaaacaagaaatgccgaacaccggctacgcaattatcagatgcgacgatggggtgatcgttgctcgtctgacatcctttcctgtgtgtgagcgcgctctgatgtaccggcgcggcgacactgtttcgtttatgcctttgcagccggatgagatcgtggggactctctctcttttttcacagatgattgaaaaggctaagtctggagttggttaccaggttcccccaggttctgttacaatcccgtcatag

SEQ ID NO: 184529 - DNA, 234 bp, Klebsiella oxytoca
atgaaagtggaaatcacaattgatcgccaaaaaaaattgccggatggcgctgtgcctgctctggagaaggagctactgcggcgattggataaaaactttaataactgcagtcttgtgattcgtcgggccagctctgatgggttgaccgtgcttggtggaatggacggagataaaaaacgtgtagaggaaatcctgcaggacacttgggaaagcgctgatgactggttttgttaa

SEQ ID NO: 184530 - DNA, 2055 bp, Klebsiella oxytoca
atgtattttcatataagggatatctttatgtcaaagatagattttgagaagttgtccgaagaatgcaaaggatataaagtcacgagcttactggatgccttgccagattatgctgaaaacccttcgttaagaaatttgattgaatatgaaacggtgaatattaaaaacttacagatacataatacaaaaaatagaaaaaaaagagatgattttttcgatgcattaatttccaacattaacaaccaagaggctacggatagattaaagaaaatattatcagtgtgccatatatctgaaatctatattgacagcatcaaagaagaattaaagtcatccccgctcatgtcgcaagactttaaaatacagtgttgggctgtaattgaaaaagccttagatgaaggttactatcttttagaccaaataaataaaagcattgattattatggtgagaacgcaaaacatttgactttaaataatagaaatattttaaatgaaaatggtgagtcattttcacctgactcagccttagataaaattgttaattatttaacattaactatcaaaatgctatcccacgaacatggcttttcggcttcaggagaaattataattccagagcgtattgatgttgaagaatctgccattgctggagcaaaccaagtattctattattcgttactctggaacgaactgctaacctgtgcggaaagttgcattttatttgataatgaaatccagattgctggattagaggatctgaccgacgagtttaaagaagatggtgtggaacagggggttttattcaatagaaccaaagatgaatttgaacggtatgatacaatatctaacgaaaggctctctaggcgcataagtcaaaattattgggaggccatggcagattacaatttagaacgcagaatacctaaatatgtaactgactggtcaggaactttaaatcaccctattacttttgaagagttaccattcctggtttcacttatggaagccattgcaagtcatgatccagaacaaatagttttaggacttagtctgcgcgaatgggttagaggttattctgttatatcctacctggctaaggaaattaaaaataaagttctttacaccaaaggcgaactgatgagtatgctgctgctgggtggatttaaggagaaaaaagctgaagagtttattaaacacatcaccttcggtgtcgatagtcgagatatttatgactcaccacttgtgaaaacatccaactctttatttttcctgtatacgccagcacacatctccccacttatcagtaatataatactttcgaaattctcatccaaacaagcagacctcacaaaaaaaggatacgggtttgaaagagatatcatcgagaaattaaacgaaaacaatctagaaaatagaagttttaaattcaaacgtgatgccgatgagtttgaatatgatgctattttcttgctggatgataaagcctttatattagagtgtaaaaacaccaatttatcgggaggatcagtagcaagagcctatcaaaagaaaatttttattaatgaaacaataaaacaagtcaaaagactcgtttgtggtctaacttctcacccggaagtgtttaaggaacattttgataaagatatcagtaattatgagttggtaccagttataatgaataatttgccgttttcaatacctggaaaggtgaatggtgtttacgtaacggattcatctgcgtttgggaggcttataaaatcgagatatattaactcaggcttaataagtcatcaaggtaggtttaaaattacagataataagcctgctttttcaatgtggaagagtgatgttctaacagcttcagacatcattaaccacttcaacgaaccagtgcaattacaggattttctaaaacaccaaaaaaccaaagaatatctattaagaataaataaaagcaaggtctttttaaatgtggtaaatgaaactgattacgatacaatgagtgctgagcatagtgagttttttattaatgcacaaacgactcagaaagcatag

SEQ ID NO: 184531 - DNA, 441 bp, Klebsiella oxytoca
atgaccaaacaatcaaaaaccaaagtaaccaaagcacagattgtgcttgccatcgttagccggacgccagaatgcgtcctgcaggatgtctgcgatgcgctcgacttgcaagccagtacagcaggtaacttgctgcggcagctccatgccgcgggaaaactccatcgtacccataacggctaccagtatgtctatcgagtggttgcaggcgttgaggttcccgttattgccctgccgcagactgcaacaccattatctgaagaggatgtgaaaaaagtccaaaacgcactgtccctggcgaagacgctggaagacaaaaagctttggcgccgggctgcgactgtttatacatcgatgcttggaatgacaacaacagcaaacgagctctggttgcttgccaaaatgcgtaaccgctgcctgcgcaatgcggcgaggtgctga

SEQ ID NO: 184532 - DNA, 672 bp, Klebsiella oxytoca
atgtgggagtacgagcagagccagcagcatccagagctgttcaacagattcgagccgcccgtgagcaacggttgcgagttgcaggatcagatggccgtagaaacggcatggcgcctatgggaagtaatgggcgaaatcttttcgaaccggtggatcctgaagaacggagaggaaccatcagaactctggatcgctcagattggatcgatgagtgaagcccagattacgctggtttgccggcagtgcatggaacgttgcgccgcgggcagcacatggccgccggatctcgctgagttcgtcgcgctggtatctgctagcggtgctaacccgttcaatctgacatccgatgcagtgatggcggagtacaaacgctggagaaacgagtcttacagatattcgggaagcgacaaatacccatggaaacaggatgttctgtatcacatttgcattgagatgcgcagaaccggagttgagaggaacctgacggagggagagctgaaaaaactggcagataacttactcacgaaatggaccaaacacctggctaacgggttttcgattccgccaattcgtcagcagttggcagcaccgagacatccaacgggaccgacgccagcacagattctgatggaagagtacaaacgccgcaaggcggcaggtttaaccaagtaa

SEQ ID NO: 184533 - DNA, 555 bp, Klebsiella oxytoca
atgcaaaccacctcttttgaaaatcatactccggtgatgagtatgcaactgaaaacggaaaatcagtatttgccccgtcggcgtgacggcaagaaatgccgagccattttggccgccgttcaggaatgggagtcctcattacctgggcgtgcgcaagaccacgtcgcgcagctggtggccgaacagtgggagaaacaaaacgggcgcggtatcagcgtcaataaacaaaatctgtatcgctacctgaaaaacgagggcggttcagagaagtacaccagttatgtcatccagctttcggcggcgatcgctgatgcaatgccgatagagatcgcgcgcaaacatggcctaaaacatggcttaactgaaactgagctggtggccaatgcaatcaaagaatgcagcgaagcgcaccaggcaaaattgcttggcgctccgttgcaaaagttagagcgtgaaattcgggaggcagcaattgcactttttaacatgcttcctgcagatgcggcgggaccactactggcgagcataagcgccgtagcgccacagtttttttaa

SEQ ID NO: 184534 - DNA, 216 bp, Klebsiella oxytoca
atgacagcccttgataacgcaattcgagtagctggctcagccaataaattagcatcaacgcttggagtaagcggcatggcagtaagtcagtggaaaacaaaaggtattgtgccttcatcgcgagttttacaggtttttaatgcaacgggcgttacgcctcatgaattacgtcctgatctatatccgaatccgacggatggaatacctaaggagtga

SEQ ID NO: 184535 - DNA, 390 bp, Klebsiella oxytoca
atgaaaaacactgaagaactcaacaaccaactgattgctcgtttggaagaaattactcaaagagggatcagcaaggcggatatggctcgcattgctggagttacacctcaagcggtgaatgggtggtttaagaaaggagtaatcagtaaaaagtccgcaattgccctcgcggaagctgccaatgtgtctgtaacttggttgcttggagagaaagtatctgaagattcaggcctcaagccaaatgagagcaaaatgttacgtctgtttaggcagttacctgaggctgaacaagagagaatgattgatacgtttgaagtccgcctaaaagaaatcgatgattatgttgagaaatatctccgtggtcgatttaaggctagcgacactaactaa

SEQ ID NO: 184536 - DNA, 123 bp, Klebsiella oxytoca
atgaaggattttgcccgagtacctaccgggaaccaggcgacccgcctgaactggttcgaggtgagactacgccagctgtgttacttgctggcgcagaaaggaaaccctgaggctgaggcatga

SEQ ID NO: 184537 - DNA, 195 bp, Klebsiella oxytoca
atgaataccctgtttgcccttgtcatcagcgtttgtgctctcactggtgaatgctctgatgttctgatcggtgtttatccatcagaggccagttgcaacagcaacgccgatgaacaaaaagtacagggccagtgcctcccctaccgaaatgcacaaaacatggctgacgaccaacagcctgcagcgagtttttga

SEQ ID NO: 184538 - DNA, 372 bp, Klebsiella oxytoca
atggccgttacggccggagaagtgattatggaatttggaatgaaacgcgttctggcatctgtccaggccgccgccactttgaataagctctatgacggctcgcccgtttcactgacggccatcagtaaagagtcaaagctgtctacttcataccttgagcagatcttcaaaaagctgcgggcgggtaacctggtaatttcacagcgtggcccaggtggtggttatagcccccgcggcgatgacatcaccgttacagaagtgatcactgcggtatctaaactgccagcccataaaacttttgagcctatcctgcgagcgcttgacgacgttcgcgtatcacagctgctgcgggccgattcgccagccccataa

SEQ ID NO: 184539 - DNA, 2139 bp, Klebsiella oxytoca
atgaacaactacccgtatctcattaaagcgaaggcaaaagcaaacgaagcgaaaagtctcttctgctggttctctgctaaatccgattctcgcgccgagcgcaaaatcctggacatcctggaagacgctgaaattaacgttggccgcggcgccagccatcagctgccgatccgcaccaactggctcatcgttgatgacttaccggaagaaggtgtactggatgacacctggtgcgatcgctacgagcttggtggtgaagacgggctgacatggcaaaaaatcgttgcgccggcggctgctgaaccacagccctccagtaaaccagaaaacgatacctctcatgcaaatagcgatgaagatgactattcgaacaatgaagaagcactcttcaacctggcggaaatgtcattccgcacgcagctgcttgcccagtatatggccgacgaacgtcacgtgtatcacattagcattcctcatcgtaaccgcctttcagcgatggaaatggatacggataatcacgatgtgcagaatctgctgctgacggcagaaaatattcccgagcttaagaagtatgatatgcctggcctgtggaaatttaccagtgcatttaagagcgtatttcctgtggggaaacgccatgagcttggcaagcaaattcagttcgctaaattgtggcttgaaacatcgcacattgaccgcgggatccttacaaaggaatgggctgccggtaactgcatttcttcggttatgaaaactgatgcaggtgcgaatgcgggcggcggtaataaaaccgatcgcaaccctgactatgcccatacccttgatacgctcgatgttgaaatagctctggccagaatgccgatggatttcgatatctacaatttcccggcatctattcaccgccgggccaaagagatcgtccagaagaaagaaagtccattcaaggaatggtcggctgccctgcgcaaaacccctggcatcctggattattcgcgtgcggcgatttttgcccttattcgtggtgccaccagcgatattcaccatttcccggtaagtctgcagacctatatcaatgcgaacctgaccgagcataagcatgacgccccttctgctgaaacgcttgagaaagctggtcatgtttcatctgccgccgtcactctggacgctgtgaaaaaggctatcgatggagatgaaggtgtgcctgacctggaaaacctctccactgattttcaggtaattggccccgaactggtaaaagaggctcaaaagcaacgtccagacgctaatcaggttctggcctccgagcgcggcgaatatgttgaagggattagcgaccctacggatccgaagtgggtaaccgaagaccttaccaagaccaggcagcctgaagtttcaaaaattggggacggagtattttccattgacggtcttgttgacgttacgggcaaggttaaccaaaaagaaaaaacagatgaagttgttcatcaaacggatgctgtagatattgaatccggtaatcataataaggaggaagatcagccaattgattatgttcacgttatggttgatctggaaaccatgggtaaaaaacataacgcccctatcgtcgctattggtgcggttgtttttgacccggcaaccggctctattggagaaagtttctataaagtcgtatgccttgaatcctctgtgaactggggcgctgtaatcgatccatctactgttatctggtggcttaagcagtcctccgaagcacgctctgcgatcgtaaatgatgatgctatcccgttgcaggatgcattactccagttcagagaatttgtttctgataatgtcgctggtgggagcaaaaaggcgcaggtatggggtaacggtgcgtcattcgacaactctattctgcgttctgcttacgattgcattgctgaagattatccgtgggaatactggaacgatcgggacgtacgaacaatggtagagctcggccaggccatttgcttcgaccccaaaacaacgatcccgtttgaagggtctcgtcacaatgccctcgctgatgctattcatcaggcccgctatgtatcagcgatctggcagcgaataattgccggcaatcaggtgctgcaaaaattgatgcaaaactga

SEQ ID NO: 184540 - DNA, 246 bp, Klebsiella oxytoca
atgcttcagatgttaacccttgaagagtgggcaaacgagaaatatagaagcaatcctccaagcgtttccactctcaggaattatgctaaacagaatatgttttctcccccagccaaaaaagaaggtcgattctggcgcgtcagggaggatgctgagttggtcggtacattgaccactcctgtagtaaagaaaagcgaccctgttcttttgcagaggattttgaacgatggctgccagaccacgtaa

SEQ ID NO: 184541 - DNA, 1128 bp, Klebsiella oxytoca
atggctgccagaccacgtaaaaataatatatctattccaaatttatacccgctctacagtagaaaggttaataaagtatactggcgttataagcacccgataactggtaagtttcatagtctaggaacagatgaagcagaggccacggcaatagctattgaagcaaataaaagactggcggaacaacaaacccgccagataatggcaatcactgacagaatttccaccagctcaggaaaatcaatatcaactaacacctggcttgaacgttactggaagattcagcaggaaagattaaagtccggagatattaaagaaaacactatcaaacaaaaagcaaaaccagtatctctgcttaaggagcgggtaggaatgaaattaatatccgctgtcaatgttcgagatgttgcgcaaattcttgatgaatatttagcggagggacaacccagaatggctcaggtcattcgctctgtcctaatagatgtttttaaagaagctcagcatgcgggagaagtacctcctggttataaccctgcactagcaactaaacaacctcgtagaaagatcactcgccagcgcctcactcttgaggaatggcaaaagatttttgatatagccgatgaaaatcacaaatacatggggaacgccatgcttttagccatagtaacaggacagcgactaggtgatatatcccgtatgaaattctcggacatctgggacgatcatctacacgttgagcaagagaaaaccggaagcaaaatcgctataccattagctctgcgttgcaacgcaatcaactggagcctccgagatgtaatcagtcgttgccgggattatgcagtaagcccttatttggttcatttctttagaaccacctcacaggctgagcgaggagcacaggtgaaacccagaacactgaccatgaatttcagcaaggcaagagacagtgcagatattgactggggacaaggtacaccggcaactttccatgaacaaagatcgctttccgagcggttatataaagcccagggtataaacacgaaagatttacttggacataaaactcaacaacaaacggataggtaccatgatgatcgagggaaggggtggacaacggtggccttatga

SEQ ID NO: 184542 - DNA, 360 bp, Klebsiella oxytoca
atgcagaaagcaacccgtgtaatcaaccataacatcgcggaaccctggtggggcctcagacgcaacatcacaccgtgttttggtgcacgactggtacatgagggtaaccacctgcattaccttgctgaccgcgccagcattgccgggacatttaatgacgcagatttacgccatctggaccaggcatttccggtactgatgaaacagatggagctcatgctgaccagtagcgaactcacgccccacattcagcgctgcattacgctccacgcaaaagggctgatatgtgaggccgatacgctcggctcctgtggctatttgtacatcgtaatttatccggcgtctgcaacaaccgcataa

SEQ ID NO: 184543 - DNA, 222 bp, Klebsiella oxytoca
atgaaaatcatcagcaaacgtcaggcaatggcgatataccgccagcattctgagtcccggctgtttcgcttctgtaccgggaaatataagtggtccggcagtatctgccattactacggcagggaagtgcaggatatccggggtgtgctggccgtgtttgctgaacgccgacaggaccgcaacggtccgtatgtgatcctgcgcagcgtcaccctgaattaa

SEQ ID NO: 184544 - DNA, 483 bp, Klebsiella oxytoca
atgaatatcaccacgtgtccccctgacagcgggggaatatctcccgccgcgcagcgcaccatcagacgcgctctgaccctgctggaacgccagttacgcgagcccggcgaggcatttacctccagccatgcagttcgcgactggcttcgcctgcagctcgccacactggagcgtgaagtaatcatggtgctcttcctcgataaccagcatcgtcttattgcccatgaaacgctcttcaccggcaccatcaaccatacgcaggtacatccccgtgaagtgataaaggcagcactgaaatacaacgcggctgccatcgtgctttcacacaatcatccgtcaggttatgccgaacccggccatgccgacagattgcttactgaccatctgaagcaggcacttaaactcgtggatatctgtctgctggaccacctggtagtgggaggcatggacatcgtctcgtttgccgagcgtggctggctttag

SEQ ID NO: 184545 - DNA, 480 bp, Klebsiella oxytoca
atgaccgacatgattaatattaacgataaaaatcagctacctctgcaggctggcgataacggttctgcacatgctctgacagccgcgcccgtaccagacgaacagcgtgtggagttctggccgcagcactttggaaacatcccgcagtggataacccttgaaccgcaggtctttgcttggatggatcggttctgcgctgactacagcggcggtgtctggaatttttatactctcagcaacggcggggccttcatggttccggaaacggacaacgatgtcttctggtcgctgttcaacgccatgaacggcaacgcctcagacatgagcgccgaagctgcagggattgcagtctgtcttatcgcttacagtcatcacgcttgccgcacggaatgcgatgccatgacggaacattactggcgtctgcgtgactatgcgctgaaccacgcagaatgcagcgccatcatgtgcattaccgactga

SEQ ID NO: 184546 - DNA, 213 bp, Klebsiella oxytoca
atgccctttttaaaaattctaatcactgccttaggtcaggtgctgacctggtgcggcgggcatcaggcccggcagtatattgaaatccgcttccgtcaggctggctacgatgacagcagcattgatacggccagagaagcggtcacgttgctggttactgcacttatcaccgccctgatggcgcagatacttaagattctggatacgctgtag

SEQ ID NO: 184547 - DNA, 474 bp, Klebsiella oxytoca
atgaaaatattattagctgttacactcaccgctgtgatactgagtgctgtacccacagcgtttgccgttcccaatatctggcattcaggcttcggcatgggcatgtccgaatacatcatcaccagcccgcagcataccggactcaacatcagttgtaccagtaatcccgatgagaaccaggtgctccagcacagcgtactggtcaccctgccggatggacgcaccctcagttcacaggatgacggtaccgctattacgctcgtcaccggtggcgaacagtatggtgtgcctgcttccctgggctggcgtaatggggataatgcctgggtatcattcattgatgctgtcaaaaaagcaacatcatttgaagtctgggttaacgacaaaaaagtagccagtttcacaccctcagccagtaatgttcataaggtgcttgctgatatgtcagcttgtacctccctcacggcggattag

SEQ ID NO: 184548 - DNA, 630 bp, Klebsiella oxytoca
atgaaaacgtacaaatcagcgatatttattattatcgttttcaccctgacagggtgtggggataatttctcgtgtgaaaacgaggaggtattaaaatcagttaatgaggctatagtcagtagcgctgtaaatgaacgcgacttcagaacatttcgcccatacagtcagtcaggcctgactggcaaggcagtgacggtagactgggatacccccctgactattgacagcaatccgaatgctaaatcgttaacctgtaaggttcgcttgaccgctatgttatctgatgatgaaactagccgtttaaaacagaggattgatgacattacccacagggcggagagcgagcccggctacgagagttataaaggatttattgcaaatgtgaataaagcagcaatggatatggcaagaaccagacaggtcacaggcacaatagaatataacctctatcagtcaaagggacatcctgtcactgaagtcggtaatacgccagagaacagtcagacaattaaggatattggcgataagttattacgcccggtggcaagagtttatgctgctcaggggggagagctggcattaaatgatttttattctgtcgatataatgtccatgtttcgcacacgataa

SEQ ID NO: 184549 - DNA, 678 bp, Klebsiella oxytoca
atgcctgaacaggaacaccgttatgaccggttagccagtcgtctcgccatactggtcagccgcctctttatgggcgaaacgctcagtgtcaggcaactcgcgcaggaatttggcgtatctgaacgcactgtacagcgagacctgcgtgaacgtctgcgctatatcgacacagaatatatcgacggaaacgtcagcctccgtgatgcacgaggaccttttcgcaccaacaatgatattctgcgttttgcccgaataaccagcgttgcacattattttccggctcttgatcctaagctgctttcagtactccttgatagtggtcaggactctccctgcatcatctggaatgatcctccgcaacaggcccctgcattatttggcggttttcagatcatcgttcaggccatcatccgtcatcgccttatccacttcctgcatcaggaacgccaacagccatcagtcgcaccttacaggctcatttgccacgacggagagtggtatctggtggctgtctcgaaggatcgcattcaggtttttaccctctcaacaattaccgatgtggtgatgactgtcagcagttttgtacggaacagacatatcgaccacatcaagcaggatccgaggtttatgcgtgcgcttcctcattttaattacatcagcggaattattcataaataa

SEQ ID NO: 184550 - DNA, 729 bp, Klebsiella oxytoca
atggctgtctaccgtaacgatgcagatttacatttgctgggccagtgcagcaatgaagagctgcaattgctgatttccatcctgaccactgacccacgcgacggcgacacccgctggacagaaagcctgaccagttctccggaataccgtctgctggcaccggaccatcgccgctactggcaactgatagccgctgagcttcagcgctatggcgcgaataccttaatgagtatggcccgttttgggcagggcgtggtttaccgggaaattctcgaagatgtctgcaaaaaactcgatgttaactacaacacgaaaagcgctactgaaaccattgagctcgccctgttaatgaaggttctggagaaaagcctgtctcagatgacgcaggaagagctgtctgctttttcccgcacaatgcagcttgacctgaccaacccgacgcctcagctcatcatcatggcggtacaggcagcgatacggacttcctctctggcggcactggagcttgctactgtgatgtctgcaggcatcattacctcactgggtggcattgctacctggggcactgtggtcgtggcgtcaagggctctgtctgtcattgccggtcccgttgccattgcactcagttcagcatggatgatttccgacattaccggtccggcctaccgggtaaccatacccgcatgcatgatcgtggcctggctccgtcagcaacatatttcccgttaa

SEQ ID NO: 184551 - DNA, 1164 bp, Klebsiella oxytoca
atggctatttgtaaaagaaataattgtaatctctcaataggtgatttaccagatgagcgtaaattgcgcttatgcccaaaacattatcagggtaagctatctaatgcagctaaaagagcccaaaggtggggtctgacgtgccagtacccgccctgtggtataagtctgtctggtacccgcaatcaacggtattgttgtattgagcatcgtaacaaagacagaagacttatagatgacgatgccattgtcagtctggtaaaacattcttactggattaacgtagaatcaatgctgaagaataatcccctcgggctggggagtatcaactgccctgatgacatcgctgaacttatcaggttatacgagcgtaaagcagctcaccagaaagcatataacacgatcaatggccgcagggtgactgactcaaaggggctggcaataaaacgcttaacgccctggctggagttagaactgtgccatatttatcctaattctaaaggaggagctaatatcacacgtaacattattatcgctccgtcactgattaacagaatgatgaaagactcagtgcctgtttgtaacacaagaggaacattcagcggcataaaagcggcaggcttatccctgtctgttgaatcaacgctattgaaagcactcacagagaaatatggagcatttgaaatacaggaagcattatctcctgtaaagaatgtgacatttgctgatcctggtataccacgcagactgtttggcacagatatttatgcttatccacctttattgaaacttttaaaggaggaatcatcgcgcctggagctctgggatttaagggaatctattaatcatattgaaagtagtcactggctgtcagctggccctgcaaatgagttatttgcagtcgcagcttttcatgccatgttaaatggggataaagataacttacttgagatattttccgggctgcacgaagacgtaacggagcgagccaggcgaaaagaaagattgattcatgcatattaccaaaacgtacttgaggattatatggctcgctattttggtcttgacttgaataatcaggaagcctgcgttttattttacaatacatatttcacagcaccaccacttgataaagatggggttttggttatatctcctcatttctga

SEQ ID NO: 184552 - DNA, 225 bp, Klebsiella oxytoca
atggctgcacaaaatctcaaggtactacgcatccgtgccgttgtgaacaaactcggcatagctcgttcaaccatttacgactggatcaatccgaagtcaccacgctacgacgcaacctttccaaagcaacgcagactgggcatgcaatctgtcggctggtttgaatcggaactggatgagtggttgttaaaacgtcatcaggcatcatcgacagatattgcctag

SEQ ID NO: 184553 - DNA, 747 bp, Klebsiella oxytoca
atggctgatgttaaagaaaaccttttatttgaagaattattaagcagataccggaagaaaaaaaaagcactatgctttcatctagggatcaaacagaaacatattgcaagaacaagggtgacagaagatgttgaacttattgtggtgataaacacagggaggcaaaccagctctaaagatttagcacaggcactggcctgccagcagggagagaaaaactggcggcgctaccttaaagtattcagtcgttctgcatgggtagaaaaaggcatcaggggcaatctggctgatgctcaacaaacctgggcgcaagggaaggcgattctgaaatcggatcccgatcatgcggtgcaattgatgcagaatgccattgctcttctggagtgtggtctgaaccgctgtgcaactgcagcagctaaaaatctcaaggagcaacataaactcaattctgcttttggcgggaaaaggaaagcggcacgttttaacggtattaaagaggaggtgataaaattactgggagcgcgacccgggggatggaaaacgaagacggatgctataagtgacctcattaaagatttacgtccctatattgaggatcatgggtggccttctgttaaggatgaagacgactcgctcgatgaggcagaaatcgaggggaggttgggtgatttgttgcgggaatggtctgtccccagtggagataagtgtgtcagtgcagcgtttgcaaaagcagtaagaaaacgctga

SEQ ID NO: 184554 - DNA, 654 bp, Klebsiella oxytoca
atgaccggtgaaattcgcggaaggggaagaccacgaaaaacagaaagtacctatgcagatactcgtaatgacctgatccgcagcggacttgaactgctaacgcagaatggttttctttcgacgggagtcgatgccattgtcaaaaatgccagtgttcctaaaggctcattttattattattttaagagtaaagaggaatatgctcagacagttctgaatgcctatgacagtttctttcaacataaactcaagaaacatctttatgaatcatcctgctcaccgatggtacgtctggaaaatttcatagatgatgcctgtgatgggattaataagtataacttcactcgtggctgtctggttggcaatatgatgcaggagagcccggggcttccgccatcctttattaaccaactacagagtattcttgagcgctggcaagcacttgttgcggcctgtttgtccgatgcgttatcttcaggcgaaatatgttccgatatgaatgatacgcaactggcggccattttctggagtggctgggaaggcgcagtcatgcgcgccaaactttattgttcaatccaacctgtgtacgatttctggaactatttcaaaacttctgtacgctatcaaccatcgccggaagtggcggctgaatag

SEQ ID NO: 184555 - DNA, 984 bp, Klebsiella oxytoca
gtgtttaaatctttattaatcaacaaaacagatgatcgctacagtgcgcaacttgctgaaattgctgaaagtgagcttccgcagggtgatgtggaggtcattattgactattcatccatcaactacaaagatgccctggccattacgggccgtggccccatcgtccggcactttccaatggtgccaggcattgattttgccggtacggtgtccgccagttcacatccggaatatcaggccggggataaggttcttcttaccggctggggtgtaggggaaaaacattggggtggattgtccgaaaaagcacgggtaaaaggagactggctgaccctgctcccgactggcgcaaacagcaagcacgtaatggctatcggaaccgctggttttaccgcgatgctgtgtgtcgacgcgctgttaaatcatggtgttaagcctgaagatggtccggtacttgttaccggtgccagcggaggtgtcggaagtattgcagccatgatcctggcatcaatgggttaccgcgtcaccgcgtctactggtcgcccggaagaagccgcctggctttataaaacggtcggtgtagaagagattattaatcgctccgagctttcctcaccaggaaaaccgttacagaaagaacgctgggctgccgccattgatacagtcggcagccacacgctctgcaacgcctgcgccggggtgcgatatggcagcattgttgcagcctgcggcatggcacagggcatggaactgatggggaacgtggctccgtttatcctgcgtggtttcacgcttaaagggattgacagtgttatgttttcgaaagaaaaaagagcggcgatctggcagcaggcggtaaattatttaccagagtccagactggatagcctgactaccgtttatccactcagtgaggccatcaatgtggccgaaaaacttctcaatggcaaaattcgtggccgggcagtgattcaatgtagctaa

SEQ ID NO: 184556 - DNA, 435 bp, Klebsiella oxytoca
atgataccggggggaagcaggatggggcgggatgaaattcttcagtattcgcaggaggtatgtaaaggtctgcgggatgatgatgatggtttgcgtcgggaagtgttggcccatgcgggaagtcgctggtcattaggcgttgtcaacacgcttggcgtttatggaagactacgtcatgctgagattggcagacgtatgcacggagtgactcagcgcatgctgacgcgcacattacgacaacttgagcgggacggtcttgttatccgccatgatttcagtgaagttccgccacgagtcgaatacgagctgtctgatactggtatggaactgcttattcgtatgatcccgctatggacctggattgtcgaaaatgcggatcgctttcgtgaagacaggttgaaatatgacaaaaataacagcaacccaataacgtaa

SEQ ID NO: 184557 - DNA, 954 bp, Klebsiella oxytoca
atgaacaaaatggatcttaacaccacttctaaaaatatcctcgtattgggtgccggtgaactgggccttcccgttttgcgcaaccttacccgtcgggcaaaagatgttgagggtgcaaaaatcagcgtgcttctacgtgagaataccgtaatgtctggcgaaccagccaaacagaatcttatcgctgagatcagaaatcttggggttgagatagttacgggtgatctggtgaaaagcaccattgaggagctcgcagtcgtattttctcagtatgacacggtagtcggttgtgcaggttacgccgcgggcattaatacgcccatgaaactggcacaggctgctcttcaggcaggtatccccagatatttcccctggcagtttggcgcagatttcgacgccattggccggggcagtcctcaggacattttcgatgcacagattgatgtacgtgatttacttcgcagccagcatcagactgagtgggtcatcatttcgacaggcatcttcatgagttacctcttcgaacctgacttcggggttgttgatctccaaaacaatgttgtacatgctctgggcagtctggataacacgatgacgctgacgacgccggatgatatcggaatgctcactgccgagattgtattttacacgccccgtatccgcgatgagattgtgtatattgccggtgatacactcacttattcagaagtggccgacagacttcagtttgctcttggccggcctttcagccgttcagaatggactgaacaatttttaatggataaactggctcgtgaccctcaggacatgatgggtaaatatcgtgctgtttttgctcaggggcgtggagtcgcatggaacaagaaaggtacgtttaacgagcaacacaacatcccggtcaccgacgtggcaagctggataaaagcaaatcttctcccaggcaacagagaataa

SEQ ID NO: 184558 - DNA, 336 bp, Klebsiella oxytoca
atgtcaatcacgattcaaaccaactcaaatttaacagcgctcagcaatcaccagccaaaagagagttcgcgtacagcgcagatcatggcacaaatccagcagctaaccgagaggctcggcaagatttcttctgaaaaagggatgacaacagagcagaagaaagagatggctgaactgatccaaaagcaaattgaaagcctggaagccgaactggaacagttactaaggaagcagactgataataagtcggagaaaaaaggaaatgaacatatggtacaggcagatgaaaatcagacaaaagataataacaacaatatgattgacatctatgtctaa

SEQ ID NO: 184559 - DNA, 1401 bp, Klebsiella oxytoca
atgacgaattacgccagaaacattatgaataatcagaccgtaaccccatcggcgacgctgatccgtggcgcgaccatactgagcatggatgagaatgtcggcaactttgagcgaggtgatattcttatcacgggcgcaaccattaccgccgtgggtcagtacctgaacgcagagggtgcccatgtcatcgatgccacgaacatgattgctatgcctgggatggtagattctcatcgccactcatgggaagggcaactgcgccgcatcaacccgaacgccacctgtctggacgactacagcaacgccacgcacttctcgtttgcaaaatactatcgcccctccgatatctatgtgggtaacctgctgaccgcgctgggtgctatcgacgcaggtatcacgacaatcattgataactcccataacagccgcactgctgcacattcagacgcagcagtggaggcattgctcgacgctggtattcgcgccatccacgcttcaggtgcgccggtgtcaggtgactgggacagagcgcactggccgggtaactggcagcggctgcaggagaagtatttccggaataaccctgaaagtctcgtgtctcttgcggtaatggctcagctcgagcccgaattgtgggccgaggcccgccggcttgggctgcctatcgtcactgaattcttcggtgcggaaatgggggctgaacttcggtcactgcatcaacaggggctgctgggaccggacaatatctttaatcattgcactgcgctccctgacgaaggatggaaaatcctgcgcgaagccggtgttcgggtgaacgtctgtccgcgatctgatgcgcactatggtattgaagacggcatgtttgctattgaggcagcacaacgtcacggtatcacgccgggtctgagcgtcgataatgaaacgtcctacagcaccgacatgttcatggagatgcgcgtggcattttacctgcagcgtgtgatgggcatgcataagcgacagcactgccgcggcacagagtattcgctgacaatgcttccggcagcgcagcttctcaaggctgcaaccgtcgatggcgcttactgtgccgggctgcaggataaagtcggcagcctgacgccaggtaaacaggctgacctgatcctgatcaatgccggcgacattaacctctatcctaacgggaatgcctttggcacggtggtacatgcgacagaacgcagcaatattgataccgtcatgattggcgggcgcattgttaaacagaacggcatggtcgtgggcgtcgacagagcacgcctccatgcagcgattgatgaatcgcgtgaacatctgtttgcagccgccgggtataaacctgacatgtttgcagaaaccttcctgcctctggaacaggcgcactga

SEQ ID NO: 184560 - DNA, 891 bp, Klebsiella oxytoca
atggatcgtattcaggcaatgcagatctttatgcgggtggctgagggcggcagttttgtgcgggcggcggaaacgctgttactgccgtcctcaacggtaacaagttcgatcaagagcctcgagaactacctgcaggtacgcctactcaaccgtacgaccagacgggtaagcctaacgccagaaggactccactatcttgcacaatgccgggaaatactctcattaatcgagcatacggaatccagtctgacggattccgtcaaacggccgcagggacggttacgcgtcgatatgcccggtggtatcgccaatttcatcgtcatgcccaggctgaaagacttttaccaacgttatccggatatctatctgatgattggggtgagcgaccgtcaggtcgatcttgttcaggagggggttgactgtgtgataagaacgggtgagctgattaattccacgcttgttgctcgcccgctgggacggttacgctgggtgacatgtgcctctccggactatctgaaggaatacggcattccccggtctcctgaagacttatctcagcatcgtgcaattcactatttttctggacagccccgtcgtaacgacgaattgcgtttgatgaaggggtccgagacgatttccgtatctgtcagcggacaaggggccgttaacgaaacaggactgtatattaaaatgtgtcttgaggggttcgggctggctcagcttgccgagaatattgtttctgagcatctgcagcaaggcacgctggtcgaagtgatgtccgactggcaaccaccgtcagttccggtcgctttgctttatcctcatcagcgctttctttctcctgcagtacgcgcgtttgctgactgggtatccgggcttttcccgaagtga

SEQ ID NO: 184561 - DNA, 582 bp, Klebsiella oxytoca
atgagtaacatccttattatcaatggcgctaaaagttttaactttgccagaggtgagctaaacgaactttatgtcaacaccgcaaatgaggtgctgagccatctcggacacacgatatccgttaccagggcagacagtaattttgatccacagaacgaaatctctaagattcttaacagtgatattctgatatatcagatgccgggatggtggatgggtgagccatggacggtaaaaaaatggatcgatgaagtctttaccgaaggtcatggttctttgtatgaaagtgatggtcgtacgcgttctgatggctcaaaaaaatacggttcgggtggtcttcttcagaacaaaaaatacatgctatccctgacctggaatgccccactggaagcttttaacgatccggagcagttttttgagggtgtcggcgtggacggattatacctgcatcttcataaggccaatcagttcctcggtatgagatcactcccaacctttatcacaaatgacgtggtcaaatcgccggatgtggaaaatgaaatccgccgcttcagcgatcatctgatagcaaccttttcctga

SEQ ID NO: 184562 - DNA, 1191 bp, Klebsiella oxytoca
atgtcatgtatcacaaacaagtggcgcactgccgcccttgtgacgggaattctttttatcgccgttaacctgcgagttccctttacttcaatagcaccggtgttaaagatcattcaggaacactttcaactgagtgtaacgtccgtaggatggcttaactcattaccgttatttgcctttgcagtgttttcaccggtgagtgcgattattgcccgaaaatttggtctggaacgtacactgttcggcgcgctgatagtgatttctgcaggtattctgctacgttcagcaggcagtatgtgggcgctatacatcggaacgatgctcataggcaccggtatcgcgctggggaatgtcctgttgcctggccttatcaagcgtgactttgccggaaacgtcgcatcattgacgggcgcatattccatcacaatgggagccgcaggtgccgtaggctccgccattatcattccactttcccagcaatggggctgggacagtgcgcttgccctgctagtgatagcgcctgtgcttgccctggctttttggttcccacaactgagcaatcaccataagcatacgctctcaggtccaactcaaaccacgggggtatccgtctggacatcagctctggcatggcaggtcacgctgtttatgggactgaatgcaatgccgttttatgttgcggtgggctggctgccagccattctgacggataatgggatttcacctgaaaaagccggagccgtacacgggatgctgcagttcactaccgcaattcctggactcatgctggcggctacgctgcgtcgtctgaaggaccagaaaatggcggctgttgttgtcagtttgctttcgggaatatctcttataggaatactgtacgcaccgggcctgtcgatgttgtgggctgccattctgggattcggctgcggtgccagcatgatgctgggtctgacctttgtcgggttacgtacaacaaatgcaagcgatgctgcagcactgtcaggcatggcgcagtgcgtgggctatcttatggctgcaatgggtccccttttgctgggtaaggtccatgactggtccggtggctggaccattcccctgctgatgacggctgtaattacggtagccggcgccttaaccgggctggctgcaggtcgaaacgtctacctgaaacctgccacttcagcaggctga

SEQ ID NO: 184563 - DNA, 504 bp, Klebsiella oxytoca
gtggagtgcttcaaccggtgcgtccggcaattgttcaaggagcacagcagccagcctggccgtcttactgccagcggaataagtgggttcctgctcggcaagataaagaataagttcccgaacaagagacgtcatggcaatcgtacaacatgtttcgggcatgacggccgccccgggttctataaacagaaaacaggttcgggcattatttgttacacggcaccggtgaggcgtatttccgggtatccagacggcatgtcggggagggacaagccacagagcattttgaacttcacaactcactgcaccatgcaaggacaggataagctgacccttccggtgcgcatgcggcattatgccggaatactcttgcgccggtgcagcgtgaagggcaaccgctggctgcagaaagatgtcagcgtcaaattcatcgggcgacgaaactacttttttatgttttggcatattttagaaatatgttgtctgattatctatatcttgtaa

SEQ ID NO: 184564 - DNA, 288 bp, Klebsiella oxytoca
atgctttttgcggatccgggggacaggacgactttacagcagtgggcttcccgccttgcaaccagtgagcggtcgttggccagaatggtgcagtcagagacgggaatgagcttcggacgctggcggcaacagttacatttgatgattgccctgaatgagttggctgaaggcaaatcggtgcagaacgtcgctggcgctctgggctatgactcggtgagtgccttcattaccatgttcagaaaagccttaggtaaatcgcctacacagtattttgcttcgctgaattaa

SEQ ID NO: 184565 - DNA, 912 bp, Klebsiella oxytoca
atgactgtacttgccccacctgctgaaatatgtatttattctgacgaataccgaccaggtactcttcagtttctcaatttcattgagacgatgggggtcaagcatggtcgtaaacttgagatcgatttatccaaggtaagatttgcatctgccgcggcatcgttgctgttttttgcggtagttaatcgagcacagttgctaacaggagaccctcacttaatacgcttcaagtggccaaaaaaggagaagaatcttgaggggcatcgctggatcgtaagtacgggtctctcgcgagcattgctggccgggactgatgaaaagcttcaggctcttactcgcgaggaacgtttttttcagtctgctgtcgaaccttttgagcatattgttgaaactgtaaccatgctgcaaaggaaagctgtcttaaatgatgaacagttggatttgttgctaacagctatcagtgaggctttgcttaatgtctctcaccatgcgtatgaagatgatgctttcaaagatgatttgcttctgttgaaaggtaaacgctggtggcaatgtgcctggttcaatccagaagaaaaccgcgttgttttcattgtatgtgaccttggcttggggatttttaagagtttcatgcctgatgatgatggtcttagcactcaaaacgaagtatcttctgtagaaagagctatgctggttggtgaatctcgttttgttggctcgggccgtggcaacggttcagaagatatcaaacggccgattggcgttggttgtgtagatgatgagacactactaatcctaactggacatgctcgatacaactataattctaatgacagctgtcctcggtgtgagagacttactgaatacataccaggaactttactacagtggtcgctggttcccaggagatga

SEQ ID NO: 184566 - DNA, 327 bp, Klebsiella oxytoca
atgagaaacatcgtcattgcgaaggagttctccagaacaccattcggacgctatactacagacagtcccaacagtgctgagcgtttccgcagggattttctggttccagctctgaaaggtgaagaaaaggaagtcattgtcgacttccgtggcatagctttgggggtaggttcctccttcctcgaagaggctttcggaggattaatccggaaagaagggttgccaaaagcaaacatcaaagctcggctcgtaatcaagagtgatgtgccgttttacaaagagcaaatagaaaaatttatcgatatggctcagccggaacgagcataa

SEQ ID NO: 184567 - DNA, 1176 bp, Klebsiella oxytoca
ttgggcaagacaaaacaaggatcactatctctcccaagaggggtaacaatccgtcagcataaaaccggtgccacgctggtcatcaccttcacgtacaaaggggttctctgtcgagaacccctatcccggatggaagccaatgcgcgcggcattaaatatgccgagcgcctgttgggggagatacagaaccagatcaatagcggcgagttcaattattcaaaatatttccccaactccaaaaagctggagctgttcggggtggtgaagaaaaccaaaaacataaagtcttacctggacgagtacctgaaaatctgccagaaccgcaacctgtccccgtcgactatcaacggttatgaaaaatgcctgtcggcgctgtcagctctgcataaactccacgtgtcagaattgacgccagcggttctaaaaaactggatagccagccggaaaacaaagctgaaaacgacccggaataacctttcgtttctgcgcagcgccatagatgaagcggtgacagacggcctgctgaccattaacccggtaagcctcgtcagcgccagccggtaccacgtgatcgacagcagcccgagcgccgacgattacgaggttgacccgttcacgccagcggaaacactcgctatttaccagtgctgcaggtacccggaatgggaaaacctgttccgctttgccttcaataccggtctacggagctcagaactgtgcgcgctgcgctggcctgatctcgacaccatagggaacactgctcacgttcaggcagccagtgtcgtaggggtactcaaaggcaccaagacaaaagccggtacccgcaaggttgagctgaacagtgaggcgctggcagccctgcaggcgcagaaacaatacacctttatgaaaagtgagttcatattcagcgatccgaaaacgggggaaccctgggcgaacgccgacgctatccgtaaaaaagcatgggtgccgaccctgacaaaagctggcgtgcgctaccgtaacccttaccagacacggcacacattcgccaccaagcatatcagccagggtgttaacctattctggcttgccggacagatgggccacaaagggccggaaatgttgttccgcaattatggtaaatacctggctgagtatgacggcagtaccagcgtaaggagaaaaggctcataa

SEQ ID NO: 184568 - DNA, 222 bp, Klebsiella oxytoca
gtgaagattgagtttcacgatcaaggggcggtttcggccatcacggtcaccagcaccgtatttgagttccgccggcacaatcgggcgattgatgtcgcactgttcctgacgcccgagatgaccagccagagcagcggctttttcattatgaagacgattttaagtggcaagacacatcacgcgctgcgtgcctacaaacatctaatccgggaggcgaagtga

SEQ ID NO: 184569 - DNA, 579 bp, Klebsiella oxytoca
atgcttcacaactttcttaacccggaaccaacctcaacagggatccggtctggaaaccgggtgattggttactctgctgccattcgcctgctggataacggtcgctatgacaaacacctcgccgaaggaatggagattctggcctgcatcatggaagcggtagaaagcgactggatcacgcttaacatcgagaagcaaatcatcgtctggcgctggttgcttgccgcagtattcatcactgaggagcgggagaagaatgggactgtcgacgttccgaacgacgagggcggtgttgacactgctgttatctattccggcgagcctggtgccattagcgtttacccagggccggaacgctttgcgctcgcaaaccacattgaggctggcgccattgagaagtacgggcctgatgttggcctgcagctggcgctgcggatgtatcaggacatggttgttgctgatgaagaacacggcttcaggttgtcggccatgggtcgggaaggtttcaacctcctccatgacagctttatcgaacacatccagaccgaaggtgtgccagaagcaccgattatgcattga

SEQ ID NO: 184570 - DNA, 441 bp, Klebsiella oxytoca
atgattgacaacagaactgtcagcgccattgaccaggcgttacagaagcaccacacgccagtcggcgaccttttcgtcgctattcgtcacggccgaatgaagcgttgcttcagccgcggtaccgctattagctggctggcgcactttctgacgtcgcatgctttcgcgcgatccggctttacgcaacgtcacccggatgtacaggtagtccatccgctgaaacctgagttgactcactggcaacgtggcgccgtcaccctggaatattttaacgcccaccagcgcaccgttcgccgggtgcgccgcatcctcgcccgcaaacgagaaatgcagaagtggtgcgaaaagtgggatgccatgcatgaccgctacgtgaaagagcgcgaagaacttaaagccagcaaaccagtagaggtgcgcaatgcttcacaactttcttaa

SEQ ID NO: 184571 - DNA, 255 bp, Klebsiella oxytoca
atgaataaccagcaaacaatgctctatcagggtgtgctgatcccccgccccgtgttgaacgtggatctgcatgtcctccctgattttacctggcgggtagtcgtgcacatcgagaacgggagggtgatatgcgaccgccagctgttcgacgacgagcacatttgctcactggccacgtttatcgaaatggcgcgcgacgcgggtatgaggatcgaggaggaagctggtggcactgacagcaatacgcattcctga

SEQ ID NO: 184572 - DNA, 189 bp, Klebsiella oxytoca
atgtctgatatcactttgcaaaaagcagcatcaaaggcttaccaggctgagattgtggcgaggatgcttgagaactaccctcataaactgaccgactcagacgtggaatctgtcgcctcacttttggctgatctgattgggccagttgcagcttaccttattgaggaagagtctaaaaacccggcttaa

SEQ ID NO: 184573 - DNA, 315 bp, Klebsiella oxytoca
atgagtacagagaaattttttcaactggtaactatacctgattaccgcttctcttccgataaagagcaatgtcaaaacattgatttcgacaaaattgctactgattgcgatacaaaaacaatatctattttgcaagccatcaatcatataggggttagcataatgagtgaggcagaagaaaagagattaaataaagataaaataatgatgctttctagtgtggttgcagacctcgctgaattagcaatagcaacaaataaaatagctaactcagcaacatattcttccggttataaggatgctaaaaatgtctga

SEQ ID NO: 184574 - DNA, 669 bp, Klebsiella oxytoca
atggctatgaaacagagatggcaggacctggccaaaaccaggatgaaagaagtcggcatgactcaagaacagctggcagaggcgctcggcataacgcagggcggcctgggccattggttaaacgccagacgtgaaccgaacttagaggttatagctaagatttttaacatattgaaaatgcccggcttcgtagtaaatgctgacggcactatcagcgactcaagagccgatcacaatgtaagttttaatagcattaacgaatccaagggaagctaccctgttataagctgggttagcgctggagattggatggaagctgtagaaccgtaccaccgtagagcgatagatcgatggtatgacaccaccgttgaatgctctgaggattcgttctggttagacgtcagaggcgattccatgacatcaccagcagggctgagcataccggaagggatggcgatacttgtcgatccccaagtggaagcaatcaacggaaaattggttgtagcgaaacttgacggtgacaatgaagccactttcaaaaagcttgttatcgatgccggtcaaagatttctcaaacccctcaacccccaatacccaataatccctatcaatggcaattgccgtattatcggggttgtagtcgacgcaaaaatcaccaacctcccataa

SEQ ID NO: 184575 - DNA, 222 bp, Klebsiella oxytoca
atgagtggaatcaagagccttagacgcaaagcaaaggtaactcagggagagctggccgcgctgattgatagctcccagggggccgttagccactacgaaacaggaagaaggattcctgatgttgcagtcggaaagcggatcgtcagcgcgtttaaacagcttggcctgaatacaagtttagacgaggtattttcagatgatgttgcacgggatgaggcctga

SEQ ID NO: 184576 - DNA, 294 bp, Klebsiella oxytoca
atgatgttgcacgggatgaggcctgaccacggtttgctcccatctgtgtacgcatctgcagatgaagaatggatcaagcagcagttactgagcctgacgccagcagcacgacaaaaagccattcagcgttatgcagctgtgtatcaggaatcgttcgaagccgagcccgttccataccgcaaggagaaccgggcaaggcatgaagccaatgtaaggcttcgcaggttcgtggatgcacacggacgcgcactgcaggggtacacgacccagccacctctggccggatcacagtaa

SEQ ID NO: 184577 - DNA, 372 bp, Klebsiella oxytoca
atgagcacagagctgaagcaaaaattaatcgcccttctggaagagcagttcatccgctccgatgacaaggtcacttttgattacgtcatgcaaagaaaaataaagtcgctcggttatcacctgcagcgcaatttcgcgatcagcctgagcggccgccgcaggggttttattgattgcctggttacgacacctgacggccagcgctgcgccattgaggtagacaaaaaatctccccgcaagcgctctctgatgaaacttgcagatctgcctgccgacatgtcgggttttgttctcctgcgcgatggcaaacatccgctgcgttatgtcgagaacggcgttgatgtcatcagggcaacaaaatttaagcagtga

SEQ ID NO: 184578 - DNA, 1647 bp, Klebsiella oxytoca
atgctgaatattgaaccgaattttgctcaggatcgtgcgcttaactcgctgcgtcgggagtggaagcaaaaccgcacgttcatggtttatgcgccgaccggcagcgggaaaaccgggctggccgccttcatcactgctggccatatcagccgcggtaaacgggtcatattcatcgcaccctataccattctggtgcgccagactacggcccgcttcgttgagtacggtttacctgaagatgagattggcattatctggcgcgaccaccctgactacgatccagaacgtctgattcagatcgctagcgccgacacgcttatccgccgggaattcccggacaacattgacctgattattgtcgacgaggcgcacatgaagaaacgtgcgttgctggaggttatccgggactcaggagttaaagtgattggtctgtcagggactccattctctccgtggctggggaaatattattcttcccttatcaagccaaccacgattggcgagctgatccagcgtggtgatctcagcccctatgaattctatgcgccgactaagcccgacctgaaaggggttaagtctggcacctccgaagagtatggcagcgactataacgaaaagcagttatccgagattatgtgcggatctgacctggtgggagatattgttgataactggcttcgaaatggtcgcgacctacctaccgtagcgttctgcgtcgataaggatcacgccaacttcgtcactctgcagtttaaccgtgccggcattaacgctgaggttatggttgccgagacaccatccgatgaacgccaccttatcattcacaggttcgaaactggcgccacaaaagtcattgtcagtgtgggtgtgctggtggccggcttcgacagcgatgtccgttgcatcatctatgcccgtccgacaaaaagcgaaatacgctggctgcaggcgcttggacgtggattgcggactgcacccgggaaggacgcctgcctgatcttcgaccatagcggtaccgttcatcgcctcggcttccctgacgccatcgaatacgacgaactaccgtctaaaaacgatggcatgagaggggcagccgcgcgggaagccaaagaacgcgaagagaaactcccgaaagaatgcccagaatgccacttcatgaaacctgccggcgtctacatctgtccgaaatgcggttttaagcccctgattggtgaggacgtagaaaccgacagcacccgcaacctcaaaaaaatgagtaaaggcgagacggtttacaccaaaagccacaaacagtcctggtggagtcagatcaagttctatcagcgccatcgtgccgcgcagggaaaacctgtcagcgacggctggtgtgcgcatacctttcaggaaaaatttggtgaatggccgaacggcttaagcgacttccctatggagatcacgccggaggtcagcaattacattaaacacaaacttatcaaattcgctaaaggccgcgaacgggcgcagcagattgcaaaaaaaccagtaaatgatctgctcacacctcaggactacagcgcccactacgagccgcctgagggaagtgccggacagttaattatcgaagcaaaacggaaactacagaaaaacgtaaacagcgtgagtcagtga

SEQ ID NO: 184579 - DNA, 963 bp, Klebsiella oxytoca
atgaaaacagcagaagcagcaaaaggccgatggtcggaaatttttgaatattacgggctaccgccgatcaccgggaagcaccattacaagggcgagtgtccggtatgtaaggcgagggggaagtatcgcgtagatgaccgtgatggtcaggggacatggatttgtgtttgtggtagcggcgacggcatgaagctgctgactctgacccagtcaaaaagcttttccgccatctgcgcagaagtggaccagctcatcgggaataactatcagcgcatcaacgtgcctgctaacagttcggcggcgcgtcagcgccagcgagtcattagtaagttttcaaagttgctcgatttacgggggaccagcgcggctggttaccttctgcaacgtgggataagccgcctgccggcagaaggcatccgtttttgcgaccgccaacgccatgcggggcgcgtttatcaagctctgtatgccctggctaccgatgacaaagctgagctttgttacctgcaccagacgctgctggacggcgacaggaaggcagatattgatagcgccaaacgtcttaagtcgcttcaagaggacagctatctggatcacgcccgctctgtggccattcgcatgtttccggtatcaacgacgatcggcatcgccgaaggtatcgaaacagcactctcctgttatcaggtttatagcgtcaatacctgggcggtaatcaacagcgggtttatgaagaaattccgggtaccggcgggtgtgaagcatctgattatttttgccgacatggacaagcactctgcaactggacatgccgcggcgttcgagtgcgcccacgcaaacctgctggcgaaaaacgacctggtcaaagtcagcatacgctggccggataacggagatttcaatgatatgcttatgaacggcgatcaggttcgtgaacaagttttctataaaaaggtggcagcatga

SEQ ID NO: 184580 - DNA, 477 bp, Klebsiella oxytoca
atgatgaacaataacaatctgcaacataaccaattcttcaccatcgaacaggacttttcgcctgagaaaattactgatgctgagcgtcttgttatggagcgtttcagttatatttatgcaaactgggccgatgaaaaaaacttaagccgtgaggcggaagaacttcgcgtaagagaaattaaaggttttaaaaacatcctcctctctccctggacattaagcgatgtaactattgaatgggattactgggaatccgtacttcgtcacaggtataaaacacaaaatggcgatggctacgtccagattatctgggatcggcgcgggtggctcactgaccttttgtgcgttatgaaaccagttacccgggctgaagcattaacagtctgcaagtggttactggcatgtgactattttgaggaacgggattcgctgtttgatcgcattattttgaacctggtcggggagtgcgaagaatga

SEQ ID NO: 184581 - DNA, 783 bp, Klebsiella oxytoca
atgaaactggaagcctccctcaaacactttagccctcagggcatgcatatcagcgacgacgtgaaaagcacatcgccgaatcgcctgaacggtaccgacgttatgaccgggatcggggtgaccagcagccgggcacggttcgggctggcggcgttcttcggtaagactggcatcagtaagacagatgagcaactgaccattcaggcgctggcgcagttcgccatcaaaaacgctcctaaaaatgtccgcaaagccgctggtgacaagctcggaacctgcatgttgacgctggcgcaatttgcttttgcggaatactcacgttcggcggccaccagtgcaacgtgccacagctgcagcggtaccgggtttatttcccggcaggaagatgtaattaagcacccgggtattttcgatgcagacggtgtcgaagtgatggccccaaagattaaaaatgaactggtaaaaagagtctgtggagtgtgcggaggaaagaaagttatccatgcgcgatgcaggtgtggtggtaaaggggaggtgttagatcgtaaagcgaccaaagaacttggcgcgccggttttcaaaacatgtgaacgctgctctggtaatggcttctctgtagtaccctcagcgacggtacatcgcaccatactgaagcgtctcccggatcttcatcagtcttcgtggtcacgcaactggaaaccgttctatgaggtgctggtggatatgctgcgtcagggtgagcgacaagcagcggtagaattcgagaaggcaacaacttactaa

SEQ ID NO: 184582 - DNA, 276 bp, Klebsiella oxytoca
atgagcttcgaaattatcgcggggctggtggttgtcatccttggtgctatcgctggtgcgttcggcattggtcatgcacgcgggaacagtcaggcggaagccaaagccgatcagcagcgtaccgaagagaatgccgccgctgccgtcgccgcagcagaacgtaaggcagaagtcacgaaagaggcaagcgatgtacagcaaaccgttagccatatgcctgatgacgatgttgatcgggagctgcgcgaaaaatttgcccgccccggtagtcgttga

SEQ ID NO: 184583 - DNA, 489 bp, Klebsiella oxytoca
atgaacttaatgatgggtgtattcggttccagcaacaggggaaaaagtgaaacgctaatatttctgataaaactgtttgagcaaagtgatcgctatgcatcctttatggcagcaaaaccccaccctggtggagaaaaggatcttatagctgtatttgagcgtgatggacttaagattgggatatccactttgggggatttgggctctcaggttgaaaaatctaccaaagagttagctgagatgggatgcaacgtgatcatcactgctacacgaactcagaagaaaacagttgttgcttttgaaaaggttgctgaagagttcagtttcaaaaaactgtggtttgaaaaaaacaacaatatgaatgattgttgcaataattggcctagtaagcaggaagggtttgaggcaataaaaagaagccgctttaatcaaagtaatatgatggatgccagttttatatttagctacatcgacggattaccaggttga

SEQ ID NO: 184584 - DNA, 390 bp, Klebsiella oxytoca
atgtttaccgttaagcagattattaacaacgccacctcattgtatgaggcaaaagaaatcaccgttgctcgccctggctctgagcaatggcgccaggcttttgctcttgctgatgaactggatgttatggcgcctgacatcattgagcatatcccgatgtcctatgaggaccaagatatgacgaaaccagttggcgatgagcatcaattaacggtcgagcgtactggagcaaaccgggctgattgcattgccattatttgttcagggattccttcgccagctttcccggacatacatgagcttggtggtgttggataccagtttctttacaaaggcgatcagatttacatcaccaacagccacggcgcgaccatcgaaacagttaagtaa

SEQ ID NO: 184585 - DNA, 246 bp, Klebsiella oxytoca
atgtcagagatcaccgcatccgagcaaatccgcctggatattatcaagaaagttaattacgacaccgcagcggccaagctggccattgactgggtaggcgacagctatctgaagtctgagcttttcgcagactcctttgatcgtgttttcacggaaagcgagattgtctctaagacccgtaaggcgattcaggaagcaactgaagcgctggcgctgtttgataccggagcagagcagattagctag

SEQ ID NO: 184586 - DNA, 462 bp, Klebsiella oxytoca
atgaaattagaaactgtttacaaagtattttcagatataaaaaatgaatgttgcacggagataagctcaacattaaatttaaaaaacaaattaatatcttatatcaataacaatgatttaataagcgcatcagtatcagcttctattacagataataaactcatcatcgacctctcatatttcaatttaaaacttgagtgcaaagagtctctaaagctgtatgactacccaccgaatatttcttcgtgtttagaaatgcacttcttttttagagaaaatgatatattccattccgtattaaagatattcataacgcacgacggctatatcgtgaaagatgttttctcaagcgattatatttgcaagaccgataacgaataccgagggaaaaaagttttcgaagaaataatatcagcacttattgataaaggatatatagcgttgaaccgtgaacaactatga

SEQ ID NO: 184587 - DNA, 849 bp, Klebsiella oxytoca
atgacaattagacaacttccggtagcgccggcgggtcgcccctgcgcgcgcgttacctgtgaaacattaccgtctgcactggaccgctgggacggtggtatcaaagcggcggctactgacgataacagcatttctgtttttgatgttatcggtcaggactactggggcgaagggataacagccaaacgtattgccggtgcgcttcgggcgatgaacggtgccgacgttacggtaaatatcaactccccgggcggcgacatgttcgaaggcctggctatttataaccttctccgcgaatacgaaggccatgtaacggtgaaggtgctgggcattgccgccagtgccgcctcaataattgcgatggccggggatgatattcagattggccgcggtgcctttctgatgatccacaactgctgggtgtacgcgatgggaaaccgccatgacttcgctgaactggcgcagtcactggagccattcgataccgcaatggctgatatttacgcggcgcgatccggccttgatattgccgccgttcagaaactaatggacggcgaaagttatatcggtggcagcgatgctgtggcgaaggggctggcagacagtctgctttctgctgatgcggtcatcgacggcgacgaatcacctggagctgcgcttcgcaaacttgatgcattgctggccaagaccaacaccccacgcgctgagcgcagaaaactcattaaagccttatcaggtggcatgcctggcgctgtcaccaccaacgacggtacgccgggcgctgccgaagatatcaaacctgaaaccctcaattcacttgaaagcgctcttgcggcgttagtcaaataa

SEQ ID NO: 184588 - DNA, 327 bp, Klebsiella oxytoca
atgttagaacttgaagtggttaaagagcactgtcgcattgagcctgactttaccgatgacgactcactattgaccctctacatcggagctgcttctcgttacgtcgaaacatggactcgtcgcaaaatgtatgagtccgaaaccagcgaggggtatgcagatgatcctgattcaattctccctggcgatgatgtgaaagcagcaatgcttctgcttatcggtcactggtatgaacaccgtgaaaccgttgttgttggccaaacagcgatagaggctccatttgccgttgagtctcttttgcaaccataccgaatatatggactgtag

SEQ ID NO: 184589 - DNA, 198 bp, Klebsiella oxytoca
atgaacgagcaactggtaaacgcgctgatagcagcgctgagagaacaaacagcagcacagagagagcagacggaagcgataaaccgcctggctgaatctaacgtcgccctgtccgatgtaattatccagtcccttgccggcgatctcgatgagacgtcagagcagcaaacctatctgagcgggaaacccagggggtga

SEQ ID NO: 184590 - DNA, 366 bp, Klebsiella oxytoca
atgattgctccaatatttgcagtttgcgcagccagccaggcagtcagggatttgttaggttctaatcccgtgcggctttatccgttcggtatgcaggacgataatattgtttacccctacgcagtctggcaaaacataggcggctcccctgaaaattatctgagccagcggccagatgcagatcactattctctgcaggttgatgtctatggtgatactgacaccgacgtgatcgccgttgcccatgctttacgtgacgcaatagagggcaaggcctatatcacccgatggggtgcacaaagccgcgatcctgtaacaatgcgataccgctattccttcgatgttgactggataacgaccagataa

SEQ ID NO: 184591 - DNA, 354 bp, Klebsiella oxytoca
atgcaacttactctcgatacgttaaaagaaaccggtgcttttaccgggcgtcccgtggaaaaagaaattaagtggaaaggccgtgacgggaaagagcatatcgcaaccgtctatgtgcgcccgatgggctaccacaccactaaagctgaactgctggcatacaacgggaaatcggacccgattgctgagcgcattgcggcacatatttgcgatcaggacggcgccccagtgtttaccgcggctgacattcttggaactgctaccccggagcgtggggcgctggacggtccgatcgttatggctctcctggctgcaattcatgatgtaaacgaactgggaaagactacgagctaa

SEQ ID NO: 184592 - DNA, 264 bp, Klebsiella oxytoca
atgaacggcatcggcggccgcaccatcgcagaggctcaggagcggatgagtcgcagggaatttctggtttggctcaagtaccgtgagaagtatggaccgctcaatatcatgatgcgtacagagtggggggcttcgctggtggcttctgtcctggctaacatcaataaggcaaagaacacgcctccgttcaaggttagtgactttgcaccgcacatcaacgaagcgccattatctctggaagaggccatgaaagcctgggactaa

SEQ ID NO: 184593 - DNA, 468 bp, Klebsiella oxytoca
atgaagagttcagggcagctgttatcgctggcaggtataattctcgcggtgtactcattgttctttatggatgtgagtgttgaggttggcgatggtacaagagttaataatattgggctaatggctcaacagcaaaactatttattagttgcggttgttctttttcttgctggtatcttcatttctttctcagggagaaagaagtcattacaagaggtagattttactaaaatagaatctttctcatcagatgactttgtttctttgaaagatggtgaaccatgccttaatatcttggctgtagacaatcttgcaattatgtttttacaaaaacatggttcaagcagtgttaatgatattcttttcatgaatatgcctttaatcgataggttagaacaaggtctccctgaatcactaaggaaagattttaaatctacccttaaaaggaggttaaaggacaattgttaa

SEQ ID NO: 184594 - DNA, 2448 bp, Klebsiella oxytoca
atggctggcaagtcactgggaactctgactatcgacttggttgcaaaagttggtggatttgtttcagggatggataaagctgagcgtgcatcagccaagtggagtaagcaggtacaagatgatgtggcaaaatccagtgctgcactagcaggtataggggcggcagctattgcagctgggctggctgttggcgcatccggatttcaattactgaaatccacatctaggcaaatagcagaaactgaccgctgggctaaatcattacaattatctacccaggaacttcttgcttggcagtttgcagctgaaaaggctggtgtctccggtgaccaaatggctgatatcttcaaggatattggtgataagattggtgacgcggtattaaataaatcaggtgaagctgttgatgcgctcaacgctcttggattatctgcggaaaaactatcaaaagtcagtccagataaacaattgctcgctatcggtgaatctttggggaaaattagtactaatgccgagaagaccaccattcttgaaagtttgggtaacgacctttcaaaattgcttcctttgtttgataacaataaccaaaaactcaaacagtttattgaccttgctaaagattatggtgttgctcctgatccatcctctattgatgatttagtaaaggttaatcaactttttgaagatatggaggctcaggttgcagggctcaaaattgagattgcagccggattggcaaaagttgatctaactcctttgcagggatcacttgataagcttcatgacgtactgactgaccccttggttcttcaaggtatttctgatcttgtatcggaagtcgctcaacttgctggatggcttgtaaaagcagctgcaggagcgggccaactagcagccagcacaggaaaccgttttgcggcgcttagtggtaagatcgacctaacaaatatagaccaagttaatgaacgtattgaatatctgcaaaaaatccttgaagggaaaaaaggtttctactctcaaagtgagtcaatgtttggttggattacaggggtagatgacagcgctaaagcactaaacgatgaactgcaatcccttatagaaactagagataaattttctaaagctagcaaatcggtgctaccccttcaggtagccactgtgggaacggacaacccattttctttacctcctggtggtacgaacggaaaacctgttaaaacaccaacaagtaaaacagaaaatgcttttaacagcagattgcttgatctacaaaaacaagctgctctcattgaaactactggtaaaaaaacagctgaggtaacagaactcgaaaaaattaattttgatattaccagtggcaatcttaaaaaattgtcagaagctcaaaaagagcagcttcgcactgctgcaaaggccctagactctaaaaaggaagagcttaggcttaatcaggaaaatgccagggttgctgaatatgtttccggtttagaaaagcagaataagttagtacgacaggggtttgataatcaaattgttggccgttattctggaagccgtgagcgttctcgcatgcaggataataatgatatacagcaggactttgcctctcgacaggatgacttattaaatcagctccaatctggagatatagaccaaagtctttacgataaaaagaaagaagcattacagaattctcttgatgagagacttaagatacaggaggaatattataaaaagcaggatgagttacaaaatgatggtgctgctggttttatatctgggctagcaacgcaaatagaagcatcaatggatttatataccaacatgcaacaggttggtgcacaggcatttagcaccttaacggatatgattattaactgggcagaaaccggaaagttaaatgttaaagattttgctgcgacgtttctgcaatctgttggtagcacacttctttcttatgctgctgcccaagttgcaatggcgggtctgcaggcctttacagcaatgatcggcgttccgtttgtaggccccgaaatagcaggaccggcagcaatagccgcaactgcggcggctggagtgctggcgataggagtcggtacagcccttcagggccaagctcacgacggtatcgactctgtaccagaaacaggaacctggctactgcagaaaggtgagcgcgttacgacagctaaaaccagcgccaaactggatgccactctggatcgagtagcaaaccagtcaaccggtggtggaactatttattctcccacgatcactatccccatcaatggtaacccttccgatgcaacgttggcgctggtccgtaaagctgcagatgagggggcagaaaggggataccggaaggcggttaactcagtcgcaagcggtcagggtgatttgcataaggccttgatggggaaaacgacctctgggaggaaaattagctga

SEQ ID NO: 184595 - DNA, 381 bp, Klebsiella oxytoca
atgttcaaccctgataaataccgttctgttaaatggcagaagggcgggcgcgtatacccgcagctcgactgtttcggcattgtgaacgagatacgccgcgatctgaatttacccgtctggcccgattttgccggggtaaccaaagacgacggcggactcgaccgggaagcgagaaagctgatgctttcgctgaaacgttgtgatccctgtgaaggtgctggagtggcttgctattccggatcaaccgtcacccatgtggggatcgcagtcagtatcggtggcctgctgcacgtggcggaatgcaatccgggaatgaacgtcacctttctgccgttgccgcggtttaagcgccgatttgtcaaagtggagttctggcaatga

SEQ ID NO: 184596 - DNA, 195 bp, Klebsiella oxytoca
atgtccgtctctgaccagatgcagcttctcttcgtcagttcggagtccacgttcacctattttgaagccacccggggatatctggagcgctacggtaagcctctggcattctacagcgacaaagccagcgtcttcagaatcaacaataaaaacgccaccggtggcgacggctatacccagtttcaaaattcctga

SEQ ID NO: 184597 - DNA, 564 bp, Klebsiella oxytoca
atggctactggaaaagcaaatgaaattgcttttgatgaaggcagaaaagaaagctttatcaagagactgaaatcgctagtaggaaaccgcagcatcagggctgcagctaaggattgggggttatctttctctacacttaataactatctatctagagggactgaaccctctttttcagctatgcaagcaatcgcatcaaaagagcaggtaacactggactggctggcctttggtgttgattctaatttgagtcaagtaagggctagtgaagaggcgcggaacgtgtatatcgacccaatcaaaagcacttggaacatgatttttgatactctgggacctgaagaacagaaagaagtcctcgattattgtttgaaagaaggtgcgcgaagcatggtggggcttattgcctcaatagcagaagcagacagaacactgatgggtctgagtctagatgagaaagagcgcttactgaggcttaatgagcaactgaaaaaagggtcatctgagagcgatcaaggcatagccaaaacagaccttcctgaaacaaccaaaaaggccggttaa

SEQ ID NO: 184598 - DNA, 225 bp, Klebsiella oxytoca; identical to SEQ ID NO: 161443

SEQ ID NO: 184599 - DNA, 2094 bp, Klebsiella oxytoca
atgtttgtcactgtgaatgaattagttggccttcccggtttgccaggcactcagcaggggattcgcggaatgatgaacaagcggacagccgacgcgccaactcttgtgcgcaaacgtcagggtacaaaggctttcgaatatcacattgactgccttcctgactctgctcagaaagcgctacgtgctcgccagataaaagaactgatgaacggttcaccgaaagagctgcctgtcgctcctgctaccgcatcgactgcgccacgcgccaaaggtaccgaggaaagcaaaatcgcggtttaccgcaaatgcccggcgctgatggagcagaagctgaactgtctgacagcagcacagcgccagactgctgatgcgcgtatggcgctggtcgttgaagtgctgcgcctcggtgagctgccgggatacagccgggcaaaagctattcgcgagatcgtgcgtcaggctcagagtggtgaactacctgagcggctggccgctgccgtctcaatggcgaacgccaaaaaaggtgcgtcacggtcgctgagtgaaatatcactcaagcgctgggtggcggattttaataagacccgctccgcagctgaacgtcttcttttgcttgcaccgggcaaacgtcaggttgttaagccggaagaaatcagatggttgccagagttcctgagcttttatcgtcggcctgacgggcgcggtattcaggaggcatacgatgattttgctgctgaatgggctgagcgttatcaggatgatgccctgatggccgcagcaatcccttcttatgatcaggtgtgttatgccatgaataaattaccggtagtggttaaacagaaaggccggatcaccggcagtgagttccgccagtatgagggctttgtccgccgtgactgggagtcacttccggttaattacgtctggattggtgacggccacggtatgaagatgaaagtcgcccatcctgaccacggcaacccgttctcgccggaggtgacgtttatcctggatggtagctgccgttatattgtcggctggagtctggcgctgtctgaaagtgtgatagccgttgccgatgccctgcgccacggcattaaaaaccatggcaagcccttcctgtactactccgataacggtggtggtgagaccaataatacttttgatgcggagctgaccggtattctgccccgcctcggtatcgatcaccggctgggaatccctgaaaacccgcaggggcgaggtattatcgaacgtctcaaccgttcgctggccatgcgtgtttcacgccagttcgccacctactacggcactggcgcagaccgcagcaccgttcgccgcatgacaaaagcactgcagtcggcgacgaatgcagcgaacaaagggaaagagctgacggcaaaacagcagcagaccctgcgcgatctgccctcatgggaatcgctgattgagcatattgaggccggtgtggagtggtacaacaaccgcccgcatgagtctctgccacttcgtggcgatggtgagcacttcactccggcgcagttccgccgctataagctggagaaagaagcgacagaaattgagtggctgtccgagctggagctgcgcgagatgttcatgccgcagatagagcgtaccgtcaatcgctgtgaggtccgtttattcaataacctgtattactccgctgagctgaataacgagcacggcaataaggtgctggttaattacgatattcacgatgcaacccgtgtggttattcgtcgcctggatggttcctttatttgtgaagctgtctgggatggtaataaacaacaggcattcccggtgactgccgaatatcaccagcgccagcagcgtatcaaagggatgcgccagcgcggcgaggagaaagtccgtctggccgaggctgagaacgtccacaccctgcctgctcccgcagagcaggaatggctgcgtggcaacgtctatcggccaactcgcggtgcgacaccggtggcgctggcggaagtggaggatgcggaatacagcgaagatgaatatctgaataactcgctggatattctggaatcaaataagcgtaaaaacgcgatttaa

SEQ ID NO: 184600 - DNA, 141 bp, Klebsiella oxytoca
atgttgtttataaaaaataaaattattcacctccttggtggtgaaagcgatttttccatgagcagcggtattctctttgaaaaattactatgtgacaacgtcacttttatgctgaacattctcccccggttggagcgctaa

SEQ ID NO: 184601 - DNA, 849 bp, Klebsiella oxytoca
gtgagagcgaaaaaggtgcagcgtctggcgctgctggtgacggcgctcctgctgaacagcagcgggtgggcggcgtcgtggaatatcggcgttctggccatgcgcggcgaggtcttaacccgcagccactggcagccgctggaggtgatgctcaatcagcagctaacggatcagcagtttcacattcagccgctcgatctgcagcagatgcaggaggcggtcaataacggctcggtgcagtttgtggtgaccaatccggcgcaatttgtccagctgaatagtcattcttcgctgcgctggctggcctctttgcgctcttcactcgggacaagcaacgttatcggcagcgtcattttgactcgtcgcgacagcggtatttcgtcgccggccgacctgatcggcaaaacggtaggggccatcgatcctcaggccttcggcggctatttattgggatacaaggcgctgagcgatgccgggctgcggccggaacgcgatctgcatctgcgttttagcggattccccgcggatgcgttgatctatctgctgcgtgaacgggcagtgcaggcggcgattgttccggtgtgcctgctggaaaaaatggctgatgagggactggtaaataaagccgattttaccgcggtcatcgagcggccggcggcgataccttgtctaaccagtaccccgctgtatcccgactggtcgtttgccgcgctgccggcggtgagcgacgcgctggcggatcgcgtgacccgcgtcttgctcaatgccccggataacgccgtctttcactggggcgcgcccgcttcgacccgtcagtatagcgcgcgaaattttttgataccgttttaa

SEQ ID NO: 184602 - DNA, 1008 bp, Klebsiella oxytoca
atgaccgttaagctgctcgatggtggacgctataaagtggatattagaccgcgtggagcgacaggacgtcgtatacagcggatttttaacaaaaaagctgatgctgttgcttttgaaaaatatgtcatcagcaatatgcacgacaaagactggctggataaaccaaccgatcacaggcggctaagtgagttacttgatagatggtgggatctgtatggccgaagtcataagtacggtgagaagcgccagcgtgaacttaagcgattaattagtgatatgggtaatccccggctttcaaaaatcaataaagggtttattgctgagtacagaagtcagcgtctgtatgagggagttaaggcttccactattaaccgcgacctgagcacgttgcgaggcttattccgcgtattgacagaagcggaagaccttcacgcagagaacccgctaaaagggatcacagatctcaagcaggaaagacctgaaatgtcatatctcagcactcaggagattgaaaagctgctttcagctttaagtggcgacgcgcggcgtctcactgttctctgcttaagcaccggcggtcgctggggggaatcgttgcatatgctggctcagaacatgatgcatggaaaggtgacatttaccaaaaccaaaaacgggaaggcgcgcaccgttccagtttctgatgaggtgatgaagtacgtcaaaaccaaaaccaccggcagactatttgatgttgactatgtcgaatatcgtaaggtgctaagagaggtaaaacctgacctacccaaagggcaagcaacgcatgttttgcgtcatacctttgcggcgcacttcatgatcaatggggggaatattttgacgttaaataaaatattaggacattccaaaattgagcagactatgacttatgcgcatttttctcccgatcatcttagcgacgctattcacctcaatccttttagttcgggcatccacatttcatccactaaagtggtgaataatggctaa

SEQ ID NO: 184603 - DNA, 651 bp, Klebsiella oxytoca; identical to SEQ ID NO: 179309

SEQ ID NO: 184604 - DNA, 243 bp, Klebsiella oxytoca; identical to SEQ ID NO: 162121

SEQ ID NO: 184605 - DNA, 864 bp, Klebsiella oxytoca
gtgactgacgttcagaccctgttcacccattaccggcaggtcaaaaacccgaatccggtgttcacgccgcgtgaaggcaagaaaacgctgccgttctgtcgtaagctgatggcgaaagccgaaggcttcacgtcccgttttgatttttccgtccatgtggcgttcgtgcgttcgctgggtaagcgccatcgtatgcccccgctgctgcgccggcgtgccattgatgcgctgctgcagggactgtgcttccactatgacccgctggccaaccgtgtgcagcgctccatcaccaatctggccatcgagtgcggtctggccacggaatcgaaaaccggcaatctgtccatcacccgcgccacgcgggcgctgaagtttatggcggagctggggctgattacgtaccaggccgaatatgacccgcagattggctgcaacatcccgaccgatatcaccttcacgcctgcactgttctccgcgctcgacgtctctgacgtggcggtgctggctgcgcgtcgcagccgcgtggagtgggaaaatcagcagcgccagaagcagaggctgaagccgctggagatggacgagctgatagcgaaagcctggcggtttgtgcgcgaacggttccgcagctaccagtccgaacgtaaacaacatggcctgaaacgcgcccgtgcacgccgtgacgcggacagaacccgtcaggacattgttaccctggtgaagcagcagctgacgcgtgagtacgccaccgggcgctttaccggggggctcgatgccatgaagcgcgagctggagcgtcgcgtgaaagagcgcatgctgatgtcgcgggggaacaactacacgcggctggccaccgtccccatataa

SEQ ID NO: 184606 - DNA, 180 bp, Klebsiella oxytoca
atgactattacgactgtcggtatcgatcttgctaaaaatgtgttcgctgtccacggtgttgaccagaatgggaaaactgttctgattaagcctaaagtatcgcgtagcgcacttcctgagctgatagcgggtttgccaacttgtgttatcgggatggaggcatgttctggagcacattaa

SEQ ID NO: 184607 - DNA, 204 bp, Klebsiella oxytoca
atgcagaacccccttatgattgatgaaattctggcacttgcccggcttgccaccctggcatttgagaagcccttaaaatatatggatgacacagatgctgaagttatggctcgttttaaaaaaacgatgacccctgggcttattgagcagatgtgcattcggatccttgagcttgaagcgaaacgtcagagcgcaaacgaataa

SEQ ID NO: 184608 - DNA, 1200 bp, Klebsiella oxytoca; identical to SEQ ID NO: 157211

SEQ ID NO: 184609 - DNA, 417 bp, Klebsiella oxytoca; identical to SEQ ID NO: 157212

SEQ ID NO: 184610 - DNA, 1539 bp, Klebsiella oxytoca; identical to SEQ ID NO: 157213

SEQ ID NO: 184611 - DNA, 1521 bp, Klebsiella oxytoca; identical to SEQ ID NO: 157214

SEQ ID NO: 184612 - DNA, 2310 bp, Klebsiella oxytoca; identical to SEQ ID NO: 157215

SEQ ID NO: 184613 - DNA, 306 bp, Klebsiella oxytoca
atgcggctcaatgctctgttccctaatcttccaccaggcaccctggtggtgaatctgatgggcggatttatcatcggtatggcactggccttctttgtccggcagccaaaccttgatcctgcatggaagtttttcctcactactggtttatgtggtggtatgaccactttttccaccttttctgctgaggtggtggcattacttcagaatggtaattatgcatgggctgtcatttccgtactgacgcacgtaacaggctcgcttctgatgactgccgcaggtttttttgtaatgactctgttctaa

SEQ ID NO: 184614 - DNA, 231 bp, Klebsiella oxytoca; identical to SEQ ID NO: 157216

SEQ ID NO: 184615 - DNA, 138 bp, Klebsiella oxytoca; identical to SEQ ID NO: 157217

SEQ ID NO: 184616 - DNA, 1287 bp, Klebsiella oxytoca
atgagctttgaaattgaacgtatcgtcgcaagagaaattctggattcccgtggtaacccgaccgtagaggttgaagtgacttctgtgggaggcggtatggcacgtgcctctgttccttccggagccagcaccggatcccgtgaagccattgagcatcgcgatggcgacaagacccgttttggtggtaaaggcgtacaggatgcggtccgctgcatcaatactgaaattaacgatgccctgcagggatacgacgttcgtcgccagaaagagattgatagctgcctgatagcccttgatggtaccgataacaaaggtcggctgggtgccaatgcgatacttggcgtgtcacttgcagtatcccgtctcgcggcacagctctcctctacccctctctaccgctatctgggcggagtgggcgcgaatctgctgccggttccctgtatgaatatcattaacggcggggttcatgcccgctggcagggcgctgattttcaggaatttatgattgctccatggggagcgtcttctgtacgtgaagctattcgctggggcagcgaggtttatcaggctctgcgtcaggtcctgctggaaaaagggttatccaccggagtgggcgatgaaggtggttttgcgccagcagtttcctcaaaccgccagccgctggagttcatcgtggaggcgattggcaaggcgggataccgcccgggtgaagatatcgtgatttgtatggatcctgcctccagcgagttctatgccgatggaaaatataccctgcgtaccgaaaacgcccagctcagccccgaagaaatgactcgttactatgagcaactggtcaaggattttccgatagtccttattgaggatggcctggcggaagatgactgggctggctggcagatactgcaccgagcgctcggcgataaagttgaactggttggtgatgatatctttgtgaccaacgtgaaatatatccagcggggtattgatgagaacctggctaatgctgcgttaatcaaactgaaccagataggcaccctgagtgaaaccatcgaagccgtccagttgtgtaaggataacaactggggaacctttatttcacaccggagcggggaaaccgcagacagcttcattgcggatatgaccgtcggcctgcgagccggtcatctgaaaacaggtgcaccctgccgcggggagcgaattgagaaatacaatcaactgatgcgtatcgaagatgaattaggtgatgccgccatctttgccggtaaatctgccttcaaaaaacactga

SEQ ID NO: 184617 - DNA, 429 bp, Klebsiella oxytoca
atgcaaatttaccggcatgccttgttacttgtacagaatgaaacagacggcctgctgttgcttgagcaggcagaacgtctggcaaaagagatgggtacccgtattactgtcggtcatctcagcgctgactaccgggaactcgattacaccagtgattcattgaccaaagatcgccagtcccgcgaagttattgatgcaaaagcaatgctcagccatctggtggagtccagtaatattgatatcaaagtcagggccatcgtcagcattcatcgtttcagggacgttgaaaacgttgtcaagcacgaagatatcgatctggtcatgttggggcataaaaaccgcctgttcggggttttttcctccttctccttcgaatttatcaatcatctttctgttgatgttctgattaaacatattccagccccttaa

SEQ ID NO: 184618 - DNA, 963 bp, Klebsiella oxytoca; identical to SEQ ID NO: 157218

SEQ ID NO: 184619 - DNA, 255 bp, Klebsiella oxytoca; identical to SEQ ID NO: 157219

SEQ ID NO: 184620 - DNA, 1374 bp, Klebsiella oxytoca; identical to SEQ ID NO: 157220

SEQ ID NO: 184621 - DNA, 390 bp, Klebsiella oxytoca; identical to SEQ ID NO: 157221

SEQ ID NO: 184622 - DNA, 411 bp, Klebsiella oxytoca; identical to SEQ ID NO: 157222

SEQ ID NO: 184623 - DNA, 231 bp, Klebsiella oxytoca; identical to SEQ ID NO: 157223

SEQ ID NO: 184624 - DNA, 822 bp, Klebsiella oxytoca
atggaaatcatgaaagacatgatgattgatattgaagctgaacgatttaatgagtggcttaaggaaaattacccggatgttattcccaactctgaagaatgggagcaggccgcgaacctgtattactgggagcaggaggcacttgctgatcaggctcagtgggatcatgaacacgggctcttcgaggtttccctgaacgatgttcaccagcgttaccggcacgcaagacaggagctgaagaagctatatgccctgctcgatagagagcagcctgaacttgtgtacaggatgtctttcgtccatgccgtgactgtcatggaagcatacctgatgtactgtgccaggtctctgctggaacatgactggcctcttaaacgcttccgggatgcatattacctgaagtccgaacgcgtcaaaaaaaacgaaaagcagtcagtgcgtgagatggaacttgatatgttcaggccctccgcacgcaattatgtttcccgaatgacgtttcataacgttaaaaccattgagcgctatttcagcgcagtgctgcatactccgcccgtctggccggttaagccgctgggcattattgcagactggagaaacgacctagtgcaccgtaacggggtggatgaacatgatgtgccaagagatatatcagcgcagcagctacagaatgctcttctgagagtgtctgaccttatagaggcagcacacagatccctgtgccaggaggtggactatttcggaaactggcgtagtgaggaaaaccgggaaattattgcttcggcgctgaacatatcaacagacagcgatgtatctcgatga

SEQ ID NO: 184625 - DNA, 627 bp, Klebsiella oxytoca
atgataatagtattgggtagtcaaaagggtggggttggtaaaagtacactggcggtatctatagctgcgtatctgatgtcactgggcaatcgagtgattattgtcgacgcagatgaccagaaatctgtattgacctggtacaacaatcgtcctgaagatcttccccatattccggttactggtgcaacaggcaacatcaaagccatgctaaaggaacacgagaaatcttatgactttgtcatcgcagactgtgctggccgcgacagtgcagaaatgcgtagtggattgatggccgctgacgtattcatttctccgttacggccttctcagatggacctggatgtagtgcctcatacatgctctgtttttacagcagcaaaagattttaatgaggacgtccggggatatctcgttttaaacatgacgcccacgaacatgtttgtcaatgaagcaaatcaggcagctgaagtactcaaggattatcctgaaatgcggctggctaactcccgagtttgtgatcgaaaagcgcatcgagatgcctgggcagaatcaatgacaatttttgaaacgcaaaatgacaaagcacaacaagaaatcgaatcgttagttaaagaggttattctgtga

SEQ ID NO: 184626 - DNA, 876 bp, Klebsiella oxytoca
atgaatgagaatgtttatatcggcgaggttataggtccagattgtgaaagtgttaacaataaactcaccgtcacaagtaaggccacagttcagcctgtagccctgatgagattaaatgtttttgttccttcaagcaggcctgcaaagggcaccagaacatcaatcgatgcgacctctgtactcaaggatttggaattctcaaggcgggagggttacgacgatattcgtataaccggtgaacggttgagtatggccatcgacttcaaggtatgggtcggtatcatagaagctttcagtaagtacggtttaaaaaccaacagcattaagcttacttttcatgagtttgccggaatgtgccgctttgagtctaagagattcgattcccgtcttagaaaaagtatttcagaagctttgaccaggatacgtggcaagaccattacctttacccgtagcgactcagagggccttcaaaaagtttccgtaacaggtttgcttaagacaggtgaacttgattttgcaaacgaccaggtggaacttgaagcggatcagcgactatgggaactctaccaaactgattacactgttctgctacgacataagccgataaacgctttaacccgaaaggaagcagctcaggccctgtatactttcatcgaaagcctgcctacgaacccagtccccatatctttcaaacgaatacgagacaggctctcattgctctctccggtaaaggaacagaaccgtatcattaaactggcccttaagcagttgcaggatattgggtaccttgaccacagcatcaccaaaaaaggtaaagagactttcattctgatccacagtcgctcagcaaatctgaaaccaggaacagctgtataa

SEQ ID NO: 184627 - DNA, 222 bp, Klebsiella oxytoca
atgaccgtaaaagctttcagcgcccgtctggcgcagtacccggaagacgaactgtgctgcggcacgttctggctggctgatgattttctctcactcgacgactcgctcacggagggtgacatcgaggcggcgatggagcgtgcgcaggacagccatgatgcgaatgacggcttcaactggtgccacctgcaggcggcaatcgacgaggtgaaacgagcatga

SEQ ID NO: 184628 - DNA, 336 bp, Klebsiella oxytoca
atgaacaactggctgatcggtatgagtgtcgatgtcgatgacgtcgaaattatggtcaactttattgtctgtgcgcccgacctggaacatgccgaagcgggtattcaggcaatgggtcgtacctggtggccagcattaagccgggaggacgacggacaccgctggcagtacctgcagggtgtcgtctggttcaacagcatcgtcctgctcgatgacgtggaaaacagcatcctgcgtggcctcagatttcttgatgcgtgggtgatttccggcacacccgatgcaccggtcatcatggatgagtacggaaatgactggcgggatatcacacgctga

SEQ ID NO: 184629 - DNA, 258 bp, Klebsiella oxytoca
atgtttacgatagagaaagaagttgcggttaatcaggtgacggcggatggaattgcggttggaacggcaacgctcaaagtcaccctgacatacaccatcgagaggatcgagcttgaaggggcgaacggtatcgctttttacacggttacatctgacgctgatgctgagggtgcgaggaattacatcccattcacctattcaggaagtggcgatccgctgcctgaggccgaggcagcgctaaagttaagagttaaatga

SEQ ID NO: 184630 - DNA, 2544 bp, Klebsiella oxytoca
atgcccgcgactcctcaagaccgtctttatggactgaccacgagtgttgctgtaaagccaccggtctatatttcagctgattatgatatcacccgttttggcgagcagactattacgtccaaaacgccaacggatgagcggacgatcactaccacagaagggatgcgtgttctgcttttagggcaggataaccccgtcgaaaacggtatctgggttgcgcgccgttcgttctgggtcagggcgacggattttaacggaccccgggacgcggtcaacggtacgctggttttctcgattaatggtgactgctggcaggtagaagctgatgatcccgtagtcatcggtaagtctgctattcacttccggccaacttacccgtttgaagcaaatctggacatactccagcgtacgttacgagtccctgaagcctcggtaaatgttttgccttcagcagaggaccgggcatggaaggggttgggctttgatggtgccgggcagccaaaactgcaggatcctgcgggaactggcttatgggggtatgttccggcaattggctcgtttgaaaaaggttcgctactcactcaacgctttgaggttcttctgtgggaatccacggatgaatactggcgctgggatggggcaatgccgaagatcgttttaccaggtagcacaccggatacggctggcggacggggtaaaggaaagtggctggatgtcaccgatgcgactcttcgctcaaacctgggttcaggcgacggcgctaaactcgttggtggaataggatttgtgtccccggaaatgtttggctatttacatggagtaacgccagatgctacaccatttttgcaaatggctattgatgccgggcatgcaaatgggattccagttcggttgagtggggtgtactatactactaccgctccggttatagcccctcttcctggagatgatggaactgcatatcccggatgggtatctgctggaactgatgctaatatttcagcagaatcatccaacacactatatgcagcactaaggatatatggtgattctgttataattggaacgggatctagtagtactaggatcgtaggtccatgggacgctaacaaccctgttatcaataatagtcaacatgttggtctttatattcaatcattaaatcctatcgatggctatgtacgtcataagatatcaggattgactatacagggttacttcattggaagatattgctcaaacattctcaatcactcttttgaagacgacttgattattttggcttgctgttttcctggtattttccttggggctgatgcggttaaaaacggttttgtaacctccagggattgctgggctgcagaagtttatggaggatggtggactaacagaaatgctgctattactactccatatctaccaccgtaccctgctgaagaaatttttaaggtcggttgggttgactctctacgttacgaaaaatttgcctattacggtcgtcagaggatattcggtgcgacggataatgaaatagatacatggtttgatacttatatttataagtcttctaattcggcaacggcatcttctggtgggcgtagaactaataacactgcttcaggatattctacgcgagtgatgaaaggggtttctaatcgcgcatttatggttctaagcagatatggaaggcaggtaaactctgtaacaattgatgaattcaagagtctgtgcacatctcgcgtgccaatttatactgacgcaggggctaaaaataatgttcttttggcatacgttgaacgtgctggtttagtggacacaactgtttcaacaactagcggcaatgaattctatgttaactatacagatccatttgatccatcatatgcagtaccaccggcaatggtatgccagggttcagttgtagttgacagggtagttgtgtctgcaggagttgcaactaatccatataatgaaagtgttaatgagttatcaggaccgcgcagaattagaacattcagccgtgataataatagctataatctcttggagcttagcgaatggaactcggttttaaatcaggttctttatcgctatagttttgatcgcgaggccagcgtccagaggccaatacatttctttgacccaacacaagaattatttcaatatcttgctggtacatggactccggtagttaaatgtggtgcagaaactgtaacaggtagtgtttccaccggggtatataagagagcgggaaacttggttcatgccacattcaggtttgaaacaacgactatgtctcttactactggtggcaatgttgtgatttcaggacttccatttacagcagcagcacttagtagtggtgggttatcaatatcacctgtaatttgcagtcgcgcaggctctgccatattgcttgcgcaaacgaacccgacaacaaaagatattctgttgctgacaaacagttcgcctgccgcgttctcaataactggtggaactggtttaactatttacggttcagttcagtatgttcttacagaataa

SEQ ID NO: 184631 - DNA, 621 bp, Klebsiella oxytoca
atggcagatccattctccgcaggaataacggggttgagctcaattttaggcggcggtgctgcggccaccactgggaccgcagcagccacaggcgcagctgcaacttccggagctggcgcagcaaccacaggctctggattgatgtcctcgattgctggtgccggaaccatgaaaaatctcgctggaggtgcttcattgctcggcggaattcttggtgctggtggggcgtccagtgaagcaaaacagcaatcagcgcagttacgacaacaggcagggcaactccgaacgcaggctaacaacgtcaatgcctcgacgcaactggaggcaagggctgaaactgataaggcgcgacaggcagaatcaacatcactggcgaatgcggcagcttctggtgcaaatgccaatagcgtgtcagctatcaataaccgcgctgacatcgcgcagcagggcgagctgaataacctgaccgctctctggaatggtgaacagcaggctaatcagttaaaaaatcaggctaacgccctggatgcgcaggccaaatcgactaaaaaagccggcgttttgggatcgcttacttccattcttggcgctggaacatctctctataaaatttacggataa

SEQ ID NO: 184632 - DNA, 276 bp, Klebsiella oxytoca
atgaaatttggagaagctcttgaggcagttaaatctggcgcgaagatttatcgcgaaggctggaacgggaaaggtcagtttgtcattaaggcaggtggatacaccgtcagcgaacctcgccccggcagcgattatgcaaaggcggggatcactggcgagtttaccattgcgccacacctcgacctgaagaacgcacaaggcattatgcagcctggctgggctccgtcgcagggcgatttgttcgctgatgattggttggccgagccagtagcgtag

SEQ ID NO: 184633 - DNA, 171 bp, Klebsiella oxytoca
atgaaagttctgaaaagttggttggctaataatgaaacctctcactacgaatggttatttgttatgttgatcattctgttatttgtttgcaattcgccccacgcttcgctcctggggcttttttttgcaaaaaatctacttcaggcactgtgtgcggatgtagtcctgtag

SEQ ID NO: 184634 - DNA, 462 bp, Klebsiella oxytoca
atgagccgcttaaccgccattatcagcgcagtggttatctgcctgattgtttgccttgggtggttggctaaccactaccacaccaacgctacccaattcaaagagcagcgcgataaagccactgaaaatctcagtctggctaacgccaccatcaccgacatgcagacccgccagcgtgatgtcgctgcgctggatgccaaatacaccggagaactggctgatgcgaaagaaaccattgagcgtttgcatagcgatgtcattgctggccgtaagcggctgcagctcaacgcaaaatgtccctcgaacggagcgaccagcaccggcggcgtgggcgatgcttccggcccccgacttactgactccgctgagcgggattatttcaccctcagagaacgaatcagcagcatcaccgggcaagtgagctacctacaggactacatccgcacacagtgcctgaagtag

SEQ ID NO: 184635 - DNA, 489 bp, Klebsiella oxytoca
atgcctccagcactacgtaaaagcgttatcgctgcaattggcggcggtgccattgctgtcgctacagccatgctgtccggcaaggatggactggaagggcgtgaatatgtcccgtatcgcgatgttgttggtgttctcacggtatgcgacggccataccggaagagatattatccccgggaagcgctacaccgataaagaatgtgacgccctgaccactgccgaccttaaacgcatcgcctctcaggtcgatccgtatatcaaggtgccaaccaccgaaactcaacgcgcagctatttactcatttgcttacaacgtaggcgctacagcaaccatcaaatccacgctgctgaaaaagttgaatgcccgtgactatggcggtgcctgtacagagttaaagcgctgggtatatgccggcggccagaagtggaaagggctaattaatcggcgtgatgttgagtatcaggtatgcacctggagccaaaaatga

SEQ ID NO: 184636 - DNA, 216 bp, Klebsiella oxytoca
atgtacagaatggacaaactcactacaggcattgcctacggttcatccgcaggtagcgcggggttctggatgctacagctactcgacaaagtatccccatcccagtgggctgccatcggcgttcttgggagtctggtattcggcttccttacctacctgacaaatttgtatttcaaaattaaagaagaccggcgtaaagccgcaaggggtgaataa

SEQ ID NO: 184637 - DNA, 495 bp, Klebsiella oxytoca
atgctgatccgtgaccgttcaaacatggaggctgcaatgaatcttacacttcgcgatttggtagaaaagagaaaattggttacagacgcggcatggaagcgtcaggagtttttgcagttaaaggcgcatcagcttattggcgaatataaagagtcactggccctgactgacggtgatgaaaaggttgtccagacgggtatcattggcccagagagaaaattcgaagcatgccggtatccacagctggcaactaatgatgaccatgagttatttttcgtcatcagaacagacctttctgattcatccggcgacaaacactggtgtgatacacacgtaaaaatgtggaagatcagggacaatcttcatgtaagcgttgaagactccagtagcgacatcatcattatccggggtgagcctgaaggttgtttcggtgaggcagtagccgcaataaaagaaagcatcgtaagaacattcgtttctgcaatgcctgattga

SEQ ID NO: 184638 - DNA, 822 bp, Klebsiella oxytoca
gtgaatcttgaaaacacagtgaaataccacttcgcgaaatctacgctgattagcgattctccgcgtgctaccgcctctgattcactgaccggcaccgatattatggcggcaatgggtatgacgcaggagcgcgctgcaatggggtacagcgcctttctcggaaagatgggtatcagcaataatgatcgggaaagagcgatcgatctgctggctgaatacgcattaacccggtgcgataaagtagctgcgctgcgcaaactcacaccaaacgtaaaaccccgggttatccggatactcgcagagttcgcctttgaagattactcccgcagcgcttccagtaaaaaaacatgtgactgctgcaatggggctggattcatcgatgcagagatattcaccaacaaagtaacgtatccggacggcaagccgcccaagtgggtcaaagttactaaggggatctatccatcatactgggaggagttgaagtcggtccgggagcaggttcgggtgctctgccaaaagtgccagggaaaagggaccgttagtgccgcctgtaacgattgccacggccggggccaggtagtgaaccaggacgagacggagaaacagggcgtgcctgtcatgggtaactgtaaacgctgtggcgggcgcggttatgagcggatcctctccactactgtgcacagtgccatttgccagataactgacgccatcaccctggatacctggaagaagtcggttaagccgttcttcgacgtgctgatcactaaattcgatatagaggaggcatgggcagaggcacaactcaaacaaataacgcgctga

SEQ ID NO: 184639 - DNA, 612 bp, Klebsiella oxytoca
atgcctgccattctgaaaaagaaaccacgccgtaaatgtaccgtgtgccgggaatggttcaatccagtccgtgacggtcaatttgtctgttcattcgaatgtgccagcgcccacggcaaagccgcgaacgatgccgccaaggccgccgctcagttgaagatcaaacagcagcagaacaaggcagcgaagaatgaacgcaagcgccaggcagaacgccgaatggctgtgaagccgcttagctacttcatcaagcaggctcagcaggcatttaacgatttcattcgataccgggatcggcatctggtgtgcatcagttgtgaccgtcaccatgacggccagtatcacgcggggcacttccgcacgaccggggccaacccggaactgcgcttcgatgaggataactgtcataaacagtgctccgtctgcaataaccacctgtccggaaaccttaccgcatatcgacctgcgcttatcgcaaaaatcggccaggcgcgttttgacgccctgatgggtcctcacgtattacctaaatggagcagggatgactatatcaggatccgagacgaataccgggtgaaactccgcgacctaaaaaagcaggaggtcgcgtga

SEQ ID NO: 184640 - DNA, 885 bp, Klebsiella oxytoca
atgggtattgttgaagcagagctggctccgttcctggctggcaatggcggcagcgagtaccaggctaaaccacacccgctcgataaacccgctcacaccatcatgaaagaatcgcgcgcctgtgtcgtcgctccggttatcgcccggcagttcggcgccagcatcggacaccgtgccgacgaacctagcgcaacaatcaccgcgggcggcggcggtaaatcgcaactggtatccgcattcctggcgaaacactatggcgggaattatcagggcgccgctattgacttggatgaaccagctcattcagttactaccgtcgatcatcatgcgctggttactgctcagattgttggtgttggcggtcgcgctgggcagagcaggccacgtgacgttagcgagccattgcaaaccttgactacaaaggctgatgccgcaatggttacgtctcatctgatcaagctccgtggtacatgccgcgatggccagcgcactgacgagccgatgccgactatcaccgctggcggccagcacgtcggggaagttgagaccactctcgctgttgagcattacgacgagcagcgcgcgcaacaggtgttagcgttccttaaagagtattgcggagccgatagcaccgggctggtggaaatcgccggggtaacttaccgcatcgttgatatcggcatgcgtatgcttcagccacatgagctgtaccgcgcgcagggcttcccggagtggtacatcatcgaccaggattaccgcggcgtgaaatatgcgaaggataagcaggtcgcgcgctgtggcaatgccgtcccgccgccgttcgctgaggctctggtaagggctaatttgcctgagttatgtcagcaaaaagaaatggccgcttaa

SEQ ID NO: 184641 - DNA, 744 bp, Klebsiella oxytoca
atgaccaataaccagttaaccgacgaacgcatctcagatatcagcgattattttattgagatgcaagaccattacagtgacccggcggacagagaaaacttcgaaatttttcgtgatgctgaattgctgatgaaagagttacaggaacgccgcaaagccgagagggacagcgagccggtggcgtggagcaacggatgcaacaaatctgttcctgcagccctgagatacctggctgaaaaaccgcggacaataggcggagaatcgtcgtttaatacagcacatctgtaccagctggcacgagaaatagagtttatggctgaagcgccgctctatcgccacgcgcagcagccggtagtgccggaggaaaaaccaatgccaaatacactgagcatgtacgccgttgatgcagtagctgccatcgccgaggtgaagggctggaacgcctgccgcgccgccatgctgcaggaactccagaaaagtgcaggagctgaagaaatctgcaggagcagcgaaaatgagcaggacatgcaggacatgcaggctggcaactctccggtaattccggatggttggcaggtcgaagcggaaaaactggctgaaatgcacggcatgagtttcgttttattcagacacggagaggctccccaatgtgcagaccccacaaaagtggttatttcattcactgataaaggtctggggcacgatatgctgccagccgccccgcaggaggtgaaaggtgagtga

SEQ ID NO: 184642 - DNA, 270 bp, Klebsiella oxytoca
atgagcaagtcatacatcgtgattctgcaatacctgtggtgcaacgaaactggcggaggcattgaatacacctctgactgcgtcaaatttgataagcgcgatgaggctatcaggcacggatttaagctgcgtgaaagcgacgatttcaacatcggagttatcgaggacggcaagttgatttcgtttgactggatggataagccggttggtgaaagcgaagacacgctggcacagattgccgagctaattggtctggaggatgccgcatga

SEQ ID NO: 184643 - DNA, 336 bp, Klebsiella oxytoca
atggctagagcattatcagcagcagagcgccgtgagtacgtcagtgccgtgattcgtatcactaagcatcaggggcgcctgacgaccaccgaagcaatgaaaaaactgggcctgagccgcgataccgtcctgaagtatttccgcgatgcggccgccagcggtgaggttgtacgtcacgggcgatcggggttattccgcgaccagcgcgccattatcgactttgacatgaaacggtatggactggcgccaaaggcagcgatcgggatgaatcacaacttgctgggcggttccgtttttcagcgttttttggatgttcaggaggctatgcatgaataa

SEQ ID NO: 184644 - DNA, 261 bp, Klebsiella oxytoca
atgaatcacatcgaattcattgagaagaatatccgcgaggaactgcttcgccagggcttcacgcaggcagtggctcaggggggggcataccaggcggtcgatatgtacaagcggatgtcacaggcaagccgaaaagggggaatgtttgacgatgttatgcgacacgcaaagttatgggcagagaagcaggccagcgcagctgagcgacgggaagcaaagcgcaccgtgcgaaagggcagcaatcaggctgggttgttctga

SEQ ID NO: 184645 - DNA, 225 bp, Klebsiella oxytoca
atggggctgggtatgaatatggaacgggatgaactactggaagaccgggcagcttttatcgctggtgaaatcggcggggctgtcgttgagctgataatcgacggtgcgaaaattgaccgtgacgctattgtagaacggctggaggccaagcgacgcagcgtaggcaacgtcattcataaagggctgctgcgtgatgctgcggagttcgcgaggaaggggcattaa

SEQ ID NO: 184646 - DNA, 363 bp, Klebsiella oxytoca
atgaaaatctacgatatcacgcctatcggcaaacccagaatgaccagagctgataagtggaaacagcgtccggcggtaatgcgttaccgtgcgttctgtgatgaagctcgtttgcgcaaaattcacctgcctgagtccggcgctcacgtcacgttcgttatgcctatgccacaaagctggagccaaaagaaacgcgcagcgacgaacaataagcctcaccagcagaagccggacaccgacaacatgattaaagctctgatggatgctctctatgacgatgattcacacgtatgggattgccacatcaccaaaatctgggcgagaaagggcagatcattatcgaggaaggaaagtgaaacctga

SEQ ID NO: 184647 - DNA, 414 bp, Klebsiella oxytoca
gtggaccctagaataaaaatgcagcgaattggtcaaacaatgtacggaaatcgttggaaatcatcattatctcgggggatgagcgtagatccaaaaaccatacatcgcttattatctggagagcgctatttccccaaagatctctcatcaaagttgttacaagccatacagctggaacagtccaaaatcaacaaagccatggaaattatcacctccgatagaatatgtagggatgacataactgaagatgtgattaaatacattgcatctcgatttgaatacttatctgagaaagattacaaatccgctattaacagcatacatcgtgccgtacatgataccgtgccaaatgatatttacctctctgatctggaggctatcgctctgaggtattcaactatatcggtcgcatag

SEQ ID NO: 184648 - DNA, 627 bp, Klebsiella oxytoca
atggcgttaaaagacttttttgtacagacggaacctcgcagacggcgttatggcattgctttgttagttgggctaatttcgggtgtggtttcggcatttgtaaaatggggtgctgaagtccctcttccaccacgaagtcctgtcgatatgtttaccagcgcgtgtggacccgagtcactaattcgagcagttgaccaaatagattgctccaggaacttccttaacccaccatacatttttttacgcgattggctgggagtggctgaccctaatgcggctgtttacacttttgctgagcatgcatttaactgggtcggtgtgacacatatcatcttctccatcgttttcgctttaggatattgtgttgttgcagaagtgtttcctaagattaagttatggcaggggctactggctggtgcacttgcacagctgtttgtccatatgatttcattcccgctaatgggattaacaccaccactttttgatcttccttggtacgaaaacgtttcagagatatttggtcacttagtatggttttggtctattgagataatccgaagggatcttcgaaacaggattacgcatgaacctgatgcagaggtttctctgaattcaccgttcagataa

SEQ ID NO: 184649 - DNA, 312 bp, Klebsiella oxytoca
atggctaaacgtatgcaagacaaagagagcattgccgggatgtcctggctggttctgctgatcattgcttgctggggtggacttgtccgctacctgatagatgtgaagcagagcaaggcaacatggagcttgatcaatgctcttgcccaaatggtggtttcagggtttaccggcgttattgctggcctggtgagcattgaaagcggactgagcatttacatgatactggccacttccggaataagtggggcaatgggttctgtcgctttgacctatttctgggagcgcatcaccggagttaaggcaccatga

SEQ ID NO: 184650 - DNA, 585 bp, Klebsiella oxytoca
atggcagttgattatctttcttacgaaacactattagcagcaaaagatacggcgagatacacttactggatcatgattggcacgtggattgccgggatcgcaacttccttggcggtgataattactctgtatgtaacacttaatcaaaaacgagttaggttgcgcttcgatataagtgaaaaaattgtggttgggggattgtcacatttgattggaggcgatccaaaaggagtatctattcagataactaatgtctcggatattcctgttttgataaataagttagggcttagctgtaaaaagctaccatggcaagaagagatgtattggttcttgaaattagaccggcatccttacagtgactctcttccaaagcgactagagcagggggaggtatgcagtttatggcttcctctcgatgaacgagatgatgattggtatgcttatcttgctgacatcatctctaaggctggtaaacaaccggagcagatgagggtagtgatcactactagctatggaaagtcgccacgttttaagttttccccagaaatagttaaaaaacttaattctgctaagtcctggtaa

SEQ ID NO: 184651 - DNA, 294 bp, Klebsiella oxytoca
atggttcgaattgcttttgcaaagccaatcccccctctaggcgaagaagaattaggatcaatcaagcctggttgcaaggtgaaagtccaactgtctgatggatataaagggagactgaatgaaaccttagtaatggaagttaagagtagtgatgagagcatgctggaatgctgttttttataccgagaatcattaagccgatttgatgataaaaactggctaaacacatctccattcgatacctctactgtacagattagcaaagatatggttttcgccattgaccttgattaa

SEQ ID NO: 184652 - DNA, 1005 bp, Klebsiella oxytoca
atggcaaaaccggactggggcgagcttcagcaacggtacctgtccgatcatgccgcaaccggcgtatcaccgaaggattggtgtgaagcgcagggactgaattacgctactgcccgccgatacatcaagaaaccccctgcgcaagctgcgcaaaaaactgcgcagaagaaattgcgcactgcgcaaaaagaaaagtgcgcagaagagctggtggatggtgacggcctcaccaatcaacaacgtttatttgtcgccgaatacctgaaagacaataacgccacacaggcagctattcgcgctggctatagcaagaagaccgctgaacagattggctatcagttgcttcagaaaacttcagttgcgcaggccattgcgcagcagcagaaagcatccattgtgcgcacactcggaagtgccgatgaagtgcttgaacagatgtggcggctggcaacgttcgacgccaaccagctttctcagtatcgccgcgggagctgccgttactgctggggcttcggtcaccagtatcaatggcgcgatgccgtagagtacgaagagaaacgcctggaggctcttgagcgtaaacgccgagaacctttggatgatggcggatacggctacgaccacaccagtgcaccgaacccggaatgccctcgctgcaatggggatggcatcggccagcctttcttcgcggatacgcgtagactggcgccggatgctgcgcttgcctattccggtgtgaagcttggtaagaatggcgttgagataaccgccatcagccgtgagcgcatgtacgaggcggtgatgaagcgcctcggcctggccgatagcgagttcgcccagcgtctgcagcagatagaaattgagcgccggcagctggagatcgacaaactccgcaaagaactggccgctgacccggaggatgaggaaccaacgccagttgcaatcaatatcaacgtagtcgatgcgcgagtgagggaagaggatggcgatagctccgacgcttaa

SEQ ID NO: 184653 - DNA, 1305 bp, Klebsiella oxytoca
atggcgatagctccgacgcttaacatccctcaggccaaattccttgcgatgcagtacaagtttaaggcttacgtggccgggtttggttctggcaagacatgggttggttgcggcggtatctgcaaggggatgtgggaacaccctaaaatcaatcagggctactttgcaccaacgtatccgcagatccgcgacatcttttatcccacggttgaagaggtggcctatgactgggggctgaatgtcaaaatcaatgagggaaacaaagaggtccatttctacgccgggaagcagttccgtgggacgacgatatgccgctcgatggaaaagccacataccatcgttggtttcaaaattggtaatgccctgatagatgagctcgacgtgatgcccgccaaaaaggcgcagttagcctggcggaaaatcattgcgcgtatgcgttacaacgtgcccggtctgcgtaacggaatagacgtcaccacgacgcctgaaggctttaagtttgtttatcaacagttcgcaaaggctgtgcgcgataaaccttcgctctcaacactatacgggctggttcaggcctcaaccttcgacaacgaaaagaatctgccggcagactacattccatccctgatggagtcttatccgccggagttgattaaggcttatctgcgcggccagtttaccaacctgaccagcgggactatttaccatcagtttgaccgtcagctgaacaattgccaggaggaagagcagcccggcgaacctctgtacatcggtatggactttaacgtcggaaaaatggccggaattgttcatgtgctgcgccttgggcttccctgtgcagttacggaaatcattaaggcttacgacacaccggacattattcgcatcattaaagagcggttctggctgtatgacggccatgactaccggaaggtgagggaaatctatatttacccggacgcctctggtgattctcgtaaatcagctcatgccagcactacggatatcgcccagctcaaacaggctggcttcaatgtgattgtgaacgattcaaacccgccagtaaaagatcgtatcaattccatgaacgccatgttctgcaatggcaatggtgagcgtcgctacaaagtgaatgtaaagcgctgtccggtctacacggaatcgctcgagcagcaggtatggggtgaaaacggtgaacctgacaaaaaagccgataatgaccaccctaacgacgctggcggctacttcatcgtgaaacagttcccaatcatcaaaccaaccgggaaagtcaccaaactgcggatgtaa

SEQ ID NO: 184654 - DNA, 1407 bp, Klebsiella oxytoca
atgcctgatatttcaacacccaacctcgactataacgacatggttgaggcctgggatatcaacgatgcgctgatgggcggtacgctggaaatgcgccgacagggtcagttgtatcttccgaaatggcccaacgaagaccctgacagctacaaagaacgattagcagctgcaaccttgctgcctgcctatgaagaagcgattaaacagaacattggacgcgtatttgctgagccaacggtattgagcgaaagcgcgccggaaattatccgaaagctttctaccgacatcgatatggaaggaaaccgccttgatgtctgggcgcaacagtttttcagtatcggtttccagtacggccttgttcatgcgctggtggattacccgcgggtggatccggaatctgtaaggacaaaagcagatgaaaaagcgattggaagccggccatacgtaacgatgctaaatccccgtcaggtgatcggctggaagtcgaaagttgagggtggaaaggtcatccttactgatttgcgtattcgtgaaaccatcattattgacggtgatgactacgggcaaactaaggtagaacagatccggcatatcatgcctggtaaggttgaaatctatcggcgcaacaggggcgataatggtgaagcacaatggacgctacacgaagaatggcaaaccagccgtaacgatatcacgctggtgacgctctacacgaaacgcacaggatttatgcgcggatctccgccgctgcttaacctggctttgctgaatatcaagcactggcaaagtcagagtgagcaggacaacatcctgcatgttgcccgtgtgccgttgctggtggcttatggactggcagaaggtgaaacgttaacgatcggctcatcaacagcgactcgtttcgacaaccgcgaaaggcagggtcttgaatatgttgaacataccggatcggccattgaatctggtgaaacgtcgctggaaaaactggaagatcagatgcggcaggccggggcaaaactcttacgtgccgagaacacctcgacaaaatcagttgaccagaccaatgaagagcgcatgcaggagaattcgccgctgtacacgatggcgagttcactggaggacgcgctcgataacatcctgcagatcatggcggaatggctcggtgaaactgaggggggcaatgtcgatgtacggactgaactggatgtttctgctcagacgtttgatgcctcagctgcaacggctgttcagtcacttcggcagggtggtgatattcgccagattgatgcggttcgcgttcttcaggcgctgaaattcatcgacccggacgcgaaacctgaagaggtgatcgacgaactgaggaaccagcaggtgacgcttgtcggcggcctgaataatccaggtggttga

SEQ ID NO: 184655 - DNA, 1113 bp, Klebsiella oxytoca
atggcgacggcgaatgaaaaactcagtgacgaaagcctggctcatgcgatttgggtgagtcagtacagcaccggtgtcgcgaacaggatgataaaaatcctgaatgacagcgatgcagagcttacggccaggctgctggtggcgatggataccctcgatgcggaaagtttcacggtgtcgaggctagaatctcttctggtcagcgtcagggcgttaaatcgtgatgtggttcagtcaatgagcgaaagcctcgccggcgagctgcaggaactggcgcagcatgaggcaggatttcagctaagtctcttccagttcgcgatccccgatgatgtgctggcgcttcatccgctggtgggaatttcaccggacgccgtttatgccgcggcaatggctcggccttttcaggggcggttactgagcgagtgggccagtagccttgaagccgaccgcatgacgcgcatcaccaataccgtcaggcagggcttcctgctgggcgatacaacggaacaggttgcgcgaaaagttcgcggccacgctaaccgcggctaccaggatggcgcgctacagatgagccgcaccaatgctggtagcattgcaaaaacagcagtagggcatcttgcggcgacggcgaggaaaagttttgcggatgcgaacgacgaccttcttaagggtaagcagtggttgtccacattggataaccggacatcgaaagactgccgaattcgcgaccgtctcaaatacactctggcaaacaagccgatcggccataaggtgccatatctgcagggaccaggcaaaattcactggtgttgtcgaagcgtcgaaacctacatcctgaaatcgtctgatgagctcggtattgctataggacaaatatccgatagctcgcgcgccagcatgaacgggcaggtgtcggcagataccgattatcagggctggttctcgcgccagtcgttcacgcgacagtcccagattgttggcttaacgcgggccaggttgattcgtgatggcggcatgtctcctgatgaattctacaacgacaggggcgaatggctgacgctggaacaattgcgggaacgtgacgaccaggcattcagtgacgccggactttaa

SEQ ID NO: 184656 - DNA, 765 bp, Klebsiella oxytoca
atgaaactgaagacagttgaagtaaatggcaaacactatgcggaagttgatgcgaacagtctccctgtgtacgtccacgatgatggacaggagatcggctttgatgccgtgcaggcagtaggaaaaatttcctcactgaatggtgaggcaaaatctcatcgtgaagccaaagaagctgctgaagccagcctggctaaattcgccaaaattggcgatccggcgaaagcgctcgaagcgctggagatgatgaccaaaatcgaccagaaaaagctgatcgacgcgggtgccgttgaccaggtgaaagcggatatcaccaaatcattccagactcagcttgaagaggccacccaacgggcgacaacgctcgaaggtcagctctatcaggaaatgatcggcggccggttctctggctcaaaattcatcgcggataaagtggcaatcccggccgatatgctgcaagcgcgctttggtcagtccttcaaagtcgaggacggcaaagtcgttgcctatgatggctccggcaacaaaatttattcacgctctaaaccgggcgagctggcagcctttgatgaggcgctggagttcctggtggagcagtacccacagaaagaccacatccttaaggccagcggcaatcagggaggaggctctcgccagtctcagcattcactcgggcagaaaacgatgaaacgcgatgcgtttaccagtctgagcccgacagatcagcaatcaactctcaaagacggtatcaccatcgtcgattaa

SEQ ID NO: 184657 - DNA, 1137 bp, Klebsiella oxytoca
atggctaatacgcttaccgggttgatcccgactatcttcacggctctggataccgtatctcgcgaacaggtcggttttatcccggctgtatcgcgcaatgcgaaagctgatgcggccgcgaaggaccagactgttactgcgccggtcgcgccaccggcaaccactgttgatattaccccgggggctactgcgccaaatgatggcgaccagacgatcggcaccgttgatgtcaaaatcaccaaatccaaaatggccccggttaaatggaacggtgaggaacaactggcgctggggccagcagggacatacaacaccatccttgctgatcagtttaagcaggcttttcgcgcgctcgctaatgagatggatgcagatctcgcagctctgtacttcgcatcttctcgtgctgttggtacggccggcaccgctcctttcggtattgcaggtgatttgtctgatgcagcaaatgcgcgtcaggttctttctgacaacggttcgccgacaactgatctgcagatggttctcggttcttcggctatcgctaacctccgcggtaaacagtctgttctgttcaaagtaaacgagtccggtactgatgcgcttctgcgtgaaggtatagtggggcgactggaaggtttcaacatccacgaatccgcgcatgttaagaaacgcgctgcatccccggccgccggatacctggtgaatggtgcaaaagctgaaggcgaaatcctgattgcgattgataccgggacaggtgcttttgctgccggcgatatcgtgactttcgacggggataacaataactacctggttgctgcggcgactgccacgaccattactctggcttctccgggcttacgtcaggcgctggccgataataccgctattactgctggtggcgcctacaccgcaaacatggcgtttgatcgtaatgctttcctgttggcatcccgaactccggcaatgccgcagggtggcgataccgcagatgatgtgatgaacgttaccgacccggtatcgggcattacttatcaggtggcgctgtaccgtcagtaccgccaggtgcgttacgaagttggcctgtcatggggcgtagcggcagttaagtcggcgcactcagcgttgttgctgggctga

SEQ ID NO: 184658 - DNA, 270 bp, Klebsiella oxytoca
atggctggattaaccaaagagcagcgagctcaacgagcggcggaaaaatttgctgccgagctggctgagcagaacaattctcagcaggaccaggaccaggaccaggaccaggaccaggaccaggagcaggagcagaaccaggagcaggagcggaacctggtagtaatggtcacggattaccctgcttttcccggcgcaccgacaaccgccgatgtccaccctgaagaggttgagaactggaaagcgatcggctggaaagaaacggagtaa

SEQ ID NO: 184659 - DNA, 411 bp, Klebsiella oxytoca
atgctcaccttcataactgttgaagacgtcaattcgattctcggtgcctcctggacggatgaaagcaaaaaagccaaatctgtgctgatggctaatacttggatgaatggacttaacctgaaactgccatgcaataaggcaactcacgaaaccattattcctgacgatgtgaaacaggctggcgcctatgcggcgctgtcggcggcaaatggcgggctgtatcagcagaaaacagattctggggtgttactgagtaagacggtcgatgctgacgatgtatctgtttcaaagtcttttgcagagctcgccaccaacagctcggcgttacttgattccgaccttcagcttgcgcttgccatgcttaagccctatggcgttagtcagtcgcaagtgcggctggtgagggggtga

SEQ ID NO: 184660 - DNA, 255 bp, Klebsiella oxytoca
atgtccgatttgaaggtggtcccatttcaaaagccaagccatcacgacatcgataatgatcaggtaattcgcttactgaaacaggttctggagcgtgcagaaaaaggcggctgccatagcgtcgcagtgatactgcttgatgatgagggtaacgcgattgattgctggcataacggtgggcgcccctatgtgatggtaggcgctatggagtcgcttaaaaccgactttatccatgctcatattgagcggcggtaa

SEQ ID NO: 184661 - DNA, 282 bp, Klebsiella oxytoca
atgcaaaatccagatgtacattatgccggtgacgggcttggtcctcgcgatgtgtttgtgaatggaaacccgatccgccatgtcgtttatgcaaaccaggcgaaggggattgtggagttcgctcctctcccgctgcgggttaaacgcaacggtgagatctacaccaaaaaactgcgtggtagtgttctggtcctttttactggcggatatgtatctaacaatatccagcttcagctttttggtgaaaaaggcatagaggaggtaggccgtgggtatacgtga

SEQ ID NO: 184662 - DNA, 384 bp, Klebsiella oxytoca
gtgggtatacgtgacgagctacagactgaagtcgccgcggcattcgataccgatctgcaggatgcagttaacgagttcaccggtagttataaggttcgaagtgtctgggatccggtaactgaaaccggcagcgaaacgcaggtgacttacttggggcgcggagtgctggcgcgctgtaaactccgccgtatcgatggcgttaacattctgcatggtgacctgaaattaaccgccctggttaacgaagtaaccgataagccagcggttgggcactttgtcacggcgccggatccgataactggcgtacttcagcgttatgaggtcatcactgccgctgctgattctgccggtgctgcgtactccatccagttacggagggcgtga

SEQ ID NO: 184663 - DNA, 552 bp, Klebsiella oxytoca
atggctaagggatggagtatcgacccggcagcattcgtcgggctggtggctgaagatgtgagattgcgccagcgaaccatcgcaacacagctgcttaatgaaatcgtccagcgctcacctgttggcaacccggagctatgggctatcaacgctaccgcggttcagtacaacaaagcggtaggtgagtggaacgaatctctttatgccgaccctgcaaacctgaccaaaaccgggcgactcaggaagaaagtccgtgttaacgacagcatggatatccggcgcccggcggaataccgtgcgggtacgttccgggcatcccactttgtcagtattggcgaaccagatcactcagtaccgtctgagccagacccgcggggaacgatgacattcctcaatgggaaaaatatcatcaatcaggcgccggcctactcggtgatttacattcagtcaaacctcccttactccgtaccgctggagaatggccactctacgcaagcgccgacaggcgtctatgccgtctcatttaatggtgtgattcaggcctacaaatga

SEQ ID NO: 184664 - DNA, 393 bp, Klebsiella oxytoca
atgaccctcacagaaataagaaacgttgtcatcagacgaatgacgacgcagaccgctattgcccaggatgcggtggactacccaaacggtcctgtattcgaccccagcggtcgaaaaatctgggctcgtcttactgacatacccggacaagcaggtgctaacgaaattggagcggggccgactgtccaccgaacaggggttctcatcatccagcttttcgtccccgttggttcaggctctctgcagctgactaaggccgccgacaaattaacgcagctcttcgagtttcaggacgacggagcactgagttacttcgccgtatccgccatcccggcaggtgaaaccgatggctggtctcagctcaatcttcaaatcccttatcgcgctctgtag

SEQ ID NO: 184665 - DNA, 933 bp, Klebsiella oxytoca
gtgagttcaggcgcaaaagtagtaaccgcgtttatacgcgaagccactccgggtgttacacccacaactggggcgtggaatctgttaaggcgtgcatcatatggccttgctccgacccagaataccaacgataacgatgaaatcgccggcaaccgaatggcccagggcgtatcgcgcggcacgattgatgttggcggggatgtcggtaccaaatttcgctggaaccagcacgatgcttttctggcgagctgctttggtgcggaatgggtaaacaacgtgctgacgatgggcaacgggagtattacgttctccgtggcttccttcgctgaagacgtggggattgcgcagattgcccgcggatgccaggtatccacgctccagattgaaatcccgaatgatggcgatatcaccgccacggtcacttttgctggactggactgggaaacgaaagcggacgataccagcttttttactgcgccggtcgataatgccggggcgctccgctattcgttcaaagaggtaacagcccttagcctgaatggtgttgctggtggcaatggtttctgtgtagataccttcaacatccagttcgacaacaacatgcagactcagcgctgcatcggcaccggttcggcgttcgccggcgcaaacattcccaccacgtttacgccgtcaggtcaggtcactttgtcctggtcaaaagcagcctgggaaatctataagaagacgttcaccggtgaaacggtgccgttcagctttaccctggagaatgctgaaggtgcctatatcttcgaattcccggaagtgcagatttccggtgactggcccgatgcgggcagcaccgatattgtccaggttcagctcgatatcaccgcggccaatactccgccaaccattacccgcgttcctgccactactggcggtgatgattaa

SEQ ID NO: 184666 - DNA, 483 bp, Klebsiella oxytoca
atgctgattgttaccccaaaaattgatttagacggcgagcgctggttttacccctacaaaaagcccgaagacagcaaaaaggaattctcgccggaagaagaatcgctgttcaaacttcgcctgctggtggccagcagcgagaattcacaatatcgctcacggaacgcgttggtgcgccgccacatcgataagatggacgcaggctataaggtaggaaccaaagaatttaatctcgccagcgtgggcgatatcgactctgttgatgagctgctgatcgataacgtggcccggttcctgttgaaaggctgggagggggtgggccagctggtggatggcacagaggttgctctcgactataccccagaactcggggccgccatgttgaaacagcacccggagctgtactggctgatactggccgaggccgcaaacattgctcagggtaaagagcagcagactcaggaaaccgtaaaaaagccttag

SEQ ID NO: 184667 - DNA, 228 bp, Klebsiella oxytoca
gtgacgggggagatcctcaacgcttacgccatgatatctcgtggcaggcagtatgcaggaatggctggcgtgccgctcccgttgtccctgagtgatatcgagcgctatctggcctcacgttccattctgattgatcgtaccgagtttgacgctgcgatactggcactggatgatgcttggcgagatgcgtgggctaaatatcagcaggataacaataagggtacatga

SEQ ID NO: 184668 - DNA, 777 bp, Klebsiella oxytoca
atggcggcaggcatacctaaggaaaaatcagtagaactgatcgaaatgtatggagacatgctaaaggctggcgtttctatcgatgagatgtcctactggcgttcattgcgtgagttggaaaatgataactcttccgcttcggtaagcgctctgggtttgcttcatgctactgctggattcattgataaagcgaatcaggtttttacagatggggttgagaaattccatgatgcatcaattccggcgaaccatctgttcatgctcagagcgaccagaaatgagaatctggttaaagattttgcgtatgcatatgccgataagtaccaatcaaaaaaaatgacagtgtttgcctattcttatgcctatcgctacggtgataaggctgcattggataggtacatgagccaacacataaagttgctctctgatgaggagggaaggttattggctgaaaaacacaaagaagaattacttacggaactagatgatgcttatgtatcatctggttgcaccaaggagcaattccagcttcttgctgaaaccattgctaaagtggctaaagaatatgaggctaactatgggcacattgaagttagtaaaaaccataattgttgctatgttgttgatataaataacaaagaccccaaaacaattgcgaaaatgaactattctctggctgaagctgtctgtatggagccgttgttggataactgtaagcttatcggaaggttttcaccgataagagagctgcatacaggggtgagctatgtcggttaa

SEQ ID NO: 184669 - DNA, 1005 bp, Klebsiella oxytoca
atgctcgttttgtcactccctcgcatccctgctaatctgtgtgcaaatgttaatgatggggatagggatgtggacagcgacgattatgatgacccgctttttgaccaagctgttagctttgtaattgaaaaacggaaagcatccatcagcgggatgcagcggcagttcagaatcgggtatagccgtgcgtcgcggttagttgaacaaatggaggcgattggagtcgttagcgcccaagggaataacggaaaccgagaggtcatagcctcctcgcaattcgacattgacgctcttggcttggaagctcttaaagaggaaagggaaaggcggtaccaggaagaattatcaaggcaagccaaagttgcaaattcagttgatgaacaattaaggctttcagcaattacaaataggagaattgtaatttggctcaaagatacaggaaatatagcgccatcaggaaataaggtgctcatcctcaaatcttcatcaccttttgaatatttggcacagcaacagaaaaataaattaaagccaggagatgcagaatacagcgatatacttgatggatatcgtttttctgccaccatgcagatgcgaacacctaccagcgttctctgtcagcatggcaggatagagaagtttcctgcgcataaattacctcgtattgtaaagcaggagtggcaaggagtatggcttccgcacttaaaacctgccgcagaactgggagcatgggcaagggatgtcaacgggtctatggcttctgatgttggttatgttcctcaagatggtggagatttcttgagatttatgcttctggctcaccagattgtggaggatgggcttgatcgtgatgacgctttaagatggttggatgtctgcggtgatatggtcggtagcgatggcgagtctattggtaaattcatcgaacgctatgggaatacaccggagtcagcattattccgtatttcatccatgataaagaataatagggactcattaaaatga

SEQ ID NO: 184670 - DNA, 504 bp, Klebsiella oxytoca
atgataaagaaaactagatgcatatctttgattattatgtcagctatgtttattggtaatagttttgctgaggatgttgagatgatctccggatggggggtaaacaagcaaaaggacccgatgactgacaatattaatgttcttgttgcgttgcagtcggaaccatacaataaagccggaagtaaggcggggttagccgttaggtgctttaataataagacggaatttttaatatctgctgagggttattacgggcatccaacatccactgttatgatgagattcgataacgaaaaggcctcatcaaaccaatggactgtggctcaaggggggcgggcacttttttccatgaacccgatagacgaagccaagaagctcaccgaacataaaaggttgctcattagattccagccatacggaaaaggaaatattgatgcacaatttaaccttgatggggctgatttagcgatagataaagtgcgaaaaacatgctcatggccgtaa

SEQ ID NO: 184671 - DNA, 2592 bp, Klebsiella oxytoca
atgacagagcaaacatcccgcctcgcaattattctcgatagcttaggtgcaaaacgcaatgcagacagcctttctgattcgctaactaagctcacaacaaacggtgaaaaaaccgttgctgcggtcggtaaattaggtgcggctctaactgctgcagttgccactggcgcactcatggcaggaacagcactggctgcgatgattaagcacacagcagaggctggggtcgagattggtcgattgtcaaaaatagccaatgcatcgaccactgattttcagaaatatgccatagctgccagtgccgcggggatctcccaggagaagttctccgacataatgaaggatgttaacgataaggtcggtgacttcctgagcaccggcgggggtgagctccaagatttttttaagaccatagctccaaaggttggtgtgacggctgagcagtttaagaatctttcaggcccggcggcgatgcagttatatgttgataccctgcaaaaagccaatgtttcacaagcgcagatgaccttctacatggaggctattgccaacgatgccacggctttgatacctatgtttcagaatggtggcaaagcgatcagtgaaatggctgatatatcggagaggttgggccttattctagaccagaaaacaattcgtgcggcacaggaattggaaaccactggctggcttgtcaattcctcaatgcagggactaagaactcagattgctgcgggattaatgccaacgatcagcgatctaaccggcgaatttactgcgttcgctgcaaaaggaatagatgttacagccgtgtcgcaaacgctggatagttggcttaaaaatctggctaaggccgctgtaactgtcgctggcgcattcatgggcgtgacaaaggccatggggggaatggttgatttgtggaatggggttaaggatattgatctttcacaccctattgatgcctataaccaaatcaaagatattttaaccaatgtatcaggccaggtaaacggtgagttaggcaatatccagaaatgggtggatgaggcttggggaaaaattaataccgccggacaaaacggaggtaatgagttcataaagaacctcaccgatatgcgcaatcaaataagttttgcgcagggacatatcggaacattttctcctggggctggtagtaaaactaaagcctactctgaggaggcagggcagcgcctgcttaaccagattaatgagcaaactgcagcatttaatgcgcagttggatgccagcgataagttatccgcggttgcaatgcagcgcctgaagtttgaagagcagataaagaccattcaggagcgtcaagccaaaggactgccagtaaccaaagatcaacagtctctgtcgtttatgtccaaagagattgatgccgcatatgaacgactggagttaagccagaaggcgatggcaactctggacgactaccggaagatgcaggaagagatagcgccgaaggaactacggcagaatgagactttgcaaaaacgtcttgaaatcctgcaaaagatggttgaactcaaaaaactttcaccagaggacgccggaaagcaggcaaccgacctgattagtaaatcaattctgccagattccgtcatatcaggcgttaacaaggccggtggaacgctgacttcaagtgcgactaacagcgacctggcagggcaaggcctgaacatgatagggctgcaaatcgatccgcagcttgaaatcattgagaagttaaaacttgcccagactgattatgcggcctggctgaatcagcagcagcaggcgataacgcagaacacagtcctgaacgagcagcagaagcagcaacaactcctggccttgcagcaacagggccagcagaatcaggaggcgttaagcacggctgtctacgttgcgcagatgcagtccgctcaaaactccttctccggcatcaccgattcgatggggactatgtttggtgagcagtccgcgatgtataaagccgcttttgtgacgcaaaaggcattcgctatcgctcaggcagccctgcagcttcctatggcgatggggcaggcgatggctggcttgccgttcccggctaaccttgcagctgtcgctcaggttatcgggctcatggcctccattacttccagcatcaccagtgccgctgctgttggcttcgcctctggcggttataccggccccggcggtaagtatcagcccgcgggtattgttcacaaaggtgaatatgtctttgaccaggcatcaacgaaccgaatcggcgtgtctcagcttgaggcgcttcggaatggtaaaccgcttgatgcaacgctcagcaaaccggggttcgggacgggggtccagaacgtcagcaatagccaacagacgacggtgattaagccgaatatcaacatgccaccaataaccattaacggaaatccgtctgatgccacaatacagcttgttaaccaggcagcggaaaagggggctaaaaatggttatgctatggcattacatgatgtctccagtaaaacggggaagatgtctatggcgcttagaaatatttgggtggtgaggccaaagaaaacatga

SEQ ID NO: 184672 - DNA, 615 bp, Klebsiella oxytoca
atgaatcaatttgaaatcaaggcaagattttatgaattaatcaatacgaaaatgatgcacgttccaatcactccagatacggcacgggaaaggttttcagatgcgctaattataaatatggaagccttcaagaagggctttagtgctgaggacatacatcaaatcatattcaatccgcagatgccggagcccctcagagagtttgaggggccgaccgaagaggcgctggcgataatcgaggtggtaattaatgaagagtttcattatttaactcaatatttatcagaaaaattaagtgctatttttgcacatgattttggaggacttgtcttttcaactgctttactcgactacaaaaatatcagttcgataagggatgatgagattgattgctatgaagagagcgacgttaatcatatcgactttttatttgaattaatggcagcggaaaagatagatagctatttcatttcagggattgaggtaataatcactcaaacgccgactctaaaaagaaagtttggtagagtcaaccttgccgggttcgactttattctaattcgaaatacggagtatgacgagcacggcaggttcttgtccgttgtatcgaattaa

SEQ ID NO: 184673 - DNA, 474 bp, Klebsiella oxytoca
gtggcagatatctactacccccacgactatctcccgatgccattacaggaaggatacggctttcagcctgtaagcccgttaaaacgaactcagctaaccaccggccgcgcgcggcaaaggcgagcttatatttcaacgccgacgcaggccagcatctcctggttcatggaaagcgatgctcagggactggcgtttgaatcctggttccgcgatgcattatctgatggcgcggcctggttcctgatgaagcttcagacgccggcgggcattaagttttataaatgccggtttatggatatttatcaggggccggagcttgttgcgccaatttactggaaatattcagcgactctggagttatgggaacgtccgcttattccggcaccgtggggaaattatccagaatggattgtcggtagctcattactggatatcgcgctgaataaggagtggccaaagcatgacgcagattaa

SEQ ID NO: 184674 - DNA, 483 bp, Klebsiella oxytoca
atgacgcagattaaccgcctttacgccagtagcgggtcagaggtgatcattgaaacgctgcagataactatcggttctgattttcactacctctgccagggttatgaggatatcactgcgacgacggagaacggcgagaccgtaacgtttaccgcctgcgcgatggatattgcattgccagcgcgtaacgaggacggcacgcaggatttgaaatttgctctgtgtaatatcgacggcgttgtgtcaacggcgatccgcaatgcgctggcgaaccgtctttcggcgtcgctgacttaccggagttatatctccacagatttagcggcgcccgcggcggtgccgtatacgctgcaggtcaaatctggctactggacggcgacagaggtacagatcactgcaggctatatgaatgtccttgatacagcctggccgcggtaccgctatacgctccctttattccccggactgcgttatatcagctaa

SEQ ID NO: 184675 - DNA, 381 bp, Klebsiella oxytoca
atgtttaaccctgataaatacctttcagtcacctggctgaagggcggcagagtgtatccgcagctcgactgcttcgggatcgtgaacgaaatccgggcggatcttggactacctctttggcctgagttcgccggggtgaccaaagacggcggcgggctcgaccgggaagcgcgacggatgatgctttctctggagcgctgcgaaccgtgcgaaggcgccggtgtggcctgctattccggttcaaccgtcacccatgtcggtatcgtcgtcaatatcggtggcctgctgcacgtggcggaatgtaatccgggaacgaacgtaacgtttctgccgttgccgcgatttaagcggcgatttgtcaaagtggagttctggcaatga

SEQ ID NO: 184676 - DNA, 3177 bp, Klebsiella oxytoca
atggctgcagatctgaatccgccgctgggtacgacgacgcctgaaatattcatggataacgtcaagcgcgctgacgaactggtgaacggtccggctggaacggttaacgatcgcggcggggaaccgctcgatacatggcgccagatgatggcgaagaatgatgaaatccggcagaacatcattccgctgaataagcagtaccagacgctggcagcggcgcaggccgatatcgcgaatatcccggaaggcagtaccacgtattaccgcagcccggatgacagcgcgttagctgtagaagtgatcaataacgccgggacgctgcagcctaccgggcggaaaatgccatctcaggcggctgttgccgcgaacacatccgtaattacaggcttggatcttgatcgtgttgatgtatctccagcgtcgctggggactggccagtattatcagctctccacagggacaatcgcgaccaccactgacaccaactggtcggcgagctcccccgtttcagtggctgggtataaacgcttaattttgtctggttcgtttttgtatcgtgctgccgtcgcaccgcttttgtttgttgactcggcagggactgttatttcagttcagagcctgggcattcccatgtcctcggataatgtctggtcatctcgttcagaggttcaggtcgatattcccgccgcagcagtcagcgcactgatatcaacctatgccgaaccggctgtggctgtctatgcagccgcgcaggctttccgggagtcaggcgttgccctatcggccagtaaaacgaaaaaacgggttctgaactggatacctaacacatacatgaatattgcgacgggcgttctgacatccagctcagacaccttcgcggccgcccgtgtgccggtggcaccaggggatgtattcacactcagttgctcgctgaagggggcaccaaaccagattcgcctgatcggttactttgacagtaacgagactctcatcggtacgttctacccagggacagggagcggcacggtatccacgatcaccaacctgactttccgcgtgccaaaaaacgcggcgtctatggtgatcaccgcgtattccccgaactcgtcaacggtgctgatgcaggcttccgtcttcgaccgtgcggcgcttgatatccagaccgctgctgacacagccggaaacctcgcgaagtcgtcggtgctgcctttctatagcgggcgctactggaaaaacaccaatggtgcattgaccgttgtgaacgacgcgcagttttgcgccttctacccagtacaggtgaccgccggtgatgtgtaccgcatcaagtctaacctgacgacggggaacccgtctctggtatcgatggtggttttcaagggcgccaacggtgatctggtaggcactgctcagcccgcccccgggtccggggcctttgcagcagcggatatcaccgtaaccgtcccggctggtgcggtgctgatgcttttgactgcatacagcccatatatagacatcgtctatcagggtagcgctgtagaaaaaatcggatcgtcggtggcgggcatcgctgcaagttttactcagcaactcagcattaacttttcgaaagggtattactggaacccaacatccggcaccttaacgagtaccaccgatcctaactggcgggcatttgacgccatacccgtttcgcctggtgagtcgtatcgtgtcattgcgactgagtttagcggtagcatttacgtcgtagttttcaaaaatgcgagtggtgcggtcgtaagcaagtctcagctcggtcctggtgggtcttcgatcgtcgctgtcgatgtccccgttaccgtgccggctggcgctacgtccatgtgcgttacggcctatacggataacgtgaccatcacaaaaatggtcaactacagggcagatttacggaaggatattattcagcgcgactttgataccgggttgcgtctgctttctcctaaagggctggacggctattactggcaccagaacacgggggtcaggacgctgattaccagcgactgggcatatttctctgtagacccgatcacggtttctccgggggaagtgtaccggatcatctgcgccgagttttctggaaacccggcaaacgtatatctcgcgctgttcaaagactcctccggggccattgtggggcgcagctatgcaggacctggctccggcgtccttcaggctgttgataccaacgttaccgtgccggctggcgctacgtccatgtgcgttaccggccacagcaggaatttgcagatcattaaatctggagggatgattagcaaacttccggggaactctcaaacccaggcgagcagcccgcttgactactggaaggggaaaaaaatagtctggctgggaacctcaattcctgcaggaagcggaacaaactcctacccgtatatgctggcccagcgcctgggggcgaacatagttaaccagtccgtcggctcatctccgattcgtggtggtctggatgccttcgtcaccaccgacgatccatatggatggacgggaagctcatatacccgcgtcacgcgtgccttgtcgcattccgtcgatattaagcagtcatttatcgacaactacgattcgaaatggaaggcgttagtgacaggtggcccggcatccctgtcagatactgataaggcaaatatcctgagttattcctatgccaaccggctgtcgggtaacttggattcggacctgtttgttatcgatcacgggattaacgactatctgtggattcaggagcgagggggagatgttgccagtctgctgacgcctgcggtcgatacccgtaacatcaatactttctacggcggcataaatacggtaattgactacatcctgagccagaacccacgggcccgcattcttgttatcggcttttatgaaaatgagttgaggccgcaggtttctcagatacagttaaaatccgcgcagctgtgggagtatcagatcgtgaagttgtgggagaagacaggctggagccagcaggtattaaccgggactgatggcgcagggaagaccataacccagtactggatgccggacaacctgcaccctcactcggatacgacaggaaaggcaaacacattgctggcgaatattcttgaaatggaaatcaggtcggttcgttaa

SEQ ID NO: 184677 - DNA, 747 bp, Klebsiella oxytoca
atgccgataccagctgttttcattgattcagacttgccggaaacgccgggaatgaaagatattgacgattttatcgtaaaaaactggtttacagacttccctgctgtcgacggaacaaaactgggtgggtattacttcggaaatcccgtaagtaacctggcgatgaactcatttaacaatgcagcacctgcgacattgaatggatcattcgataactcacagggttatattaacgttgatgttaataactatctcgacaccacacttaaagcgcctgttgccttaaaagtgctggcggtcatcagacgaccatcaaatccttctgtggcaaattatttcatttctgacttttccggtacgggagtagcggggctcggatttgggcttggcattgccactgacggtaaattgcggatagttggtcaaaacgacgctaccacagcggtggcatcggtggatttcccttcttcaattgcggtcggtgacctgtgcgcaatagcggcacacgttattcagggagcggtatatgttgcaatctacaatcctgcaactgcgacgtacgtcgcaggaaataccgctatgtcaggtactcgttcagcaggtacaaagaatatccttattggcaggaaaacagataacaatacgtcaaccgcttcaacggcaatcaagtctgcagtcctgataaatggcgagatcacaggagctcagcaacttgcggcaatgcaatacctgctggcaatggattaa

SEQ ID NO: 184678 - DNA, 831 bp, Klebsiella oxytoca
atggccggaatcactttggtagtcaccaactttacgaaatatgacggtgataatgaaaacaacaatgcaccgcctccgtacggctcaggccctgacgggaacgcctactggaataacaatacggtagggactctgacctggtcgaatgttacggccactgacctgtcattattttattttgacagcacgggtaattttactgtcgctatcgacggtggtgcacctgtgactatcaccggaacaaatagcggcacggtaaaaaaatacgacattaccggactgactgcgactgcacatactgttgttgtaaccagttcagggacgggtgttgtttccattctctgtatgtatggaaaaaatagcgccagaaccaacggaatcaccgtttcgcgcatggggaatggtggggctatggcaaaagactatttgcactggcaggactatattaccccgattgttactcactttgacctcgatttattttttatgattcttggtaccaacgatttcaggaaaagcgcgggtatcgctgagtttgtcaatgggttacaggtagttatcgataaatacaaagcggccacgccgggaatttgtatttgcctggtttctgcggcgcaaagcaacgcaaccggaacgcctaccttatctgaatatgatgaagccatgcgtacgctggcaatcgagaataacgttaattttatcagcctctaccagttgtttccaaagacgtacgataactccggtggcgcatgggctgacgcattgcacctgtcagaccgtggcgcatatgtactggcgcgtaaaatcaaaaacgaatttttccaggagtaa

SEQ ID NO: 184679 - DNA, 660 bp, Klebsiella oxytoca
atggataacgtcaagcgggccgatcggttagtgaacggtccggccggaacggttgacgatcggggcggagttccgctcgatacctggcgccagatgatggcgaagaatgatgaagtccggcaaaacatcattccgctgagtaagcagtatatgacgcttgaagcggcccaggccgatatcatcaatatccctgaggggagcaccacgtattaccgcagccctgatgattccgcgctcgctattgaagttatcaacaacggaggaacacttgaggctaccgggcgacagatgccttctgtcgttactatcgggaaaaaattagatgagcggattccattgggggatttcaaaccatcatatttcccactatggtatgacagaaatggaaaagtcattgtctggtgcaaagatggatatccagatttctcgggtttcggggaaaacgcacaaagcatcgtagcagccatccctaacgagtgggcccagtatcatcttcggcagttcgactttagtccctcgtacttccctctctggttcgacagaaaaggcaaagtcctggcgtggagtaagaacggcacggtggattttgtcattggagagagcattcagagtcaggttaaagaactggttggcgcaaatttcttcgagttcattcattga

SEQ ID NO: 184680 - DNA, 408 bp, Klebsiella oxytoca; identical to SEQ ID NO: 78808

SEQ ID NO: 184681 - DNA, 1101 bp, Klebsiella oxytoca; identical to SEQ ID NO: 78810

SEQ ID NO: 184682 - DNA, 291 bp, Klebsiella oxytoca; identical to SEQ ID NO: 78811

SEQ ID NO: 184683 - DNA, 204 bp, Klebsiella oxytoca; identical to SEQ ID NO: 78812

SEQ ID NO: 184684 - DNA, 324 bp, Klebsiella oxytoca
atgacttttcaagagcttgatgcttgtatcgcaggctctggcagacgttctatcgcttctgcattaatcgcttttattcttgatgcgcttgatgacggacaggacggagttgatcttgatatcttccagagccacacgcgcttcgttcgtaataatgtaaccactgtagccagttatctgcagctacatgggattatccatatactgtattaccgtgatggtgctgcagaacgtcaatatgagtccgttaataattacgggcggtgggcaaagcagcactatcgtccttctgaggctctaatacagctgcatcgacgtgattaa

SEQ ID NO: 184685 - DNA, 702 bp, Klebsiella oxytoca; identical to SEQ ID NO: 179507

SEQ ID NO: 184686 - DNA, 348 bp, Klebsiella oxytoca; identical to SEQ ID NO: 179636

SEQ ID NO: 184687 - DNA, 834 bp, Klebsiella oxytoca
atgtcacagctgagttttgccgatgtgttcaatatggccagagaaaccgctgagaatagccctgtgatccaggtcagggcgcaggtcgcggaagtggtgccttctgttcagcgaatgatgagtgagcagcacagccggagccgctttatccgcgtgtttagagacacgggccgccatctggggcgctgggaggtgttcagtgattttctgtcactggccgccagtgaactggatatggcccggataagagcgccggaaagcattgagcactgccggaaaatttgtgcgcgttatgaggcatcagatatcgcgaacatgcaggagatgttctgcatgatggtattcgcactggaggcgaaatttcaagatttcctcggcgccattttcatggagcttgagctgggcgatagctttcgcgggcagtactttaccccttattcggtccagtgcctgatggcccggatgcagatgccgggcgtcagggacactatccgccgggaagggatagccacggtcagcgatccggcctgtggtgccgccgggatgctgattgcatatgccgaatgcctgctcgaagcggatatcaatccttccatgcacatgttcggcagctgcatcgatatcgatccggtggcggcagatatggctttcatccagctgtctctgctggggattgccgccgaagtggtcacgggtaacaccctgacaatgcagttcaggcgggtaagatacactcccgtgtactacctcaatgactttgaaaaacggctggctgacctgacccggttcagggcgatgcgggactttatgcgcgggatacaggaggctgcgtaa

SEQ ID NO: 184688 - DNA, 357 bp, Klebsiella oxytoca
atgcggaagttgtttcggctagtccatggtgtccatgtacgcagtctgaccgacagcatcgataccagtacgccagcaggccgcttttgcttccacgtcatgagcgccctggcaaaaatggagcgcgagctgatcgtcgagcgtacccgcgcaggtttagccgcagcgagggagcaggggagagtcggcggtcgccgccgggtaatgactgaagaagtggtggagcgatgccgcaggatgctggagaacggcgctacccggcaacagatcgcagatgtgataggggtgggggtgaagacgatctacaaatactttcctgctgccgtccgcgatcaaggattcctgcccttcccgtga

SEQ ID NO: 184689 - DNA, 882 bp, Klebsiella oxytoca
atgaacaaaaagaaaggtataatcatcgccccgggccaaataatttcacgccatgatggatcaatgacatttaataaattagaaagttccgacatcaactttcttttactatattgggacaaagttgttatatcaaccaataatatcttacatcttgaggttcctcgagaaaaaacactaagggaattaatggccgcagattttcctcgagctataattacggaagatgattaccccaacgatgaaggaagaatacaagaaaatttatttataaaagcacaatacaaaatagcagaaaaaatcagccaagatgatcatgagaaatttgattggagtttaaatcaaattagtaacagtcctgacctagtcattcccgaagcatatacaaaacaagcacttttgttaaaaatggattttatgcaactacttccatccccaggaaatcttacaacctatgaagatgtattagaattcaaggaaaaaagaggtgatttgctaaatgaactccattcgcatattgaaggaatctgtatggagataatgcagtctccagatgcagctaaagaaagaactaaagccataattgaatttgaaaagaatataaatgatatacataaagtaagttttgaatcctttgggattacgaagaaaagagaattatccatttatttaaacattaaccacctgtctttagccgcagctggcgcggctgcaatttcaggattacatttttttccggatatatttcacccacttgaaaccataggtgtagctgctggttgccttttaaaaatagattgtaaatatgggattagctttagttccaaaaatgattataaatatataaaacaagcaagtaatagaaacttgcttaggaaatga

SEQ ID NO: 184690 - DNA, 177 bp, Klebsiella oxytoca
atggttggttcgttcctttctccgactgctgattacatagagcaaagactgacagttaccgccaaatgtgatatcagcgctaactcgcagcttattcaggctgatagaggctatgtcgttttatatatcattaagtattatttgtggttattcaaatgggtgtcattgtatgagtga

SEQ ID NO: 184691 - DNA, 240 bp, Klebsiella oxytoca
atgctcagaccgtcagatatcaatcaggcatttcgggagtcgaatctccgcaactcgaaaggctatcaatatctacattctcgcgattttgcttcttctcttgtgtaccgtggcatccacttatcctactccgaggctaaccggtggattgagcacaaccagtcgtgtttcgctgataagacgccggagcatattgagatgaggatgttgattctccgtaacatggggagggggatgtaa

SEQ ID NO: 184692 - DNA, 678 bp, Klebsiella oxytoca
atgtcaatgactacttgcaggaagtgcggcagtgaggtaaggcgtagtgaaaagaaatgcccttactgcgaagcgagtaaccccgctatgaggtggtggcgtccggtaatatttctcgctgtgctggttgcactgctcaaagcttgctcatatataccagaccccgatccagcagaccttcgggacaaaggtactacacttaaacaatggcggagtatgctaaaggatgatcgcttgaagtttatcgatagctaccttgcccaagaaaaaataatcacctctgatacgagcggtttttataaatgcatcagccagcaatccttcacgaaaaatgatgagatcaaagtagatgaagcactcaactggtgcaagcaggactaccttaaaaatccctcatccttgtataagatgattgattttgacacgtttatcggcaacacaagaggatttgataactcctacatcccaatcactaattatataaaaaacaacatgcatgacccttcatcatttaagcatctggagaccaggtatcgctttgtaatgaatgactcgtcgccttatgcggttgtcacaacgatatatcaaggtaaaaataattatggcgtgaccgtcaaaaaccaaataaccgccaaagttgatcttatctctggtcttattgttaacccctccaactaa

SEQ ID NO: 184693 - DNA, 312 bp, Klebsiella oxytoca; identical to SEQ ID NO: 86336

SEQ ID NO: 184694 - DNA, 1230 bp, Klebsiella oxytoca
atggctatttcagatagttatctaaagtcttgcctcgggcgtgaaagagagaaggtcgaagagaaatcagaccgcgatggcctatgggttcgcatatcccggaagggggcggtaacctttttctaccgttaccgttttcttggtaagcaggacaagatgacaatcggtagttaccctgagtttgggctaaaggccgctcgtgatgaggtcgttaaatggtcggctatccttgcccggggtgagaatcctcgaatccgccaaagtctggacaaagcaaaaataaacagtcagcacacgtttgaagaattatttcgtgaatggcatgagatggtctgtattcaaaaggaaacagctgaccagatcctcagaacgttcgagcttcatgttttcccaaagctcgggaagtacccggccaaccaactcacgttacataattggctaaccgtcctggaccgactcgccgaaggctatacagaaatcacgaagcgagtgattagtaacggccggcagtgctactcctgggcagttaagcgccagttactggaaaataacccactgtcagagctttccgggcgcgactttggcattcagaaaaagatgggggagcggacgcttaatcgcaaagaactggccattgtctggcgtgccattgaagattcgcgcctcatggaaagaaacaaaataatgtacaagctatgcctggtttgggcttgccgggttggggagatccgtttagcagaagttcagcactttgactttgaggaaggtgtctggatagtgccatgggaaaaccacaagactggccgcaagaccaaaaagccgctgataaggccgatcatcccagaaatgttaccattgctaaaaagggccattgaactggcacccggacggtatgtcttctcaaggtacgaggataagccgatgagtgaaggtttccacttaagtatcagcagcaacctggttaagtttatgctgaagtcatatagtgagcaggtccctcactttaccgttcacgatctgcgcagaacggcgagaactaacttttcagagctgacgcagccgcatattgcagaaatcatgttggggcataaattgcccggcgtctggtcagtctatgacaagcatacttatatcgaagaaatgcgtgatgcctatagcagatggtgggctcgactgatgagcatcatcgagcccgatgtgctggagttcacgccgaggcatgccgggtaa

SEQ ID NO: 184695 - DNA, 279 bp, Klebsiella oxytoca
atgggcaacgaactcgaattaatgaaaactcgcgatatttgcgaacaactgagcatcacaccgcggacactcgatcgctaccggaagcgaaagaaaaatgataatccattccctgcaccggactgctcctatatgggcggtccaaataagtggctaaagagcaaggtcaccgagtggcaggaaaaagagatgcgacgcagaacgcgccgccctatgtcacacctcaacgatctggtaagggatgtaaaggggcgccttacccggcatgcctcggcgtga

SEQ ID NO: 184696 - DNA, 309 bp, Klebsiella oxytoca
atgagccttaaacaccgtttatccgaactggaagccagcattgacccggcagcattgcgcgcggccgctgatgagtattctgatctgctgctgacattatgcctgtgcatgaaaatgtccggccccacccgggcgaacgtgcgcgcatgcgccaccgagcttaaaaaacgcctgacaacctggcatagccagaaggagctcaacgcgattctgtccagttgggatcccgttggttatgttctcggcctccgccgtgaagctaacgacaacgcgcgtgcagctggcgatccggtcgatgtatttgtgtga

SEQ ID NO: 184697 - DNA, 1083 bp, Klebsiella oxytoca
atgtccaatttagtagccacaactgataaccagactcagaaaattgacaacgtttctatcctgacgaacggtgaactattcaaccgcctgcgcacgctttcagaggtaatggccaacagcggaaacttcgtccctgaccattaccgcgggaaaccggacgcctgcatggctgttgtgatgcaggctgcgcgctggggaatggatccttttgctgtagcgcaaaagacctttatcgtcggaaattccggtgtgcttggttacgaagctcagttggttaatgcggtaatcaacaccatggcgccaacaaaggatcgaatccacttcgaatggttcggggagtggggaaatatcgttgggcgcttcgtggagaagacaagcagccaaaacaagaaatacatcgctccgggctggaatttgaaagatgaagctggtgtgggcgttcgcgcctgggcaacgctcaaaggagaatccgaacctcgcgagcttgtcctgatgctttcgcaggcacaagttcgcaattcaacactctgggcgacagatccccgccagcagctggcttatctcgccgttaaacgttgggcgcggctgtactgcccggatgtgatcctcggtgtctataccgcagatgagattgacgagcgcgaggaaaagataatcaacccggctgaaaaaatcactctgaacgagataacaagctccgtgggcgcttccgccagtgcgcaagactctgcagtcaacgttgactctgttgcggacgaactgcgcgaccggattgattcagcaagttctgttgatcaggctaaagccatccgcgtagatatcgaatcacagaaagcactgctgggtactgctctgtataccgaactgaaaaacaaggcagttaagcgctactacctcgttgatgcacgaaacaagattgaggccgcgatcaattcactgcctaaccctagcgaaccggaagctgtcgagctgtttgctaaagctgaaggcgctctcaccgccgccaaacgccatcttggtgatgaactgtatgaccagttccgcatcacccttgacgacatgaaaccggaatacgtgggctaa

SEQ ID NO: 184698 - DNA, 270 bp, Klebsiella oxytoca
atgtactgcgaaaccgcagcccttgaccagttcttctggatattcgtcaacaaagacgagaactaccactggatcgccatcatcgaggcatccgaagaactgctggaactcggcatgctggaataccgcaaagcaatgcgagccatcgctaacggtttcgatactggcgaatggccagcaccgattaccaaagactacgccgaagaacttaacgattttgatgtgcgccgtctcgaagcgctgcgcgaactggcaaaacaaggggaataa

SEQ ID NO: 184699 - DNA, 156 bp, Klebsiella oxytoca; identical to SEQ ID NO: 86426

SEQ ID NO: 184700 - DNA, 885 bp, Klebsiella oxytoca; identical to SEQ ID NO: 86382

SEQ ID NO: 184701 - DNA, 1545 bp, Klebsiella oxytoca; identical to SEQ ID NO: 86383

SEQ ID NO: 184702 - DNA, 516 bp, Klebsiella oxytoca; identical to SEQ ID NO: 86384

SEQ ID NO: 184703 - DNA, 279 bp, Klebsiella oxytoca; identical to SEQ ID NO: 86385

SEQ ID NO: 184704 - DNA, 1404 bp, Klebsiella oxytoca; identical to SEQ ID NO: 86386

SEQ ID NO: 184705 - DNA, 2064 bp, Klebsiella oxytoca; identical to SEQ ID NO: 86387

SEQ ID NO: 184706 - DNA, 663 bp, Klebsiella oxytoca; identical to SEQ ID NO: 86388

SEQ ID NO: 184707 - DNA, 1014 bp, Klebsiella oxytoca; identical to SEQ ID NO: 86389

SEQ ID NO: 184708 - DNA, 642 bp, Klebsiella oxytoca; identical to SEQ ID NO: 86390

SEQ ID NO: 184709 - DNA, 267 bp, Klebsiella oxytoca; identical to SEQ ID NO: 86391

SEQ ID NO: 184710 - DNA, 1194 bp, Klebsiella oxytoca; identical to SEQ ID NO: 86392

SEQ ID NO: 184711 - DNA, 630 bp, Klebsiella oxytoca; identical to SEQ ID NO: 119593

SEQ ID NO: 184712 - DNA, 1005 bp, Klebsiella oxytoca; identical to SEQ ID NO: 119594

SEQ ID NO: 184713 - DNA, 903 bp, Klebsiella oxytoca; identical to SEQ ID NO: 119595

SEQ ID NO: 184714 - DNA, 1476 bp, Klebsiella oxytoca; identical to SEQ ID NO: 119596

SEQ ID NO: 184715 - DNA, 282 bp, Klebsiella oxytoca; identical to SEQ ID NO: 119597

SEQ ID NO: 184716 - DNA, 1494 bp, Klebsiella oxytoca; identical to SEQ ID NO: 119598

SEQ ID NO: 184717 - DNA, 474 bp, Klebsiella oxytoca; identical to SEQ ID NO: 119599

SEQ ID NO: 184718 - DNA, 1134 bp, Klebsiella oxytoca
atgaacaccttcactgaccgttggcggcagctggactgggacgatattcgcctgcgaatcaacgggaaaactcccgccgacgttgaacgcgccctggcggccaaacagctcagccgcgacgatatgatggccctgctctcccccgccgccgcggactatctggagcctctggcccagcgcgctcagcgcctgactcgccagcgttttggtaataccgtcagcttttatgtcccgctgtatctctctaatctctgcgccaacgactgtacctactgcggtttctcaatgagtaaccgcatcaagcgcaagactctggatgaggcggaaatagcccgtgaatgcgcggcgatccgcgaaatgggctttgagcatctgctgctggtgaccggcgaacatcagggcaaggtcggcatggactactttcgtcaacatctgcccgcgattcgccgccagttcgcctcgctgcatatggaggtccagccgctggcgatggaagagtacgccgagctgaaaaccctcggtctggacggggtgatggtctatcaggagacctatcatgaaagcatgtatgcgaaacaccatctgaaagggaaaaagcaggacttcttctggcggctggatacgccggacaggcttgggcaggcggggattgataaaattggccttggcgcacttattggcctttccgacagctggcgggtggactgctttatggtggcggagcatctgctgtggctccagcagcattactggcgcagccgctactccatctccttcccacgactgcggccttgcgcgggaggtatcgagcccgcctcattaatggatgaacggcagctggtgcaaactatttgcgctttccgcctgctggctccggaagtggaactctcgctctccacccgcgaatccccctggttccgcgatcgggtgatcccgctggccatcaacaacgtcagcgccttttcgaaaacccagcccggcgggtatgccgataaccatccggagctggagcagttcgcgcctcacgatgaccgccgcccggaagaggtcgccagcgcgctggtggccagcggtctacagccggtatggaaggattgggacagctggctgggacgcgcctcccaatcgtcatga

SEQ ID NO: 184719 - DNA, 591 bp, Klebsiella oxytoca
atggaaacgaaacagaaaaagagcccggtttttaccctgacgctggttgaaaacggcgttgccggtgcgggtgaacgtgccgatgaagtcgtcattggcgttggcccggcatttgataaatttcagcatcaaaccctcattgatatgccgcataaagcaattatcaaagagctggtggcgggcgttgaggaagaggggctgcatgccagagtggtcaggatcctgcgcacctcggatgtctcttttatgtcctgggatgcggcaaatctcagcggctcggggattggaatcggtatccagtctaaagggacaaccgttatccaccaacgcgatctgttgccgctcagtaatctggagctgttttctcaggctccgctgttaacgctcgaaacctatcgtcagattggcaaaaacgccgcgcgctatgcccgtaaagaatcgccctcgccggtgccggtggtgaatgaccagatggtgcgcccgaaatttatggcgaaggcggcattgttccacatcaaagagacaaaacatgtggtgccggatgccaaacccgttgcgctgaatattgaaattatccgggaggaaaaatga

SEQ ID NO: 184720 - DNA, 432 bp, Klebsiella oxytoca
atgaccaccaaaaccacaatgacggccgcagattacccgctggcaacccgctgcccggagcgtatccagacgccgaccggaaaaccgcttaccgatatcacgcttgaaaatgttctcgccggaaagataggcccacaggatgtgcgtatctcacgagaaactctggagtatcaggcgcaaatcgcagaacagatgcagcgccatgctatcgcccgcaacctgcgtcgcgccggggagttaattgccattcctgatagccggatcctcgaaatctacaatgcgctgcgcccgtatcgttcttccactgaggagctgctggcgattgccgatgaactggaataccagtatcaggcgacgatcaacgccgcgtttattcgcgaatcggcagaagtctatcgccagcgcgataagctgcgtaaaaaagaagcataa

SEQ ID NO: 184721 - DNA, 1848 bp, Klebsiella oxytoca
atggcattgattgcggggattgatattggcaacgccacgacagaggtcgccctggctgagtccaccagtcaggggctgcggtttcttaccagcggaattgtgccgacgaccggaacgaaagggacacgggacaacatcagcggggtgattggctcactcatgcaggcgctggataaagccgggcgcagtcagcaggatgtggcgctcatttgcctgaatgaggccgcgccggtcattggcgatgtggcgatggagaccattaccgaaacgattatcaccgaatcgacgatgattggtcataacccccagacgccgggcggtgagggactgggcgttggaaccacgatccgtctggaaaatctggacgcgctgacgcccgaagaatacagcagtggatggataccgctggtggaccatcaggtcgattttatggatgccgcctggcaactgaatgaggcgctcacgcggggcatcaacgtggtggcggtgatcctccagcaggatgatggtgtgctgatcaataatcgcctgcagcgtaccttgccgattgttgatgaagtgacgcttatcgaccaggtacccgaaggcgtgctggcggcggtagaagtggcggcgaccgggcaggtgatttcgctgttgtctaatccctatggcatcgccacctggtttgcgctcaccccggaagagacacggatgattgtgcccgtggcgagagcgcttatcggcaaccgttcggcggtggtgctgaaaactccgaaaggcgatgtgaaatcgcgggtgatcccggcggggcatatcaccgtgcgtggggaaaaacgtaccgtccaggcggatgtggcacgtggagccgagtcgattatgcacgcggtcgccgggtgtgccccaatttgcgatattcgcggtgaacccggcacccacgctggtgggatgctggaacgggtgcgccaggtgatggcttccctgagcggtcacggtgctcatgaggtctttattcaggatttacttgccgtggacacattcattccctgcaaggttcagggcgggctggcgaatgagttctcgatggaaaatgccgtgggcattgcggctatggtgaaatctgaccgactgcaaatggaggtcattgcgcgcgaactcagccaacgtttaaacacccgtgtggaagtgggcggcgtggaggccaatatggcgattgccggggcgctcaccacaccggggagcgacacaccgctggctatcctggatttaggcgcgggttccacggatgccgccaccatcaatggagcagggcagataaaatcggtgcatctggcgggggcgggcaatatggtcagcctgcttatcaaaaccgagcttggattaagcgatttgacgctggcggaggagattaagaaatacccgctcgccaaagttgaaagcctgttcagtattcgccatgaaaatggggcggtagagtttttccgcgaaccgctcagcccggccgtgttcgctaaagtggtgtatatcaaaaacggcaccctgatcccgattgataatcacacttcgctggaaaaaatccgtctggtgcgccgacaggcaaaagaaaaagtttttgtgaccaactgcttgcgggctctgcggcaggtctcgccggggggcgaaatccgtgacatggcctttgtggtgctggtaggcggatcatcgctggacttcgaaatcccgcaaatgatcaccgatgcgttatcccattatggtgtggtcgccgggcagggcaacattcgcggaacggaaggcccgcgtaatgcggtggcaaccggactcgtgtatcgctgcgatacagataatgaccgggtttgcgatgacagataa

SEQ ID NO: 184722 - DNA, 378 bp, Klebsiella oxytoca
atgccggacaatgacgcgctctgtccccaggtccgtctgaacgatagcgtcgtgtgccagcaggtcgcgcggtttttacgggagacggaaagcgatgcgcgaacccgggggctggcggtggcggttgtcgggccggagggcgagctcatcgcctttggcgcgcacgctcgctgcccaccgctaccgcgccagctggcgcagcgcaaggcctggagcgccctgcgctttcgccgtccgacggcaacgctggcgcaagaggtcagcgccggcgccctgcagctggcggtatttaacgacccgcagctgctggcgatgccgggtggcgagccggtgatcgtcgacgggctggcggcgcggtttgttcagcgattgacttga

SEQ ID NO: 184723 - DNA, 159 bp, Klebsiella oxytoca
atgaaactgccgcgaaacactctgctcgggtgcgtattaatagtgtgcctcacactgttgatattcacttacctcacccggaaatcactatgtgaaatccggtacagggacacgaacagggaggtggcggcttttatggcttacgaatccgctaagtag

SEQ ID NO: 184724 - DNA, 597 bp, Klebsiella oxytoca
atgagtaactctttgctgccgccatcctccactgcctggcttcgctataccgaagcgggcacttccagactgtctgcgatcacggttgccctgcgcaccctgtggacgccaacagccagcccggtggagctgctgccctatctcgcctgggcgctgtcggtggaccggtgggacaaggactggccggcagaacgcaagattgccgccatccagcgatcgtactggctgcaccgccgtaaaggtacgcgcggtgcggtacggcgcgttgttgaagatatgggcttttcagcaacgtttgccgaatggtttgaggtcgatgacgagccgggaactttccgccttgaagttgatatcaatgaggtcggcctgacacaaaagacactggccgaactgaatcgcctgattgacgacgcaaaaccggtcagcaggcatgccgcccggctcaatatcgccgttaagctgacgggggatatctgggccggatccacgctgtgcggaggcgacattatcagtatttatccgctcgattttgaggcggaagacaacattttctacaacggcgtgatttttcacgatggcaattttaattacgggtaa

SEQ ID NO: 184725 - DNA, 900 bp, Klebsiella oxytoca
atgccaacgattgacctttcgcaactgccatcgccgaccattatcgaagagctggacttcgagaccatcctcattgaggtaaaagcggccatggtggcggcatttccggaggacatgcaaagcgctgtcgcggcagcgatggagctggaatcggagccgctgaacatcgtcgctcaggcaatggcatatcgtgaaatgttgctgcgccagcgcattaatgaaggggcggtagcctgcatgctcagtcatgcgaccggcgacgatctggacaatatcgccgccaatctggacacagaacgcctggtgatcaccgaagccaccgacaccgcagatgcggtaacggaaagcgacgaggcgctacgtctgcgcgcgcaggcagcctttgagggaatgagcgttgccggaccgtcggcggcgtatgagtattttgcccgcagtgccagcggcaaggttgccgccgtgcgtgcaaccagccctgcacccgcggaagtgttgatagccatcctgtccagcgacggagatggcaccgcatcagacgagctgattgcgacagttcaggcagcggtaaacgacgaagatacacgcccgctgggcgatcgcgtgacggttcggagtgcggagatcattgaatacacgatcgatgcgacgctctacctgtatccgggaccggagtcagaacccatcattaacgccgcaatcgcttcgctgaggacgttccttgccgatgccgataaaaagattggtcgcgatgttgtgcgctccgccatatcggcatcgctgcacgtccagggtgtacagcgcgtggtaattaattcgcccgaaagcgatctgcagattgataacacccaggtcgcgcgcaataccgggtacaacgtggaaaacggcggtacggatgagtaa

SEQ ID NO: 184726 - DNA, 834 bp, Klebsiella oxytoca
atggctaatcaggcaaccacacgtaagaaattcaaggtgatgacctccggcacaacagtcgatgggcgtaatgtcacccgcgcgcagattcacgcaatggcggcggcatacaacccgtccgtctatggtgctcgcgtcaacatcgagcactatctctcaccattccctgacagcgtattcagtgcgatgggggatgttgtagctctgtccgctgaggatatcaacgaaggcccactggctggtgaagcacaccttttcgcggagattgaacccactcagcgcatgaaggacatgattgcagaaggcaaaaaggtctactccagcactgaaatgcaccccaacttcccactgactaaaggcccctacctcatggggctggcgatgaccgataccccggcaagcctgggaaccgacaagctgaagttcactgctgaaaaacgcgcagagattatgcgtttcagttcgcaggatgcagaagtcaccatgttcactccctcttttgaagcggagctggtacaggaaaaccagagccgcaatgactccgggaaagagtggttttcccgcgtgatgggcattctcggcaaggggcagaaaactgacgatcagcgcttcggtcaggtgcatcaggctgttgaagcggtggcgcagtcacaggttgatcttggcgagcagttcagtactgccgaacaggaacgccagcaggacaaagctgctatccagaagctgaccactgacctggccgcacttcgccagcagcttgaagggacggacggcaatttcagccagcgcccggcggccggcggcggcgataacgcgcagctcgctgactactga

SEQ ID NO: 184727 - DNA, 408 bp, Klebsiella oxytoca
atggatctggtttttctttcgacgggcgaggtcgagcggatacatgctgaaaccctccctcagagtggcagcgccaatgccgggctactggagggggcgttaaaccgtattcagaacctgcattactatgaaggtgttgacgatatttatgctcttgccgctatgtaccttattggcatagcaaaagcgcatgctttccatgacggtaataaaagaaccgcgtttcaggcggcctctatctttttgatgatgaatggctcggagctatcaggctcgcttttgctggttaaattaacggtttttgccgctatgggagcggccagcctggaagaaaccacttttgcccttaaactactgtctgattatggaaatgatctgatcaatgactatgaagaagattatctttaa

SEQ ID NO: 184728 - DNA, 723 bp, Klebsiella oxytoca
atgagttatctgggaagcaaggcggcaagcggtgtttatcaaaaaatcatagccgagatgccgccacatgatgtctacattgaaacgcatttgggcggtggtgcggtcatgctgcgcaaacctccggcaaaagtgaattttgggatcgatatcgacccgcaaactattgaagcatttaaccagggtaatccggaatttctggatactctcggcgatagtttgtttatcgacgtgggggatgcggttgattttctggaggccaggctgcggcggcacgctgccgatggaaggacggaactggaaagaatggggcgagtgcttatctacgccgatccgccttatctccctgagacgcgcagcagctctgcgcgctatcggtatgaatattctgttgaagaccacaaaagattgctgatgcgtttgcgtgatctccccgataacgtccgcgtgattttatcgggctacccgtccgagttgtacgatcgcatgctccctggctggcgcgccagagagttccaggcgatgacgcgcggtggcgtgcgaacagaaaaaatctggatgaactacccggaaggtgcagcgtactcgcatacgttcgcaggtaaagactacaacgacaggtaccggattaaacgaaaagcgcagcgctggaaagaaaaattttcggcgttaccgccagcagagaggctggcgatcatggtggcgctgggtgaggtggagtaa

SEQ ID NO: 184729 - DNA, 858 bp, Klebsiella oxytoca
atgaccttatcggattcaatcagtgtcatttcttcgccgggatcggcggatggtcgcttgccctgcgtcgcgcaggatggcccgacagtcgcccggcatggacagcgtcatgcccctgccagcctttcagccaggcaggcaagggaattgggtttgctgacgagcggcacttatggccctccgcacattggcttgtcggccagcgccgccctgtcgtggtctttggcgaacaatctggcagcgctgacgcgaacgactggatcgaccttgtacaaaatgacgtggaagccctgggttatgccttcggcgcggttgcgtttccgtctgcgagcgtcggcgcgccgcaccagcgagacagagcttattgggtggccgacgccgatcgccagcaatgggaggggcgcggggaacttcaacagacaggggggggtaaaccttcagacagcagcgttattagctggctggccaacgccgacgaccatcgacaacaatcaggttgcgggggcgggtgcggcagccaatgcaccaaagcggggaacaacgctaggcggtgctgcgagattggccgcatggccaacaccgagcgcgcaggattcagagcacagcccaaaaaatccaatgagaagaatagcatccaaagagaagaggcaaatcatgctagcgcactgcgcggggctaatgacaccggtccggttaacggcttctggcgagatgctgactggctgtactgccgggatggaaagtggaggccagttagacccggatcattcccgttggctgatgggattcccgcccgagtgggaagactgcgcacctacggaaacgctatcaacattgaagcggcgacagcgttcataa

SEQ ID NO: 184730 - DNA, 294 bp, Klebsiella oxytoca
atggccagcgattcacgaggaaatgaagtgatctttaatcgtgcatatctaaatatgtgctctaagaataagaaattaagcatattggttatagctagagagtttaaggactacaatattgtcgggtgtttttcttttggccttaaaaaaataatttatattgagtcaaggtgcttgtttctgcgttataagtacccatggccagattatgaaatcgaattggttagaaataaaggcggtgattgcgagtttatgctttttcataataaacttttacttggagaatcaagttaa

SEQ ID NO: 184731 - DNA, 471 bp, Klebsiella oxytoca
gtgaaattttctaaattctctgagctgatgacccgtatctggtctaacccactgacgcaacgccgtgaccctgcaattacgatcatcatccattcgccaggcggtatcggagcaacaccttccgtcgaggttgagtctattcaggctggcttcgactgggacgccgggcaggtgctgatttgcccggtgcagcctctgaccacgctgacgcctgaacaagttgcagatatcactgccagcgtgcgccgaggccagtcctggcatgcctttgaagcgtacaaaaaacacaaagcccagcttgagaaagcagcgattgagaatgcgaaagttgctgggcaacgcgacgacctgcttgcggctctggtttctctgtccgctgtcgctcgccgctatctgcctgactatgacgaacatcctgaggtacagaaggccgacgcggccatcgcccggattgaagtggaggtaaggtag

SEQ ID NO: 184732 - DNA, 861 bp, Klebsiella oxytoca
atgatcgagcgcggaatgatttttaacgctgagatggtgcgcgccattctcgacggacggaagacgcagacacggcgcccggtaaagtttccggtattagataaaaaccttgggtgcgagctggctggcaatgaattggccggggagctgtcggcgagaaactatttgaacagcgcatttggtaagccggggcatcgcatatgggttcgcgaaacattcaatggtttctggctttctgaagaagaaattgaggagatacagaagggcatttcaaaagctgcggatctttgtgattacaaggcggattaccctgattcaagcaggcctgcagaaggttggacgccatcaattcacatgccgcgctgggccagccggattctgctggaaatcactgatttgcgtgtggagcgattaaacgctatcagcgagcgcgatgctcaggccgaaggagtagggacgctgcgaggtggattctggcagcactatcagccaggctggacacagcatcaattgagcgcccgcggctcattcgtaaccctctggaaatccatctacggcgaagaatcctggaattccaatccatgggtttgggttattgagttcaaacggattgagggggggcagcaaatgagcactttaatgcaaatactctgcatcaaagacaccgagggatactggactgagggcgaaatgtacccggcccgtgtagtcgctggcggttttgttcaagttggtgacgatgacgatcccaaaggggaaggctggagcgctgcaccgatggaatatcgggaagatggttcgatcgtttatcaggtcggtgggattgaaggcgaagttctgtttgaggagagtgcagtgtga

SEQ ID NO: 184733 - DNA, 750 bp, Klebsiella oxytoca
atgaaaaacatgattggtaccgggaatgcactggatcgactgaaaaaactcattccccctggcgttcagccaaaattcggcagcgttgatgaatggcgtgcctggcaagccgaagaaggccgtaagcgctgtgaggaactggaaaaacaaaaccagcgagcacgtgcagagaaaatctttggacgtgctggaattcaggatctacaccgcggctgcacattcgctaactatcaggttgagtcggatgggcagcgtcgggcgctcacgatggcaaaaagctatgcacagaatttcggttcagggtttgccagcttcgtattcagcggtgcacctggtaccggaaaaaatcatctggcggcggcaatcggtaatcacctgttggctggtggtcactctgtgctggtggtgaccatcccggatctgatgttgcgcgttcgggaatgttacgacggcgggcagtcggaggcgtctttgctggacgatttgtgtcgtgtagaccttctcatcctggatgaggttggcattcagcgcggcagcagcggtgaaaaggtcatcctgaatcaggttatcgaccgacgtttgtcgtccatgcgacctgtcggcattctgaccaaccttaactacgaatcgctgacggaaaccctcggggcaaggatccttgaccgtctccagatggacggcggcatgtgggtaaattttgactgggatagttttcgcaaaaacgtacgccatttgcgcgttgttaagtga

SEQ ID NO: 184734 - DNA, 834 bp, Klebsiella oxytoca
atgcgccgggtatcggatgatgccaggttgctggcgctgtatctgctcaccgggcaacacacgaacatgattgggtgtttccggctgcctgatggatatgtttcggaagacttagcctggactcctgaaagggtttcgaaagggtttgatgagctatcggctaacggtttcgcaacgcgtgattcgtcatcgaaatgggtgctaattcgtaactttctgacctggaattcagttgaaaacccaaaccagggaattgcagcacttcgtttgtttgatcaggtcccggacaaatctacggtgaagccagaactggcgcgggttttagcctcggcaatatcccacattggtatcgcaaaactaaagggttccgaaagggttctcgaaccgttccttaaccaggatcaggagcaggaacaggatcaggaggaagatagttcggggcatggctccgccacaccccctgacgatcagaaccaggacgaaggcgataaacctgaacctcaaaaaatatacccgaatgattttgagcaggtctggtcggtttatcccaagcgggcagggggaaacagcaagtcagatgctttcaaagcctggaatgcccgaatcagggatggaaccactacggcggaaatcttcgcaggagtggtgcgttacgcggctttcgttaaagccgagggaatcctcaacacgcagtacgtgaaacaggcgaaaacgttttttggccctggtatgcattttagcgaaccgtgggcgattcagcaggtgccaggcgcacgagatcccaatcagatttcggaacctgacaaaaccatcccatcgggattcagggggtag

SEQ ID NO: 184735 - DNA, 795 bp, Klebsiella oxytoca
atggctaaaaattctatcgacgcatacggcgccagcggcaaaagcaatgttctttttttcgaaccggaaagtttgcatctggttaccgatacaacacacccgctttacgatgaacgagtacacctaccgcttaatgaagctgtgatcctcaacatcatggagcttggggtactcgaaccgattatcgtgtggaaggacccagagacagggaaaacctgcgtggttgcaggtcggcagcgcgtaaagaacgctatggaagcaaacgccaggagaaagcgagcagggctggaaccctggccggtacccggtatagctaagcgcggctcggcaattcaaatggccaaatacatggtcagtgaaaacgagataacgcaaccagataccccactgggccgggcaaaaaaaatggttcagcagatggaatacggtcatgacgaaaatgacattgccctgctttttggctgcagcgtaaaaacggtccaggcaaccgtggctctactggatgctacgcaggccgtccaggcggcggttgaggctggaaaagtcactgtcactcaagctcgtcagctggtcgatatgccaccggaaaagcaacgggaaacggtcaaacagttagaggcagctgcagagggtgtaactggccacgagaaagctcgccgccagcgcgctgtcctcggcgacacaaagccgcgtctcaaatcccgtagggaaatcacccagcaacttcaaaccgccagcggcgaatacgcagcggctttgcggtgggtgcttggtgatgaaaacacaccagtttaa

SEQ ID NO: 184736 - DNA, 537 bp, Klebsiella oxytoca
atgcaaacactttcctttcaacaaaataccggattcaacgctggagctctgataaagcgaaatcagttgagagtggcggatcatgacggcattcgttctgccgttcgcgcctgggctgcagttacagggcaggatgttgtttctgcttatatcgtcgaggaatggcgacagcagggcggcgaggagatcgactttcctgatgacataagccgagcccgacagaagctttttcgctacctggacaacccggctgaatctgagaggtatcgcgagaacgtgcgtcttcttacaccggcgatcttggccgttctcccgctggaataccgtcaccgtcttttgcccggtgacaattttatgtcccgtctggctcgtttggaaaaagaaaccagcgaagcaaaggttgccgttgctatgagggcaccacgccatcagaagctgaaagaactgagcgagggaattgtcgagatgttccggatagacccggagttaacagcgccactgatggccattgtcacttcaatgctgggggtgacgtga

SEQ ID NO: 184737 - DNA, 231 bp, Klebsiella oxytoca
atggacaaacaaaccaaagaaaaaattagtaaccgcatgtcacaggtcggcattggcgaaaagctcggtgtttcctctcaggctgtaggtaaatggctgagaaaagggaacattccaccaaggcgcgttattcctctttgccagatccttaactgggaagtaacccctcatgaggtagaccctatgtcatacccaaacccgaccgacggcctaccaaaccaggaaggctga

SEQ ID NO: 184738 - DNA, 204 bp, Klebsiella oxytoca
atggaccctgacgacgatgatgcaaattcttcaaacagtgttccgcgggttctggatgagagagaagagaccctcctttcgctcttcaaccaattaccagaggctgaaaagctgcgtctgatcctgcacaccaaatcagtgcttcatgaattggaccatcttaagaatgatgttttcgacatcatcaacgatttaaagaagtag

SEQ ID NO: 184739 - DNA, 390 bp, Klebsiella oxytoca
atggaactggatgatttttcctttatggggcgcgaccttaccgaagtagagcgcgatcatatgaaaatattacagcaaatcacacccgaactattttcggagtttttaactgaaaaaaacacaaaacaattctgcctttcctgcggccgcctacagttatttgtacctcataccacaatccacaaggtcgaccccgattcaccagagcatactgatgccgatgactggagttatgttacgccaaaccacaaggataatgaggcaattagtgtttatgatgcgcgctatgaagtaacttgttcgcactgcggctttacctctctttattccgcctactatgtagctagatgggccaaagaaaagggtctgatctctacggggaatctctaa

SEQ ID NO: 184740 - DNA, 399 bp, Klebsiella oxytoca
atgactctgctgaacggcggaaagggtggtaatgactttagcactgatttaccctcgcatagcggcggagacgatggcggagatgacatgtttgataaacttgaaaggcgaattgagaggcttgaaactgattcctcgttggtaagaattgaccttgcaacacttaccgaacgcacaggaaatctctcaacaaaaacagatctcgccgagatgagatatgagcttaagtcggataacgctcgggtaaaaggcgagattctcgaagcaatggacaagcgcttcgacgaactcgataagaaagctcgctggaaatggggtaacgtgataataccgcttgctatgagcatttttaccgcgattatcacactggctgcagcaaagattggcgctggtatgtga

SEQ ID NO: 184741 - DNA, 1164 bp, Klebsiella oxytoca
atgagcaaaatatttaaatcactgataacagtcgcgggtagagaaaaaattgccgaagccattgttaacggggacaaggttattttttctcaaatgtcagtgggggatggcggcggcagtgcgacagaacccaacgacgcacagactgcattagttaacgaacgttttcgcacccagctgaacagtctgaaattgtctgataccgacaatattattgttgccgagatgattatcccacccgaaactggcgggtttaccatcagagaggcggcgctgtttgatgatgacggtgtgtgcatggcggtcgccaatgtcccggaaacctataaacctgcactggctgaaggttcagggcgttttaccatcctccgtatctggctggcggtcagcagcaccgaagcggttgagcttattgtggatccgggtatcgtactggcaacagtcgaggatgtgattagtgccggtaacaacgccaaagactatgccgacgagcaactgagtgagcatgcagattcacggaatcaccctgatgccacactggataaaaagggatttacccggctcagtaacgccattgacagcagtgaagaggataaatctgcaacaccgctggcggtaaaacgggccgttgagtcagccattcgtgccgcctgggaactggacaaccctgtcggtacggtgaagttttacgcgcagaacgttaaccccaacgaacgctatccgtggacgcaatggacttataccggtgagaataaaacaatccgtgtcggtaagtccgatggctcaaacgtgggcgccactggcggtagcgatacagtcaccatccagaaggccaatcttcccgccgagcagattaatgttagcggggaaaccagtgaattacctgcgcgtgagctggtagccagaggggcagggaggcacagacacatggcgggaatggttgcccccggtgatgtatgggatggagattatgttgttggttcagataacgacagccaccgcacccgtaattacacagattgggcggaagatcataaccatattgttgacgaaccagcgcataagcacacaacgaccggtaaaaccgacaacctcggtaatggccaggcaattaacgttgttgaggcgcacaccttgctgatgtgctgggcgagggtagcgtag

SEQ ID NO: 184742 - DNA, 249 bp, Klebsiella oxytoca
atgagcatcaaacttattttcagtaccagaaaccttgatgaaccgacgttacagtcgcagtttgaaagtgaaatgaagacgagagttcagttgttttatcctgatcatgatgtatctgtcagctttcatgatggtgatgatctatacgaaatcattcctgtggaaaatgagtctactgaaagcactttcagggccgtgatagccggatttaagtctgacatcatgttttactcgttaggtattgcttga

SEQ ID NO: 184743 - DNA, 1959 bp, Klebsiella oxytoca
atgtatcatctcgacaacaccagcggcgtcccggagatgccggagccaaaagaaacccagacgatttctacccgctggtttggcgaaagcgtcgatcagggtggaataagctggccgggcgcagactggtttaatatcgtacaggctgagttattagcgatacttgaccttgtcgaggaatccccggataaaaccagatttaatcagatagctaacgctatcaaaattcttgccgaccagttccccagtcagttggggcttcctgatggtacagacctgattaattatcttgctctgaacggggccagtgaaaggacggtgctctcacggctcagggataatatctatattacagacttctattctgaaaatgatggtgatgactggcatcccgcataccagagagcttccctgctggcaaagaatgtctggtttcctgataaccgtgtctacacggttcgctccacccttatcatgcctgctggtggcgggatatgtgggtctggtaatgcagtgattgcatcgccccccgcgactgatgccagtggaagcggtcttattaccgtcatcagggctgataacgttaatgatgtcagactcactggtatcataattgatggtggcgtgcgcgaggtgatgacggagaaaaattacacacgcccattgagaatgatcaactgcaaaaatatcgtctggaacaacctgaccattatcaacaatgcagactggtcattctctctcgaatcatgtgcggaaataagcattcagcggtacaaacagcgctcttatgtataccaggatccagcactgacaagactacgtgcaggcggacgcgatggcggtcatctcatggactgcattaatgctgtacttattgattctgatatcgaatccggagatgactgtattggaattacgtcaaagctttcaggaacatccaacatcactgttcgtggtctgcgtggttcatcggtaatcgcaagccttgttatttacaacgaggagcaaattactggctcaaatgactattacgcaatgccagcggataaacttgtttttgaggatatccgtgtcaaaaaagcgggttcatcaagaaatgttgtcagaattgccaaatataatacgctttcaacggtaaaggattgttctgtctctggtgtctccggcgaggggtactctcatggtgcccttttccagcgggtggagggtctcaacctggctgatattgatgtcagttcctcgggagcgcatggtgcctacatctccaattgcaccaaagttgagggggctgttaaaggaagcaccaaagcctcgggatttgatggcgtcaatatctttaatggtgaagcccataatctcgatgtggagtcgagtaactctgcaagctatggtatccaggttaacggactcaaaaactctgtcgtccgtccgaaagcttcaaattgcggtggtgtcgacttctctctggctcgtggcgggggtggccgtattgttaacacagtcggcgttcatattccctcaggcttgtttataggggagacttcaacgagttattacggactgaatgctgttcctggaagcaacactgatttgcgcgtggcagatgatgttaaacgttccggcctgataccctcaacgcctcttggaaagataaactatttgcgccagcctgcggcaagcctgaagttcaaggaggatggtgcgcagaacatcattctgtattccagtgttgggtgtacgttaacccgtaatggtgttggtaattacaccgttactttcacaacccctatggactcaactggttttcagttcttccttggggcgtggcacgtaggtgccgagcgtaaagttatcctttcaacacagataacagtcaatggattctcgttcgttgtaagggatacagcgggcgctaatacgtactctgatcacatttcgctaattgcgtataacacatag

SEQ ID NO: 184744 - DNA, 876 bp, Klebsiella oxytoca
atgtcatttgaattctcccaaagcccgcaggccatctggctttatcaatatgatgctgatggtgtttatattggttccgtctttatgactattccggcgggcactggcttaccgcttaataccacacacattccctgtgagccgggtaaaggccagaccggtatatttaaaaatggcgtatgggaatatgttgacgatattcgcgggacccgttactggaatattcaaggcaccggctttgttatttccgcgctgagtgaatccctgcctgaatgggctgtgctcattgagccaccggtggttgatgctggttacgttctgctcttctccgatgggcagtggacgcaagttgaagataagactggtcaactttattacgagagcaacggtgcgaagcacgttgtttctgatgcatggttcatcctcccggagggctgcacgttcgttgccccgccagaagacaagtcgacgttcgtcacccgctggaacggcaccgagtgggtttacctcaaagacctgcgcggccaacttgcatggaataccgaaacccgcgaatcgaccacgattgtggaagttggccccgttcctgacggttacaccctcaaaatgccgggccagttcgatgagtgggatggctcagcctgggtgaagaacgtagaagccgagcaggcttaccttatcgttcaggccgaccggcaaaaagctaagttactgtctgcggcatccgagcagatttcactgctcagttacgccgtaaccagtggtcaggccacccatgaagagactttgctgctcgcaaactgggaagagtatcgcctcgccgtgagtcgcgttaataccacttcaaccgatattgtctggcctgagaagccgtaa

SEQ ID NO: 184745 - DNA, 585 bp, Klebsiella oxytoca
atggcgcatcgtgtagaggactggcaggacgtcctgcagcagctgatgccgcgcggtaaagcgtggccacgcgaccagacggcggcgctgacgtcactgctccggggattcagttcccgcctgcagctggcggaggcgaacgcggatttgctggtcaccgagatgcgcccggagaccacagacttactgctggctgactgggaggactatctcggcctgccggactgcaacgccatcccggacggcttcgaccgtcgccgcgatgccgtcgtggagaagtatcaccgaaagggcgggctggccacctggcagattgagcaggccgtgaaggatgcgctgggcttcaccattcaggtgaccgaaatcctgccgcatcacgtcatgcgcgacatcatgtatccgatttattcccacaaataccgctacctgctgcaggtgacggtcacggatatgccgatgatccgctttcgcagtatcagcaacgtcctcacgcctttaatcagcctgcaggcgcagatactggaatgttttttacgtcgttaccggctcgctggccacgattatgattttctttacgaggtttaa

SEQ ID NO: 184746 - DNA, 498 bp, Klebsiella oxytoca
atgggccgccgcctgcgcctgatggtggatcgggcactggtgcgcattgtgacggacagcctcggacggcagaacctgcaggtgcagtcgctggccgatgagaccaatgacgacgtcgagcgcttccagaactacggcttttccagcgttccgcctgcgggctccgaggcgattgtcgttgctgtcggtggccgtcgcggtggcatggtggccatcgctgtcgaggataaagggtgtcgcccccgtggcagcgaagaaggggacgttattctttatcatcaggaaggccatattattcgcctgaaaaagaatggcgtgattgaaataacagggaagacggtaaatgtggttgccgaagagagctgtgacattatcggtaaacagataaatatcaccggccccacttctttcagtgaagatattcaggttaagggaaaatctttccttggccatattcataaggatggcgacggtgaaaacacgactgaacccttatga

SEQ ID NO: 184747 - DNA, 606 bp, Klebsiella oxytoca
atgacagataccgcagcaaatgagatagaacgacacttacccttaatctttgaaaatgaagccaatgggattcttcaggatctgatcggtactcccactctgatggggatgatgatgtttgcgaccgaggaagaagtaatggccgctcgtaactacatcattggcgtatttgaagagtgttaccgtgtcggacatttacgcatcatgggggccgctgatgaaggaaccttgtttgggtattccttaatttttgggcatccatcggcaaactattcgttgtactgccataaaatttatgtgtatgagcaatatcgtggtaatggaattggtagccagatgctgaccggaattcttagccttccaaatgaagttggcctggtttgctcgcctgatctgattccgttttacgaatctgccggtatgcactttaaaggaaatttcactacaccatcagacgcgggtttcacgaaaactcgcggtatgtatgaaggtctttgcgtaatgagcactgataatagtggcgagactaatggcttgcccatcttcatgctgaacgatagcgacattgataacatcatacaggccatagtatcagccaaaaactga

SEQ ID NO: 184748 - DNA, 858 bp, Klebsiella oxytoca
gtgactgatatccttcaaaaccactattcacaggttaaaaacccgaacccggttttcacgccgcgagaagggaaaaagaccctgccgttctgccgtaagctgatggcgaaagccgaaggcttcacgtcccgttttgatttttccattcatgtggcgtttttgcgttcgctgggtaagcgtcaccggatgccacccctgttgcgccggcgtgcaattgacgcgctactgcaggcaatgtgttttcactatgatccgctggccaatcgcgtgcagcgctcgattaccaatatggccatcgagtgtggactggccaccgagtccaggaacggcaacctgtcagtcagccgtgccacccgggcgctgaagtttctggccgagctggggctcatcacctatcagactgaatatgacccgcagatcggctgtaacatcccgaccgatatcaccttcaccccggctctgttttccgcgcttgacgtttctgaggtggctgtggtggccgcgcgccgcagccgtgtggagtgggaaaacctgcagcgcaaaaagcagaaactgaaacccctggagatggacgaactgatcgcaaaagcatggcggtttgtgcgtgagcgttttcgcagctatcaggctgagcgtaaatctcacggccggaagcgggatactgcacggcgggatgcatcacggcagcgtcatgacattgagacgcgcgtgcgtcagcaactgactcgcgaatacgccaccggccgcttcaggggagataaagaagcgctgaagcgtgaggttgagcgccgtgtgcaggagcgcatgctgctgtcgcgcgggaacaactacacgcgactggccactgtacccatataa

SEQ ID NO: 184749 - DNA, 252 bp, Klebsiella oxytoca
atgtcacaggtcgttaacggagttacttcctcatcgaaacgtccctaccggaaagggaacccacttagcgatgctgataaacagcgatcttcagtggcaaagaaaagggccacccataaagaagttaaagtgttcctggaaccacagctcaaagacatattgatgaaaatgtgtcatgacgatgggttaacacaggctgaagtactgtcccggttgatccaacgcgaagcattagccagaaacatatcttaa

SEQ ID NO: 184750 - DNA, 561 bp, Klebsiella oxytoca
gtgaaaaaaattaaccgtacactccgcagatgttgtctgtcggggcttattagtctgactttgtttgcacctgttccggccgtgtatgccgccagcatcgagacgggatattcaccggaaggaacggctctgcagctggtcctgaagactattgattctgcacagcaggaaatccggctgatggggtattcctttacctcacctgaagtcgccggtgcgcttgtcagggcaaagcggcgtggtgtcgatgtgaaggtggttctggactggaaagccaataccggcaagcaaaaccaggcgagcctggcggccatgaatcttctggtcaatgccggcatcccggtgcgcacagtgtcgcagtacaaaatcatgcacgataaagtcatcattgccgatggccgcaatattgaagtcgggtcttttaactacacccgcgccgctgaacgcgtcaattcagagaacgtgcttgtcgtatgggatgttccagtcgtagctcaacgctatctgcagcactggcagtctcgctggaatggcggtactgattggcattcatcgtactaa

SEQ ID NO: 184751 - DNA, 1362 bp, Klebsiella oxytoca
atgtttaatctaattatgggcggagaacctgactattttgaacattggcccatgtatgaaaaggttaatggtagttgtgacttcccaatctcccgcatgttagaaggcacctctgaggacatccgactgaagttaacccctttgaatgacaaggcactatcttatattgagaaattacctacgttattcatgtcagagctttattccagaaatggtgttgagtacataactcttcggcttggtgttatatcaaatctacgaacagttaacaaaaacgttgagttttatttccaaatcactcattcacaagatgatgtggtcgtgatagacaaagagttatatcaaacagttttagaattaggttcatatggattgaaacgtactcactggggaataaaggctcgcgatttaaatcaaacgctagcccttctaaatataacaacaagaagcatgccactccctcctgccgaagcacttcccgatgaaatcgataattacccaataattgataatgttcaaagtttcatggcgtgtgttttagaacaagaacataaagaagatgaagagatcttttatcgcggacattctgatgtgtcttatgagttggcgccatctgttttcaggaaaaacaaaaaaggtaactttaagcatttacacaatgaatcaagcttagtccgtgaagccctaacagcaaggccagctgagtttgttgacgacaaaacaatgctggacaagttagtaagaatgcaacattacggactaccaactcgcttgttggatataacatcaaatcctcttatcgcactctattttgcttgttgtgatattaataataatgaaccagataatgatattaatgggcatgtgattattttcaaaacaaaaagagaacgtataaagttttttgactctgatacagtaagttgcatctcaaatatatcaatgcttagccaaacactgaaagatcagctggattgcaaaatggacagggatgctttcaacaaaattgaagcttgtcaaaaactcatacattacattaaggatgaaaaaccttattttaaagatgtaattataccaacagatttggaaaggttaatctttgttaaaggacgaaataacaatgaaagaatgtcatctcagtcaggtgcattcttattgttcgggaataatgctgtttatcccgatttagtatcaaaccctgatgatgctatgcaagagtttaaagtcgaaaagatagtgatcagaaacaaagctagaatcctgaaggaactcgcaaggctaaacattacagatgcgactgtctatcagggtatggaaaggacaatgaaactaattgcggcccaattttccgcaggagattga

SEQ ID NO: 184752 - DNA, 162 bp, Klebsiella oxytoca; identical to SEQ ID NO: 144504

SEQ ID NO: 184753 - DNA, 441 bp, Klebsiella oxytoca
atgaaccccattactttgagtgaaatgagtgatgaatctgaagaagtaaaaataatttcttcatatgaacctcaagatgatgagattgcgatcgtttttgatagctcaaaaataactggaggtaatgcactggattttttccagttcaccaagcactcacattctaatgttaaagtgtacggagaccccaatggtgtttcgtacctgcaattaaacagtataacgttaacgttaggtacattttttgccacatcaataatggtaccttttttagtaaatcttatttcaaattatattcagaagaaaattgataactttgggactagagatatagacgttcaagtctctataattaaaaaagctaaatctgggaagcatgtaaaatacactgtttctggcaaagtagaagatgttttaaaagtaattaataaaattaaataa

SEQ ID NO: 184754 - DNA, 777 bp, Klebsiella oxytoca
atgagtattactcaagaagatggtgctattcttgattatcttaatgccgagttaataaagtctcaattcttgagtttaaataatgagtcaaacagattgtttttatacaaaacaattctacaggctcatttaaaatacattcaagttattaatctactaacaagaggtgatttttatgaagcgtgggtagaacttgaaagaatagaaatagatttaatacacatcaaagaaaataatgagtatctgcctgaaattaatttgtatggtgttaacttcttagccagaatggtatgtaattggcaggctttattcccatataaactcttcggtagttctcgtgaaataataaaagaagtgaaatgctcagtatgtaatacaactcgtggttttattaatgattgcggtcatgttaaaaacaaactttacaatggagttctttgctttgatgaagtgaccgattttgaattaatttcttatgacgtagttagtaatcccgttaacaaatatagcgtttttttctctagtgatggtgataattataactattcaactttaattaatgttgtcaagtatatacaatccccacatcaaattttcaatatttcaacttggaaatataaggcgaaagaacatgacggagtattatcaccagaaaatatttgtccatgtggagactctttcaaaaaatatgcagattgttgtctgtcacgtaatggtatttattacaaacagatagacatttggtttccacttccgttggatatagaacccatttag

SEQ ID NO: 184755 - DNA, 1854 bp, Klebsiella oxytoca
atggcaaaccgcctcaccactgagatactcatcaatctggcaggtaacctgaccgccaaagcccgccagtatggtgccaatatgtccgagttcgcccgcactaaccagcgggctatgaatgtcgtcaaagcgacttcagccgctgcaggccgagctatcgactctatgggtagtcgatataccgggatgattgcaggattggggagcagcctgactgttaaaaatgttgctgattttgatgctcagatgaggcgcatgggaaccgacgctcagttgacagcagagcaagtaaataagttaagggaaaaaatccgagaggtttctaacgaaagtgatattcgaatagaagcgtctgaactcggccagggggttggcgagttactggggttaaccggtgatgataaatttgtcgatgaaaacgtcagaaaccttggtcttgccatgcaggcatttggtgttgatggtcagacggctgcaggtttattggcacagttctgggaaaaaggcgttaagggtgctgatgacgtcggtaagatgctggataagctttatcaacaatttgcagttggttctgtcagcgtctctgatattgccaaagtcgcccctaagctcttttctatcataggagaacagggacctgtcgctattgcccagatgggggcctttgctcaggtttttgccaaaactaagggtagtgctgatgaagttgtgaccagtattcaggcaatgtatgcatccttgcaaaacaaggacaagataaagtttctaaaacgccagggtatagatgtttttcagccaggctcaaaagagtttaagctcccctttgaactcatgagtgaaatactcaaacgcgccaaaaatgacccactcaagcttcaggacgtctttgaccagacgggtatgcagggtattaactcgctgctcaagcctgaaaatatgaagcttatgcaggagttgatctacggcaccgttgagtatggtgccacccagaaagcggcgaaaactaacgctgaagggtttaatgccgcgctccagtctttaaataacgaatggcagcgatttgctgagtcaaatcttgccgaaccagttcaggagttggctgatgcactcaattccgtggatcatgagacggtccagaattggttaaatataggtaaaaatattgctatcgctggtgctggtatcatcgcagcccgcaaagccttccagctcggaaagggcgctctcgatctcttcggcgttggtaaatccaaaggtatccctaaaggcgtttcagacgtctttggctccggcgtgatgccggtctacgtggtcaatatgggcgcgggtggcatggggggagccggtaacctgccgggcggaactggcggcgcaggtgacggagccggtgctggcacaggtcgcatggccaaagtcttacgcggcgtgggtaaagttgccgcgccggtggttggtgcggtggcgctgtatgacgagctggagacccagtataaacttccgggtcgcattgacgacctgacccgccaggccgctgcagacagcagcgcatcaccggatgaccgcgactttgccagccagagccagcgcaatcgccagttcatggcccgtaagtgggagtcactgacgaactggtttaaatccatcggcaatgatccacaaatttctgacccacgtccgtgggcttctatgcagccgcaaaaccagcctggctatccatttttgactcagcagcttcagggtaatatcgaggtcgtggttaaagatgatcgggtactggttagcagcatcaaagtcaacacgccgggtgtcattatgagcgcccagtctggcgtcagtagtgtggagcaggattga

SEQ ID NO: 184756 - DNA, 384 bp, Klebsiella oxytoca
atggctgaaatgaaaatcaccttaaaacacggttacatcgccggtaaaggcactgacgatgagatccgctacaaagaagtcacctttcgcgagctgacctcaaaagacgttatcgatgctcagctggaggctgagcgcgtggtcatcggggagaacggcaaggccgtggcgtactgctctgaggtcctgatggggctgggtatgctgcggcgacagattgcctctgtgggtgagattccggggccattgtccctcaagcaaatctacgcctttcacccggaggaccttgagttactcagcggtaaagctgctgcactcgatgacctgctttcggagaccgcgtcgcgggggcgacctgatgccgctggcgacggcgctcagtag

SEQ ID NO: 184757 - DNA, 354 bp, Klebsiella oxytoca
atgagcattctgggtcaggcggccatccgtattaatggccgcgaaatcaaaaccgagggaaaatccaccctcaatccgggcggtaaaacacgtacccagcatatgggcgggggcaaggtgtggggcaattccggcaagatggcggggccctcgatccagatgaccatcgcggcggcggaggatatggacgttatcgaaatcagcggctgggaaggtgtcaccgtcatgtttgaaggtgataacggcctgacttacatgatgaccggcgcggcaaccgcagaacccgccacgctggatgaagacgcgggcactatcagtgccaactttatcggcgaaaaactggtgaaggtataa

SEQ ID NO: 184758 - DNA, 1482 bp, Klebsiella oxytoca
atgtcgtcactgggtaatattcctgctgatgtccgcgtcccgctggtatacatcgatatcgacaattctcaggcgctcgacagtgccccggctcagtcgcgcaaaattatcgtcatcggccagcaaagtgcgactggcaccgctgccgttctgacgcaaaaccgcatcaccagcgacggcaccgctgaccagctctacggtaaaggctccatgctcgccgggatgctcaagaccctgcgtaaggccaacagctataccgaagtgtgggcgatgggcctggctgatatcgctgccggtgctgccgcaaaagcagagctggccattactggcccggccaccgctgccggtacgctggccctgctggttaacggtatatcggtgcaggtcggcgtcagtgctgacgataccgctgacactatcgcgacagccattatcgccgccgtgaataaactcccggatacgcaggtcatcgccgcgctgaaagccgcatcaacaacgtcagtcaccctgaccaccaactggcaaggtgcgaccggcaatgcgatggacgtccgcctcaactactacaccggcgagcagacaccggcaggcgttgctgttgccctgactgcattcaccggcggcaccggcaccccggatattgcggctgtcgtcgcggcgctgggcgatgactggtacaccgatattgtgttcccgttcaacgatacgcagagcctgaacaccatccgggatgaactgctcgaacgctgggggccactcaagatgattgaggcgcagctctggacggctttccggggcacccatgccgagtcaggcacctttggcgaaacccgcaatgactggctgatttcctgtatcgggaccaacatcgcaccgcaaccgcactggctgtgggcggcatcctacggcggcatagcgtcctattatctggccaacgacccggcccgtccgctgcagacgctggtgctgccgggcatcctgccgccggtcaagacagtgcgctgggatatgccggagcgcaacctgctgctgcatgacggcatcgccacccattacgttgacgccagcgataacgtctgcatcgagcgtgaaatcacgatgtaccgcgtcaaccagtatggcgacgccgatacgtcgtacctcgacgtgcagtcaccggcgacgctggggcgtatccgctacgtcatcaaaaaccgcttcaccaaccgctacccgcgtcacaagctggccggggatgatgtgctcgacctgcttgatccgggccagccggtgatgacgccgaagattgcccgcgccgagctgctggatatcgcgctgactgagcttatcccggctggtctggttgaggacttcgacgactacaaagacacgctggatgtgtatctcgacggcgacgataaaaaccgcctgaacttcatctgccacccgaacctggtcaaccagctgcgtgtgctggccggtctcgtccagtacaaactttaa

SEQ ID NO: 184759 - DNA, 210 bp, Klebsiella oxytoca
atgaagaaacatattaagcccgcccgcgcgggactgcaggtacgtaaagccgatggccagcgcctgaatcccgaaggggaagagctgcctgtaagtgcgtggtggctgcgtcgagaagctgaaggtgatgttgttatcactgaaatccaggctgaatccgtaaccgaaccggcggaagtccgccagacccgaaccgtaaaggagaagtga

SEQ ID NO: 184760 - DNA, 306 bp, Klebsiella oxytoca
atgcgtaacgcggcccacctgaaccttctgaacgccgaaccacggatgcaccagttcaccgggaccggcagtattgagcgcggccagcaggcggttcatctggtcgatgtagtcactgccgagcaggatcgcgttaatctgctgctgtgtcagtaccgcgccgtggtcttccgtccagccaacctcttttttggggtaagcatgagggatggcgcggcggccgccagcgccctcgacgtcgcggaaaaagaaaggtacgccccggaacgaggcatcacgcaggtcttcccacttgatagccattag

SEQ ID NO: 184761 - DNA, 354 bp, Klebsiella oxytoca
atgagcattctgggtatggcggccattcgcgctaacggccgtgaaatcaaaagcacgggaaaatccacccttaatccgggcggtaaaacacgcacccaacatatgggcggcggtaaggtctgggggctggcgggcaagatggcaggtccctcgatccagatgaccatcgctgcggcggaggatatggacgttgtcgaaatcagtagctgggagaacgtgaccatcatgtttgagggcgataacggcctgacttacatgatgaccggcgctgcaactgctgaaccggcgacgctggatgaagacgcaggcacgatcagcgctaacttcatcggcaccatactggtgaaggtgtaa

SEQ ID NO: 184762 - DNA, 1482 bp, Klebsiella oxytoca
atgtcgtcactgggtaatattcctgctgatatccgcgttccgctggtgtacatcgatattgataattctcaggcgctcgacagcgccccggcgcagtcgcgcaaaattatcgtcatcggccagcagagtgcgaccggcaccgctaccgttctgacgcaaaaccgtatcaccagcgacggcacagctgaccagctttacggtaaaggctccatgctggccgggatgctcaaaaccctgcgtaaggctaacagctataccgaagtgtgggcgatgggcctggctgatattgctgccggtgctgcctcaaaagcagagctgaccatcaccggcccggccactgctgcgggcacgctggccctgctggttaacggtatatcggtgccggctggcgtcagcgctgacgataccgccgacactatcgcgaccgccattatcgccgccgttaacaaactgcccgacacgcaggttactgctgcgctgaaagcggattcgaccgacgtcgtcaccctgaccaccaactggaaaggcgcgaccggcaatgcgatggacgtccgtctcaactactataccggcgagcagaacccagcaggcgttacggtggccatcaccgccttcaacggcggcaccggcaccccggatattgcggccgtagtcgcggcgctgggtgatgactggtacaccgatattgtgttcccgttcaacgatacgcagagcctgaacaccatccgggatgaactgctcgaacgctggggaccgctcaaaatgattgaggcgcagctctggacggctttccggggcacccatgccgagtcaggcacctttggtgaaacccgcaatgactggttaatttcctgcatcgggaccaacatcgcaccgcaaccgcactggctgtgggcggcatcttacggcggtatagcgtcatactatctggccaacgacccggcccgtccgctgcagacgctggtgctgccgggcatcctgccgccgatcaaaacggtgcgctgggatatgccggagcgcaacctgctgctgcatgacggcatcgccacccattacgttgacgccagcgacaacgtctgcatcgagcgtgaaatcaccatgtaccgcgtcaacaagtacggtgacaccgatgaatcgtacctggatgtgcagtcaccggcgacgctggggcgtattcgctacgtcatcaaaaaccggttcaccacccgctacccgcgtcacaagcttgccggggatgatgtgctcgacctgcttgatccgggtcagccggtgatgacaccgaagattgcccgcaccgagctgctcgatatcgcgctgactgagctgattccagcgggtctgattgaggatttcgacgactacaaagacacgctggaggtctatctcgacggcgcagacaaaaatcgcctgaacttcatctgtcacccgaacctggttaatcagctgcgtgtgctggccggtcttatccagttcaaactttaa

SEQ ID NO: 184763 - DNA, 210 bp, Klebsiella oxytoca
atgaagaaacatatcaagcccgcccgcgcggggctgctggtgcgaaaatctgatggccagcgcctcagtcctgaaggggaaacgctcctcatgagcgcatggtggcatcgccgcgaagctgaaggtgatgttgttatcaccgatatccaggctgaatccgtaaccgaaccggcggaagtccgccagacccgaaccgcaaaggagaagtga

SEQ ID NO: 184764 - DNA, 441 bp, Klebsiella oxytoca
atgagcgcagaaagctcaggagtgtttactttgaaagagatcaaccggatcaagattatacaggacgtcattgaacgtcgcatcacaacgcgccgtgcggccgagcacctcggtatcagcgacaggcaatgccgcagacttcttgcccgttaccgtgaagggggaccgcttggtatggccagcagacgatgtggcatgcgtggtaaccgccagttgccacccgggctcgcagatcaggctctggaactgatcaagacgcgttatgctgatttcggtccgactctggcgcgtgaaaagctcgaagaactccacggactgtttcttggcaaagaaactgtccggcgcatcatggtgcgggctggggcttatgggttccccgtaaacaacgtgccgcaaggatccctcaaccacggtaccggcgtccgtgtactggtgagctga

SEQ ID NO: 184765 - DNA, 846 bp, Klebsiella oxytoca
atggaactgttgtttgttaaatcggagtccacgttttcttacttcgaagccacgcggcgctatatcgataagcatggtaaaccgctggcactgtacagcgataaagccggtgtttttcgtgttaacaataaacacgccacaggcggagacgggcatactcagtttgggcgagccatgcatgaactgaacatccagactatctgtgcagaaaccagtcccgccaaagggcgtgtagaacgagctcacctcactttacaggatcgtctggtcaaagagctgcggttacagggcatttgttcaatggaggctgcaaatgacttcgctgaggcctatatggctgactataaccgccgttttggcaaagtaccgcgacatgattttgacgtacaccgtgctgtagaacatgatgaggacctggggcttattttcactgttcgtgaaaaacgtaaagtctcaaaatcgttgacgatacaatatgataaaatgttgtacctgattgaagacagcgaactgagtcgccgtgcaataggtaaatatatcgatgtgtatcactatcctgatggcagaaaagagctgcgcctgaacggtacgctacttccctactctacctacgaccgactgtcagaaatcgaccagggcgcgattgtcgataacaagcgtcttggccgaaccctggagtttatcagtctggtgcagagcaagcgggataacacgcgctctcagtcaattcccgctggagatggcccttcccgacgacggccaaagcaggaagggaagaaatcccagcgctcactggataatgatgacatgctcgaagcactcaaacagcttcagtcacgttcatag

SEQ ID NO: 184766 - DNA, 633 bp, Klebsiella oxytoca
atgcttcgatacgagttaacgccgaacaatgcaggttttatactgtggggagattcagaagccctgaatgaattacatgaactcattcattacatcgtggatgaaagcccactgattaaagttaaagacggatttatgttatcccttgcctatgatattcgtaaagcacgggaaggtaatcgtcgtgttgagcaacatcagtatgatcaacatgatacatataagctttatggtgttgagcttttatggcctctggtcctggtacagtcctcaatactcagaaactcaatgggttatattcagacagacaaaaaccagctgtctgtcatgtatgcctttgaatacctgatagaatcagcattaacagagtctgagagaacaacgtcgaatgatattatgctaacagtaaaatatgcatcagactctgattttaatttcattgaggataatattgacagcaggtgctgctattttatcagcttatctccggagcaaagaaaaaagcagttaatcagtattgttcgttcttttcattcattatggggtaagtatgcctgtgaaaagcaggacataaagatgctgaacgaaatgaataatacatcatgggtctggccggacaatatcaactggtga

SEQ ID NO: 184767 - DNA, 504 bp, Klebsiella oxytoca
atgtcggtcagatgccgtgtgctgcaggcgagaactgtcggccacgctggacgaaatttcatccatcgtaaagacggccagccaatcctcatggccgtgatcggaagcactccgtttgagcgtggtgatgaggaggaagggtttctgattgtcacggccgcggctgataaaggtctcgctgatatccatgaccggcgcccgcttgtcctgatacctgacgccgcccgggagtggatgaaacaggacgtttcgggtaaggaagctgaacaaattgccgctgatgccgctgtgtcagctgatatattcttttgcattcagggttataaaaaagaaagaaaagttaaagatgcttttaaggggggaactcccggcctaattgcatctctgatgctgatggctgtagttcaatttgttaaggatgaaaacgactgttcgaataaatatggatctggtaatctgccagcttcagtgtgtgagacacttaagggacctggattcagataa

SEQ ID NO: 184768 - DNA, 378 bp, Klebsiella oxytoca; identical to SEQ ID NO: 86406

SEQ ID NO: 184769 - DNA, 285 bp, Klebsiella oxytoca; identical to SEQ ID NO: 86407

SEQ ID NO: 184770 - DNA, 261 bp, Klebsiella oxytoca
atgataatgggctacctgtttatgacttatgttgcggtcgtttcctgctggccagtatccttgattctgctcctgactttagcagcaatactgctacgttctgaccgaaagattttgcgtgttattatcatcgttagcgtcgcttttctagcctttgcagcctggcagtatggtacggtcgtgcacagtacctcttcttttctatcaggtggtttggcatggctgtcagggcaaattcctgcgtggagtgaaagtcgataa

SEQ ID NO: 184771 - DNA, 546 bp, Klebsiella oxytoca
atgcccttacctgaacgcatgaaaccagccaaaatcagccgtcagaaactaaaggaactggcggatatggccaaagaaatactgtcgcaaattgataacggcgccggcgaagatgatgaagggctaaaagcgatgattgatgactggaacaggcaggtcgttaatccgtatgaattctctgatttccgtgacttttcctcatggaccgacgcaaagaactttacccggatggcatttaatcaggagaaatacgttgcggatttaacctggaatgaactcgttcagataattagtttcgtgtgcaatgctgaaggtaaggaatcggaacaaagctacgcgctgggattgcttgagaaaaactttaatgccaatccctccgatctcatctactggcctaatgaatggttccaggacgaagacatgctccaggtagatttgacgcctgaagaaatcgccggatacctgatgacaaaatctggcagatttctaagcgatgcgcctgaaatcgggctcaaatacccgattcgttcaaattctacaagctaa

SEQ ID NO: 184772 - DNA, 195 bp, Klebsiella oxytoca
atgtcaaaacagtccgtcaaacctgtcttgctaagcgaagcacagattcaggcaatcataaaaattcaggaaaagcagcgccagcaatcaggtatcggcgttgcgccaactatccatgagatcgctcgaggactcgtggataaagcactagcgtccctttctaatgagtgcatgcctgacggcgtttgttcttaa

SEQ ID NO: 184773 - DNA, 1200 bp, Klebsiella oxytoca
atggtagctaagtcgatcgtagacattgacgtaaatgacgacaagtttgtcgcgtttatggaaaggtttcgagagtaccagagcgcgctggatgatttaccggaagcctggcgggtagctgccgttggtattggagaaagcagcaaacagaccgaaaaggccaaaggtgaggcgaaggagttaggcgcggagtttaacgccgtggccgaggccattctgaccatcaacagcggtatcgatcggctcaataccaacctggaagactcgaagaaaaagcaggatgaattcaacaaaagcactcgctctgcgaagggcttcatcagcgatgcgacgaaagacgctaaatcgctggcagggcacatcagtgaagcgacagctagtcttctgtcatggggtagcattgttggcttgtttaccggcgctctcggcgtaggtagcctgtttggtatcaatactctgggagcgggggcagctcagcagagatttatgtccctggggatcggtacgtcggcagggagactgagtgccatagaagccaactacaggagggcaattgggaatcctgcaggtacgctgggcgctatccgtgattctcaaatggacctgtctaagcgctggacgtttcaggctatggggattaacaatcccgaccaggacccggcaaaactgctcccgcagatgatccgcaacgcgcgcgatatcttcgtgcagaacggcagcacactgcagggtgcgcaggcgcacggcctgacaaacttctttactctggacgaccttaatcgcttcaaaaatatgagcaatgaagaaattgatgcgatggagagaagggcgaagaaggatgctgaaagattaaacattactgatgagcaaaacagaaaatggacggagttcattaatcagattgagctaagcgaaagaagcattaacagggcctttgtaatcggccttggtcctatggcgccgcaactgagtaaattgtcagatgcgttatccggcgcgatcgatacggttcttaaatcacctgatctcgggaagtggattgatgggcttgctggcggtatagagaagttcagtaattatctcgcatccccggatttcactaacgatgttaaccagtttatgacaaatatcagggaaatgggtgtaactgtcgataacgtcattaagtttcttggtgatgctgccaacttactgatttag

SEQ ID NO: 184774 - DNA, 579 bp, Klebsiella oxytoca
atgacaacaacattcttccccgtgtttttacacgcactcgctttcattcacgcccgcgaaggtggttatgttaatgaccccaccgacaaaggcggcgaaaccaaatacggcatttccgataaacgcgacggtcttgcggatggcaaaaccgacgtcgatggcgacggcaaacccgatacccgaattaaggacctgaccgaagaacaggccgggcagatttatttccgcgattactggtatccctcctactgctcagagtggcctgatggcatctccctttttgtgttcgattctgcggtacagcatggcgctaaaaaagcgatccagctcctgcaggatgcggtcggcgtcaccgctgatggcattgtcggtcagaaaacccgcaccgcagtagcatcagcagatgccgaatggctcctgacccgctgcttcctgcgccgctcccgttattacgccgacatcatcaaatccaacgcctctcagggcaagtacctcaacggctggtttaaccgcctggatttactggcgaacgcctgtcaggaggtcattggcggtcaggtctcggttccccggagctga

SEQ ID NO: 184775 - DNA, 513 bp, Klebsiella oxytoca
atgaaattctcaaacatcttaattcttgcagttattttgggtggtggatacacatactttttttcgaaagataaaagccccactgtaaatgaaaaactcattagccaatttgataaacatgatgttatcaacagtagcgagtgggggaaaggcaacgttattgatggagttcagatctatactgtccgcaaagattacgcagtattccagagtatctggagcttagggaggggtgaggctggcgtgatggttttaactgaaggaaaggagccaaaaattgaggcggccttcgctttaagtcagtgcaatcaactggccagcgcggtaatagacactaaagctgtcgctacttctgatgccgtattttctgtttttcaaaaagcgctaagcgctgaaaaagatgataaaggagtattgcgtgctactggcgaagttggtgggaaatcatatgatgtatctgctcgcgttatcgactcggtgttaacatttagttgtggaataaaaacaacataa

SEQ ID NO: 184776 - DNA, 555 bp, Klebsiella oxytoca
atgagccgcacatccatgattaaggtaatccatatcgcgaggcgtgatctacaccttgacgatgacacttaccgtgccctgctggggacggcagttcctggcaaaaccagttgcagcgatatgacggtcaacgagctgcagcatgtcatcaaggcgctggaggctaaggggttcaaaagcaaacctcagcgccgctctaagcgccgcatgtctgccccgtctgacgtcagcctgaaaatccgcgcgatatggaaaacgatgtttaacgagggttttatccgggacggtagcgatattgcgctcgaccgttttgtccagcgccagacccgtatccgtaatggaggcgctggcgtctccagcctggaatggttgcgcggtgatgccgaagcgaatttccttgagagcctcaagcaatggcacatccgggggatgaaagagactatgttagcacaccgcgtccggctccctgaaaacccggtcaccggtgatgaaagccgggactatgacacaatctgcagcgcttacgctgacgcagccagaaggtggataaaatga

SEQ ID NO: 184777 - DNA, 225 bp, Klebsiella oxytoca
atgccagccaataacaaagaagttccgtttgatatcgcagccttcactatggcggggaatatacttattgctctgaacaaaaaaggtattctcagccgggacgaagtcatcgatatcctgcaactggcccgcaaccaggcacccagagccgacgagatccgcgaacatcacacaatcgatatcgactggcacctggataaccttaaagccacgctgaaggactaa

SEQ ID NO: 184778 - DNA, 300 bp, Klebsiella oxytoca
atgtctgaagcaaataagtatccagttatctctcgggaagatgcatatattgataacgggcttctggttcgtataagagaaattgtcgagatggcgatagaaagcaaaatctcggtagatgaaatgctgagcattattcagcgtgaagtgaaattaattgacgaccaggtatcgctaaataacagaaaagcccgcgataagatcgtgcgtcgcgagcttgggcttgatgactccgtcatccttacaggcagggagtatgctgctgttttcagtttatggaagaaaaacccggaggattag

SEQ ID NO: 184779 - DNA, 495 bp, Klebsiella oxytoca
atgaatccgaaaacgaaaggtatttttgaggctgcgtttgctaaatggggcttcgattctcaggtgctggtactggcggaggaagccagcgaattatccgcttcctgtgtccgttttattaatcacaagaccggcagcgacaaagtggcagaagaagcggcggacgttgagatcatgattgaacaactgcgccacaacggaatgggaaccatgatagaccatgaaaaaaatcgcaaaatgaaccggctggcgcagattgttggcatggaatctcagccagtcagtccctttggtccgtctgttctggggctgctggaggaagccagtgaacaactggggctggctgagaccctgtatcgcgatacccaaaccagcaatcgatatgccgccgcccgcgcccgtatggccgtcagtctgctgatgcaggctgctcagaagatgacgcgcgaacagcagtatgccgaacgtatacaagcggaggtgaaaaatgtctga

SEQ ID NO: 184780 - DNA, 516 bp, Klebsiella oxytoca
atggtgctcggcatcgttgaggcggctcgtctgcagcgtcagtcgctggtcgagttcaagctcggttctatggcgaaaatcggtgactttatcgacctttcagcagcggagtacggcgtggagtatggcggtgccaaaggcaatgtcacactggtcagctttgatggccgttataagttggttcgcgccgtaggcgagcatcgcatctttgatgagcgcattcaggcagcgaaaaagctgattgatgactgcattcatgaatggtctgccggagctaatgaaaagattatggcaatggtcgatcatgccttccgcgtcaataaacagggtcggattgatatcaatcaggttctgggcctccgctcactgaatattgacgataccaaatggaatgaagcaatggacgcagtggccgatgctattcaggtcaccggaaccagccagtacctgcgtttatatgagcgtcaggataatggcacttataagcagatatcgctggatttagccaaactctga

SEQ ID NO: 184781 - DNA, 219 bp, Klebsiella oxytoca
atgggtaagggctgggattcatcgttacgcgcggggcggcgggaccgtctccgtcaggaggtgcttcaccgggttgccggtggccctccgcccgttccacaggactacacaggctgtgacggtactcatgccagctactaccgcaaaggctgggactccgtcgatacaagagacatcgtctggcagtgccagcgatacaaggaaaaacatcatgtttaa

SEQ ID NO: 184782 - DNA, 579 bp, Klebsiella oxytoca
atgacaacatcatttacccccgcattttctcacgcgctcgctttcgttctcgcccgcgaaggtggttatgttaatgacccgaccgacaaaggcggcgaaaccaaatacggcatatccgacaagcgcgatggacttgccgatggcaaaaccgacgtcgatggcgacggcaaacccgatacccgaattaaagacctgaccgaagaacaggccgggcaaatttatttccgcgattactggtatccggcttattgcactgactggccagatggtatctcactctttgtctttgattcctccgtgcagcatggcgctaaaaaagcgatccagctcctgcaggatgcagtgggcgtcaccgctgatggcattgtcggccccaaaaccaccaaagcagtaatcggcgctgatgccgaatggctgctgacccgctgttttctgcgccgttcccgctattacgccgagatcatcaaagccaattcctcgcagggtaaatacctcaatggctggtttaaccgtctcgatgagctggcgaacgcctgtcaggaggtcgtcggtggtcaggtctcagttccccggagctga

SEQ ID NO: 184783 - DNA, 486 bp, Klebsiella oxytoca
atgaataagttatggggacttttttttactgtattggtttcaaattcatgcattgctgatgacgctatgccatcttcaaccactttacttaaaaatttcgataaattggggattgtcgaaaaagggaagtggaagaatggggaatcccctgatggcattaaaacattaatttttcgtgatgttggtgacatatattccctcaatcctgattttgcttcttctgtctctcttactaaaggagagaaaaataaagaggaatttttacattctgaggaagtatgcaaaaatttggtttatggtgtggtaggagaaaaaaatcaggccattggcgatgtagtgacaaacattgtttatggtgctgcaagaaagaagacaagaagtgacagtgactctgtaaaagactattggatagaagctgagtttatttacataggtgaaactcccggattggcatgtaaagtatcaaaagttgtcaaatgggattga

SEQ ID NO: 184784 - DNA, 390 bp, Klebsiella oxytoca
atgagtgatgatctctttggcgatgttcgtgatgacagtttgctggatcatctcagtgatgaaactgagaatgtccgcttcccgtcgattcttgctgaactcaattcaatactgagccgggaactggcgagactgggcggcgattcttcgcattctctggagctggtaattgcgataacgcgtcatatcgggggaatgcaaatctatgttcctcggggacagcggcttgaattcctggtacgcgatatgcaaatctggcgggattactgtaacagggccagcgttgatacccttgtgactcgctaccatgtcacctacaaaacggtgtataaagctataaggcgtatgcgcaggctggagcacaaaaaataccagccatcacttttttga

SEQ ID NO: 184785 - DNA, 555 bp, Klebsiella oxytoca
atgactcgttcaaacgcaatccagattatccatatcgccaaaggccaactggcgcttgacgatgacacttaccgctccctgctgggggcggtagttccgggcaagtcgagctgtcgcgagatgaccatcatcgagctgcagaatgttattcaggcgctggaggctaaggggttcaaaagcaaacctcagcgccgttctaagcgccgcatgtctgccccgtctgacgtgagcctgaaaatccgcgcaatatggaaaacgatgtttaaagagggttttatccgggacggtagcgatattgcgctcgaccgttttgtccagcgccagacccgtatccataatggcggcgctggcgtctccagcctggaatggttgcgcggtgatgccgaagcgaatttccttgagagcctgaagcaatggcacattcgggcgatgagagaggctatgttagcgcaccgcgtcccgctccctgaaaatccggtcaccggcgaagaaagccgagactatgacacaatctgcagcgcttacgctgacgcagccagaaggtggataaaatga

SEQ ID NO: 184786 - DNA, 588 bp, Klebsiella oxytoca
atgattaatttagagcagattaaagctgatatcgccgcccgtaaggcgatgccagcatgggggcctcatacttccatcgagcgcatcaggactatcaatgccacgcttcccagcttttcactgaaaacggttgaggcgctggtagagatgctggagaagagccagcgtgcaaacgccgcccaggacgaccatataaaccagcagcaggaccgaatcgaccaactggagaatgcagctgctaggttggggcgccgcctgaaccagtattcgatggggccggtggctactctggatgtgcatagcgggcggtcagacggcaacaagttcgagctggcctattcatctgcggtccataaattgcctgatgatgtttatttcctctactgccgtgcgcggcctgcgtcggtagtgcccgatgatgcaaaactaagagagcttttcgattcctggtttgcgtcagattgttcttttgatcggtcgccggaggcgtcagaggcagataacatcgcctggcgggaatcttactggtacgtatggcaacgttgcagcactgccatcctctcagtctcccagttggagggcctatga

SEQ ID NO: 184787 - DNA, 498 bp, Klebsiella oxytoca
atgaatccgaaaacaaaaggtatttttgaggctgcattcgccaaatggggatttgaatctcaggtgcttgttctttccgaagaagccagtgaattatcagctgcctgctcgcgttttcttaaccacaaaacagacatcagcaaagtcgctgaagaagcggcggatgtcgagatcatgattgagcaactgcgtcataacggggtgggccccatgatagacaatgaaaaaaatcgcaagatggcgcgtctggctcaggttgttggtgttgagtcacaacctgtcagcccctttggtccgtctgttatggggctgctggaggaagcgaccgaacagatggggctggcagaaaccctctatcgcgacaccaaaaccagcaaccgctatgctgctgcccgcgcccgtatggcagtcagtctgctgatgcaggcggctcagaagatgatccgcgaacagcagtatgccgaacgtatgcgggcggaggataaagctcatgattaa

SEQ ID NO: 184788 - DNA, 447 bp, Klebsiella oxytoca
atggcaaaagtcgatgattttgttgacctgtcagcagcagaatttggcgtcgaatatggcggcgctaagggtaacgtcacgctacccagttttgatggccgctataagctggttcgtgctgtgggcgagcatcgtatctttgatgaacgcatccaggcggcaaaaaagctgattgatgactgcattcatgaatggtctgccggagctgacgaaaagattatggcgatggtcgatcatgcctttcgcgtcaataaacagggccggattgatatcaatcaggtgctcagcctgcgttcacttaatattgacgatgccaaatggaatgaagcgatggacgccgtcgcggacgcgattcaggtgacgggaaccagtcagtacctgcgtttatatgagcgtcaggataatggcacttataagcagatatcgctggatttagccaaactctga

SEQ ID NO: 184789 - DNA, 621 bp, Klebsiella oxytoca
atgttcgtttttggttacctccgggcatccacttcagagcaggatgccagccgggcaaaaaatgcactgaaggcgtttgcaaaccaacatggacaccgtattgctggctggtatatcgataatgtctccggtacgacaatgaatcgtcctgaactgatcaggcttcttggtgatgcggaacctggtgatgtgattctcattgaacaggtcgacaggctcactcgcctggatgatgcaggctgggagacactcagaaagcaaattacagacaagcagctggccatcgtcagtcttgatctaccgaccagccatctggcgctatccagcacagtaagtgatgactttacccgaagcatgctgaaggccgtaaatggcatgatgctggatatgctggccgctattgcccgaaaagattacgaagaccgtcgacgtcgacagtcagagggtatcagtaaggcgaaagctgaaggaaaataccggggcagggtggccgatgcgcagaaacatgaactgatacgcactctgcgcctggtcaatggaaaatcgctgcgagaaacagctcgcctggcgggcgtttctaaaatgacagtaattcgggtctgctccagcgctaacaaataa

SEQ ID NO: 184790 - DNA, 279 bp, Klebsiella oxytoca
atgcgcgttgccgaaagcatcatcctcgatgccctcactcgcggaggatgcatcaaaaccttttaccgcatatcctcacggcaggctgctgaatcggccacgcggatacctgaggggtatattctggagtcgcccggcgagccggaagatattgtgctcagccatgcggactttcatgcactggagaagcagctggagcagaaggaaacctgggagcaggtggtcggtgtgacctgttttggtggggcaacctggcagctgagagccggggccgtgtga

SEQ ID NO: 184791 - DNA, 300 bp, Klebsiella oxytoca
atgagcggtaagcgttatcccgaagagtttaaaattgaagcagtcaaacaggttgttgatcgcggttattctgttgccagcgttgcaacacgtctcgatatcgccacccacagcctttacgcctggataaagaagtacggtccggactcatccactaataaagaacagtcagatgctcaggccgagatccgccggctccagaaggagctgaagcgggttaccgacgaacgggacatattaaaaaaagcggcactgttgcaaatagtcggtggtgataaacttatcatccccttttgctga

SEQ ID NO: 184792 - DNA, 1770 bp, Klebsiella oxytoca
atgaccgttgccattaccgatgtcgtcctgcgcgacgcccaccagtcccttttcgccacccgcctgcgcctcgacgatatgctccccgttgcggccgccctcgatgacgcgggctactggtcccttgaatgctggggcggcgccacctttgacgcctgcatccgcttcctcggcgaggacccctgggtccgcctgcgcgagctcaaaaaggccatgccgaagaccccgctgcagatgctgctccgcggccagaacctgctcggctaccgccactacgccgatgacgtggtgcagcgcttcgtcgagcgcgccgtcaaaaacggcatggacgtgttccgcgtcttcgacgccatgaacgacccgcgcaatatgcaggccgccctgcaggcggtgcgcagccacggcgcccacgcccagggcacgctctcctacaccaccagtccggcccacaccctgcagacctggctcgacctgaccgaacagctgctggagaccggcgtcgattccatcgcgattaaggacatgtccggcattctcaccccgatggcggccttcgagctggtgagcgaaatcaaaaagcgctatgacgtcaggctgcacctgcatgctcatgccaccaccgggatggcggagatggccctgctgaaggccatcgaggccggcgtcgacggcgtcgataccgccatctcttccatgagcgccacctacggccacccggccaccgaggcgctggtggcgacgctggcaggcacaaaacacgacaccgggctggatatcctgaagcttgagagcattgcggcgtacttccgcgaggtgcgcaggaaataccacgcctttgaaggccagctgaagggcaccgacagccgtatcctcgtggcccaggtgccgggcgggatgctcaccaacctcgagggccagctgaagcagcagaacgccgcccaccgtctggatgaggtgctggcggaaatcccccgggtgcgcgaggacctcggctttatcccgctggtcactccgacctcgcagattgtcggcacccaggcggtgcttaacgtgctgaccggcgaacgctacagaaccatcgcgaaggagaccgccgggatactgaagggcgagtacggccaccccccggtgccggtgaacgcggcattacaggcgcgcgtgctggacggagcagaggccatcacctgccgtccggcggacctgctgaagccggagctggcgcagctggaagccgacgtgaagcgccaggcgcaggagaagaatattcagcttgccgacaacgccatcgacgacgtgctcaccgtggccctgttcccgcaggtcggcctgaagttccttgagaaccgccacaacccggcggcgttcgagccgctgccgcaggctgaagaggtcaaaccggcggtgaaagcagagaaaccggccgcctccggcgtctacaccgtggaagtggaaggtaaggcctttgtggtgaaggtcagcgacggcggcgatatcagcccgctgacggcagcggcccccgttcaggccacggcccccgcagccgccccggcaggcgccggcaccccggtgaccgcgccgctggcgggcactatctggaaggtcatcgccggcgagggccaggcggtggccgagggcgacgtgctgctgattctggaagccatgaagatggaaaccgaaatccgcgccgcgcaggccgggaccgtgcgcggtatcgcggtgaaatccggggacgcggtggcggtgggcgacaccctgctgagcctggcgtaa

SEQ ID NO: 184793 - DNA, 249 bp, Klebsiella oxytoca
gtgaccgccgggaaagtcgcgcccgctaaccgcgatatgtatctggccctttgccgcagtcaagaaggccgtcagcagtttgcagagttcgtgaaaactgcgcagccgctggtcaatcaggacccgtcaaaaggtaaagagaacaaggggcagcagaccacgctgaccgaaaccgaactggcgatgtgtcgcagcatgggtcttacccaggaagagtttctcgccgctaaaccgaaacaggagcaataa

SEQ ID NO: 184794 - DNA, 621 bp, Klebsiella oxytoca
gtgagtggaacgaaagaaaaaacaacgggtaagcaaaacgctaaaggtcgcgctggcaaggtttcagcgtcggaagtggcacaggctgatgcatctgacctgccgggagctgaacggtcagtcacattgccagggcattacattgcggtgggtgcgtcctccgtcagtgtgacttctggcgatactggtgcgccttcgtcatctgatgacgtcattaccttgaccggggacagcgtcagcatttctgcgcctgcgattcacatttcagcggagcaccttaattccgtacagcgtgaattacagacaaacctgacccccgaaggtctggccgccggtggcggaagtgagaaccttatcaccgcgtcccctacaaccgatgatgtggtggtgctggaggttcgcgcccgttctgagcgtgggttcttccgctgtggccgcttctggccacgcgagccggtgcatgtgtttgtcagcgacgatcccgatggcgataacgaagcgaacgcgctggagggtgatgtggtcgtggaaagcttcatcagccacgaaaccgcacagcgcctgaaagctgagcctcatcttgtggtgacggtcctgcagacggtggcggaggaaaactga

SEQ ID NO: 184795 - DNA, 543 bp, Klebsiella oxytoca
atggggatatcggttgaggttatcggtgctgagaagctgcagcagatgcgactggccatcgagaaactctctgacagctcgctgcagcaggaactgctggagagtatcggcgctgtcgttgaatcgcagacccgtcgccgcatcagcgacgagaaaacctcaccggctggcgagcgctgggaggaatggtccgaaggttaccgcaagacccgcagcgggaatcagagcctgctgcaggggaatggcgatctgctcgacagcatccagtacatcgtcgagcgtggccgcgttcgtgtgggttcgccgctcagctacagcggcgttcatcaggacggctttgcaggcagcgtcccggtcagcgcccacaagcgtctcattcatcaggcgtttggccgggccctgaagcatccggtctggcagaccgtgggctcccataaccgccagatgaatattccgcagcgcgagtacctcgggctgtccggttcaaacagtgatgagctgatgcacatcatcggcgacttctggaaagaggtattaccgtga

SEQ ID NO: 184796 - DNA, 300 bp, Klebsiella oxytoca
atgtccattattctcagtaagccgattaagcgcggcgatcaggaaattactactatcaccatcaacgagaatatcaaacaggccggctccctgcgcggcctgcgtctggttgatgtactgaacttcgatttcgatgcggtctctacgctgctgactcgcgtcaccacaccatcactgaccacctctgatgttggcgctatggcaaccggtgactttaccgccatctgtgaagagattacgccttttttgacgaaaccggcgccgtccgtaccgaacgcggcggagacggagagcgaataa

SEQ ID NO: 184797 - DNA, 516 bp, Klebsiella oxytoca
gtggctattcctaaaaaactccggctgttcaccgtctttgtggacggcgtgaaccatatcggcaaagtccccagcgtgacgctaccgaaagtgacccgtaagaccgaagattaccagggcggcggtatggtgggcgcggtggctgtcgatctgggtctggattccggggcgctcgatgcgtcaatggttgttggcggtgtggtcgaagagctaattctgaaatacggcggtgatatcgacgaaatgcgcctgcgctttgtcggcgagatttacagcggcggtaccagctcactgctggaagttgagatgcgcgggcgtatcaccgaaatcgatccgggtgatgccaagcagggtgatgacaccaaccacacctacgccatcaaaaacacctactacaagctgtcggtggacgataagccattgctggaaatcgacctgctgaactttatctacaagcggaacggtcagaatctctatccggatcgcattatgtcggcgctgggcctcggcagctga

SEQ ID NO: 184798 - DNA, 939 bp, Klebsiella oxytoca
gtgatcgtagtgcgcgttgccgaagctgaggccggcgaaggcaagccaacgcagtcgcagctgattatcggcggcacgcaggcggacggcagctacacgggtatgtttgcctttctgacggcggagcagaaaaccggctatcgcccgcgcattctcggcattccggagtacgacaccgccgaagtgaccgcgcagttgcgggttatcgcgaagcagctgcgggcgttctcatacagctactgcgacggctgcgacaccattgcggaggcgaaaacctaccgcgagacgtttgcggaacgcgaaggcatgctgatctggccgaacttcatcgcctataacccgctgaccggtgtgaatgaagaattcccggccgtggcttatgcgctgggtctgcgggcgctaatcgacaacgagcagggctggcataaatcactgtctaacgtgccggtcaaaaatgtgctggggattgcgaaggacgtgttctgggcgttgcaggcggaagattctgacgccaacgagctgaacgccaacgagatcaccacgctcattaagcgcgatggcttccgcttctggggaaaccgcaccaccgacaccgaagaattcattttcgaggtatacacgcgaaccgcgcagattctggcagacagcatcgcagaagcgcagttcactaccgtggataccccgctgacccctgcgaacgtgaaagatgtggtgagcgggattaacgccaaacttcaggcgctggtcacggctggcaagctgattggtgcggcctgctggtatgacgtcgttgataacccggtaacaggcattcgccagggtaaagctatcgttcgctacaactacagcccggtgccaccgctggaagatctgacgatgatccagacattcaccgatcagtattacgaatccgcttttgcatcgctgggaggtgaatag

SEQ ID NO: 184799 - DNA, 858 bp, Klebsiella oxytoca; identical to SEQ ID NO: 184729

SEQ ID NO: 184800 - DNA, 1584 bp, Klebsiella oxytoca
atggccggaccattgtcagcgcaggaacagttacgtaatcagtccgccagcgccattctggcgggagaattcgacgcggatcaggtgctgctgccttatcagcgccgctggattgcggacacgtcccagctcaagattgccgagaaatcccgtcgtaccggcctgacgtgggcggaagccgccgaggccgcgctcagcgggtcaatgtcaccggaagccggaggaactgacaccttctatgtcggcaccactaaagacatggcacgtgagtttatcgacgcctgcgccatgtgggcgaaggcatataatctcgcggcctccgcgattggcgaggaagcgctggaggatgacgacaaggacatactggtttacgtcatcaactttgccagcggcttcaaaatcaaggcgctgtcgtcaaacccctctaacctgcgcggtatgcagggtaacgtcatcattgacgaagcggcattccagaaagacctcgctgccgtgctgaaagcggcgctggcgctcaccatgtgggggtctaaggtccgtttgatctccacccataacggcattgaaaacctgttcaataccatcatcactgacagccgcgcgggcaaaaaacggtactccgttcatcgtattgatattgaaacagctatccgagagggcctctataagcgtatctgtcaggtcacccaccaagagtggtcaccggaagccgaggcggagtggctggcgaacctgctgagcgataccgccaccgaggaagacgcccgcgaggaatactactgcgagccgaagaacggcggtggcacctatcttgcccgctccatccgtgagcgagctgcgcggggcaccggtcccgttctgcgcttcaccggcacggctgcgttcaatgccatgccggaaatcatccgggcgctggatatgcaggaatggctggatcaggaggtgctgcccgtgctgaacacgctgccgtaccttcgccactgcctcggcgaggactttgcccggtctggccacctgaccgtttttgcgccgatgaccgtcaacgatgacaccacccgtaccgtgccgttcctggtcgagctggccaacgttccctacaagcagcaggagcaggcgctgttctttatctgcgaccggttgccccgccgcgacggtatcaagctcgatggccgggggaacggtaactatctggccgagcaggcggctgagaagtacggcgctgaggtggaggtggttatgccctccgtcgcccactaccgcgagaacatgccgcgctttaaagcggcgtttgaggatgatgaactggtattaccgaagcatgaggacgttatcagcgacctcgggcagattgtcgttcagcgcggagtgccgggtattgatgaccgggagaacaccggcagcgatggccacaagcgtcacggcgacagcgcgtatgcgatcttcctcgcctttctcgccagcaaagaagactgccagcgttacgaacttcaccggcttaacaaaccccaacagcagcgtaacagcgacagtcgtcgtcagttgcgcattacccgtggtcttaaaaatcagcgaggactgctctga

SEQ ID NO: 184801 - DNA, 576 bp, Klebsiella oxytoca
atggcagttgaaaaaccaacccgtggtcgcccctccaaaatcgacctgctgcctgatggcgttcgcgaccagttgcaccagatgctgcgtgagaaacgtcatacccaggaagagatccgcgaggccatcaacgaacttatcgacggccacaacctgccggaagacatgaagctcagccgcacgggcctgaatcgctacgccagccgtatggaagagttcggggccaaaattcgcgcctcccgcgaaatggctgaaatctgggccgcgaagctgggttctgcgccgacgtctgacgtcggcaaattgttgatggagtttgtgaaaacgctggcattcgaaacgtcgatgtcactcgctgaagaagaaggcccggttgagccgaaggccctcggccagctggcgctggttgctcagcgtctggaagccgccgcgatggccagccacaaacgcgagaaagagatccgccaggccttcgccgaagaagccgccgcgcaggcggagaaaatcacgaaaagtgccgggctgtctgcggaaaccgccgctgatatccgtcgccagattctggggatcgcatga

SEQ ID NO: 184802 - DNA, 843 bp, Klebsiella oxytoca
atggctaaagctcccgatattatccccaaagaggcactcgcctggctgaagtcgaaaaagctgacgccgggcttcgattatcgcgatgtctggaagcaggagcacagcatcggtttcaccgtggcgaagatgacgcagctcgacctgctctctgacgtcaaagcgctggtcgaagacgcgatggccagcggtcagtctttcgctgaattccgggaggtgctgaagcctctgctggtgaagcgtggatggtggggtcagcagatgatggatgacccgctgacaggtgagacaaagacggtgcagctcggcagcgatcgtcgtctgcgcactatctacgataccaacatgcgtactgcccgtagtgctggtcagtgggagcgtattcagcgtacaaagcgtgcaatgccctatctgctctatacgctgggtccgtcacgcgagcaccgcgccgagcacctgaaatgggctgacctttgtttgcctgttgacgacccgttctggcagacacacatcggccccaacggctggggctgtaaatgcggtgttcgccaggtcagcaaatacgagtacgatcagctgcagaaaaatggcgttacgcgcaacgtgcagcagctcgacgacagcggccagccaaccggccacgttattcgccagactgtgccggtccgcaccgaagccccgccggtcagacgggtgaagtgggtgaacaagcgtaccggtgaagaggagatggtgccggagggaattgatccgggctgggactacaatccgggtatgcgccgacaggctgaactggagcgccagctggccgcgaagcaaaacgcctttgacagtgacaactaa

SEQ ID NO: 184803 - DNA, 1572 bp, Klebsiella oxytoca
atgttaaaaaaacttaccggggccatccgcagcctgttgagtccctcaacgggtgagccggtcactgtcagtgaatcggatatgaaacaggctgaagcgagggccgggagcgtcagcgtcaggcgaccctctccgggcatcagcgtggcgagtaccttatctccggccagactggccggggtgttacgtaatgtgaccgaaggcaatgccagcgattactttatcctggccgaagaaatggaagagcgtgacctgcactattccagcgtcttacgtacccgtaagctgaccgtcgccggtattcctccggcagtggaagcggcgagcgacgatgaacatgatgtgatgctggctgatgccgtacgcgatctgattgagcagccgcagatacctgagctgctgtttgacctgcttgacgggctcggcaagggtgtgggtgtctgcgaaatcctctgggacacccgtgacggctggaaaccccgcgactatgaatgggttgacccgcgtttcctcaaacctgaccgcgagacccagcgccagtttcgtctgctgaccgatgaacagccggtcgatggtatcccgctgacgccgggtaagtatgttatccattatccccgcctcaagtccggtctgcccctgcgtaacggtctggcccgtctggtggcggtgatgtatatgctgaagtccttcaccgttcgtgactggtgggcgtttgccgagaagtttggcattcccatcgtcgtcggtaagtacgggaccaatgcctccgatgagcagattaagatcctcattgacgccatcagttccattgcttccgatgccgggtgtgctatcccccagagtatgcagcttgagatgcaggagacggccagccgtaacggcggtggtgctctctttaaagaaatggctgagtggtgcgacgcccagaccagtaaggccgtactggggcagaccatgaccaccgatgacggcagttcgcggtcacaggccgacgtacatgaccgggtgcgcatggatattgcccgctgggatgcccgtcagttggaaaacaccctcaatgagtttctggtccgtccgtttattcagttcaactacggcccgcaggaaaagtatccgcgtgtgaagctggctatcagcgagccggaggacctcaaagcctttgtcgatgcgcttatccccctggttgatcgtggtttgcgggtgcaggaatcagaggtccgggacaagtttggtctgggtgagccggagaccggcgcggtagtactctcgccgtccaacagcttctctgccttcagcccggcaccggcgctcaaccgtgagcaactggcgcttaaccgctcgcaggacgatgcgattgatgcgatggtcagcgaggcgctgaaggactgggagcagaccggcgatacatttaccagtccggtgctgcagctggcgaaagacgcggggagctttgaggagtttctggcgcgtctgccggacctgcagaagacgctggagcctgccgcgttcgtcgagcagctggcgatgctgagctttaaggcgcggacactgggagatgcgaacgatggctaa

SEQ ID NO: 184804 - DNA, 903 bp, Klebsiella oxytoca
atgccgcaaccgtcagcagaaatcctgcacgcgctcaccacatccctgagcgccgctttcactaaaggtcttgcgggcgttacgccgcagtacctgcgcatcgccaccgaagtgccgagcagttccgcctcgaatacctatggctggctgtccgatttaccggaaatcaaggagtggatcggtgagcgacaactcgcagtactgagtcagcagggttacaccgttaccaacaggacctgggaaagttcaatccgcgttaaacgggaaaccattgaagacgatcagcttggccagttcagcattattgccagtgggtttggtcgtaaaatcggcgttttcccggatacgctggcatttaaattgttatctgaaggcttcagttctctttgctttgatggtcagtatttctttgataccgaccacccgatggcgggtggtacttacagcaacatcgtgggcgatatcgcgactgacaccggcgagccgtggtttctgattgatgaatctcaggtgctgaaaccgatcctgtttcagaaccgccgtccgtttaaattcgtctcccttgatgacctggacaatccccacacgcttttgaataacgagttcatctatggcgttgatggtcgttgcaacgtcggatttggtttctggcagaccgcagtgggttcgcgtgcaccgctgacgacagaaaactacgaaaaagccgttgaactccttctgggcatggttcgtgacgatggcgaaccgctgggcatcaatccgaccacgcttgttgtcggtcgtaaaaaccgggctgccgccaaaaaaatcattgatgccatgctggttgatggtggtgattccaacatctactacaaagacgtggatattgtgaacagcccgttcattaccacccctgcgtaa

SEQ ID NO: 184805 - DNA, 507 bp, Klebsiella oxytoca
gtgagtggaacgaaagaaaaaacagcgggtaagcaaagcgctaaaggtcgcgctggcaaggtttcagcgccggaagtggcacagactgatgcatctgacctgccgggagctgaacggtcagtcacattgccagggcattacattgcggtgggtgcgtcctccgtcagcgtaactttgggtgaagtcgatgcatcactgacgcctgaaggtctggccgccggtggcggaagtgagaaccttatcaccgtgtcccctgcaaccgatgatgtggtggtgctggaggtacgcgctaaatcagagcatgggttctggcgctgcggccgcttctggccacgccagccggtgcatgtgtttgtcagcgacgatcccgatggcgataacgaggccagtgcgctggagggtgatgtggtggtggagtgcttcatcagtcacgaaaccgcagagcgcctgaaagctgagcctcatctggtggtgacggtcctgcagacggtagcggagaaaggctga

SEQ ID NO: 184806 - DNA, 441 bp, Klebsiella oxytoca
atgggtatttacgttacccgtgatgacctgctggctgcggacgggtcgctggtctggactatggccatcgacaaggcaacgaaccagctcgacgaaacgaagatagccacggccatcgaggatgccgacgcggagatcaactcgtttctgtcgaagcgctatcagttgccgctgaacatcaccaccgttccgcgcccactgcatcgggtagccgtatccatcgccatttactggctgtccgagcgtgacaatcagatcaccgacctgattcagaagcgctacgacagtgccgtccagaccctgaaggagatggcgaacggcacacgcgacctcggcctgccgaccgacacaccggccccggagaccgataacggcaggatgattgttgtctccgataacaaacgtctgttcacccgtaacaacctcaaaggggtgctgtga

SEQ ID NO: 184807 - DNA, 543 bp, Klebsiella oxytoca
atggggatatcggttgaggttatcggtgctgagaagctgcagcagatgcggctggccatcgagaaactttccgacagttcgctgcagcaggagctgctggagagtatcggtgctgtcgtggaatcgcagacccgccgccgcatcagtgacgagaaaacctcaccggctggcgagcgctgggaggagtgggccgagggttaccgcaagacccgcagcgggaatcagagcctgctgcagggcaatggcgatctgctcgacagcatccagtacatcgtcgagcgtggccgggtccgcgtcggttcgccgctcagctacagcggtgttcatcaggacggctttgcaggcagcgtcccggtcagcgctcataagcgtctcattcatcaggcgtttggccgggcgctgaagcatccggtctggcagaccgtgggctctcatacccgcgagatgaatattccgcagcgcgagtacctcgggctgtccaccgcaaacagtgatgagctgatgcacgtcatcggcgacttctggaaagaggtattaccgtga

SEQ ID NO: 184808 - DNA, 405 bp, Klebsiella oxytoca; identical to SEQ ID NO: 77461

SEQ ID NO: 184809 - DNA, 351 bp, Klebsiella oxytoca
atgatatccctcccgtcaggtacccgtatctggctggttgctggcgtcacggatatgcgtaaatcgttcaatggtctgggcgagctggtacagcatgcccttgatgaaaacccgttctccggccacctgtttatcttccgtggccgcagaggtgacaccgtaaagatactctgggccgatgctgacggcctgtgcctgttgaccaaacggctggaagaaggccagttcatctggcctgctgtacgcgatggtaaaatcgccattacccgctcacaactcgccatgctcctcgataagctggactggcgtcagccaaaaacagctcgtcttaactcactgacaatgttgtaa

SEQ ID NO: 184810 - DNA, 1590 bp, Klebsiella oxytoca
atgagtcaggactatctcgcccgtatcgccgcgctggaagacgcgcttcgccagaaagacagtcagcttagtctcgttgctgagactgagtcgttcctgcgttcagcgctggcgcgcgctgaagagaaaatagagaacgaagagcgcgaaatagagcatctgcgggcgcagatagaaaaactacggcggatgctgttcggtacccgttctgaaaagctgcgccggcaggttgaagaagccgaagccctgctgaaacagcaggagcagcaaagcgatcgttacaacggccgggataacgatcagcaggttccgcgtcagcttcgccagtcgcgccatcgtcgtcctctgcctgaccatcttccacgcgaaataaacaggctggagcccgaaacctgttgtccggactgcggcagcgatatggcatacctcagcgaagtcagcgcagagcagctggagctggtctccagcgccctgaaagtgctccgcacggtcagggtgaaaaaggcctgcacccgatgcgactgcatcgttgaagcgtcggcaccatcacgccccatcgatcggggtatcgccgggccgggtctgctggcccgcgtgttaacggccaaatactgcgagcacctgccgctctatcgccagtgcgaaatctttgcccgccagggcgtggatctgagccgggctctgctctccaactgggtggatgcgtgttgccggttgatggcaccgttggatgaagccctttatcgttacgtgatggactgccgcaaactgcatacggacgataccccggtgccggtactggcaccggggaggaagaagacgaaaaccgggcgcatctggacgtatgtgcgtgatgaccgaagcgctggatcgtcagacccgccagcggcgtggttcgccttctcccctgaccgacaggggaaacatcctcagcagcatcttcgccattatcatggcgtactgcaggccgatgccttcgcagggtacgacaggttgttcagcgcagagcgtaacggtggcccgctaacagaagctgcatgctgggcccacgcgcgtcgaaaaatccacgacgtctatataagtactcagacggccaccgccggggaagccctgaaacgtatcggtgagctgtacgcggtagaagaggaaatacgcggcctccctgcaactgagcggctggcaaccaggcaatcccggagtaagccgctgctgatatccctgcatgactggttggtggagaaaagcgccacgctgtcgaaaaaatcccggctgggcgaggcgttcgcttatgccctgaaccagtgggatgcgctgtgctactactgtgatgatggtctggcagagcctgataacaacgctgccgaacgagcccttcgtgctgtctgccttgggaaaaagaattttatcttcttcggcagcgaccacggcggtgagcgaggagccctgctgtatggtctgatcgggacgtgcaggctcaatggcatcgatccggaaacctacctccgccatatcctgagcgtactgccggaatggcccagcaataaagtggctgaactactgccatggaacgtagagctcaccaataaataa

SEQ ID NO: 184811 - DNA, 1179 bp, Klebsiella oxytoca
atgggccgctttgattctgatgattcattatttgatgtagatgatgtggctggtaaagtttcacacttcgcctctaacaattttatgccttggcataaaccacgtaagcaatatattagagaccggcaatgggtagagcacctggttcgccttattagacaaaaaaaatttaagcatgtagatacgattaattacttcggcttgcctggtggagatttgctcgatataaattatatacataagggcctcagccgcacttcaaaatataatggaaaaaaacttggtttccatgggcttatcgataatgttgatgactataataaagcccaaggtgagtttacgaagcttctggatatggaggatatatctaaccagtctcgattagataatttcaattttgaagaccttattaagtacgactctgcagtatgggcaagaattagaaattttggcacttatcattttattaacctggacttctgtaataatgttttaactgataaaactctgccatctctgcactatcttctgcaataccaaatgcagaaagcagtgggtatgccttggttgctttgtataactacaagattgaataaagatagcgctaataaagatatcatggagaagtttcaaattgttattgatgaagtcgttcagggaggtgctctcgcagataaaattaaagcctgttttaacgaagcatatgaatgcatgcgaactttggataatttgaatagcgcagataataagatattagtgaaccagatactacaaatatgtctagttttatggattttaaaatcagctattgccttgaaaaataaaattgaattaaaaagcagctttaagtattcagtagatctcttcaagagagagtcggatatgcattcgtttgtattttcatttgagaaaccagaagaagcaattcctgattgcattggtgttgtttcggttaaagaaactaaagtcgtcgatgttaattacgaagtattggcttcatttgcaatagaaaaacttagcgaaactcttgatgttgataaatatttagatgaaagacctgatgagctcgataaatatgcgaatgaaatgatggtgctattaagcaactgcggttatgatgtttctggttataaacggttcatgaatgagacctatggatataaatgtagtctagtttga

SEQ ID NO: 184812 - DNA, 954 bp, Klebsiella oxytoca
atgattaaatcacctatcaaatgggctggcggcaaaacccgcgttatgccgcagctgctgaagcatctgccgaaagctgattgcctgattgagccattcgttggcagcggtaccgtatttatgaacacggaataccgccgctatgttctctgcgataacaatcgcgcgctgattaacttctttcgcgtattgacctctgacaccgagagactgatcgacaccgcacgcggaatgtttctgggtggcaataacgaagagcaatattacaagcgccgggcactatttaactccatgcagtggagcgatacaggcaaagctgatgccgctttgctttacgccactttgtttctgtatctgaaccgccattgctttaacggagtttatcgcgtcaatcagttaggtgagcataacgtcccgttcgggaaatatgccgcaccttactttccggctgacgagatgcaccgctttgctgaaaaggccaaagacacaaaagccgttttcattgatggcgattttcgccacaccatccctgacgttatgcagctggcgtatgatgccgttatttactgcgaccccccctacatcccggccagcaaaaccgcaaatttcactgcctacggcaagccgttcacgctggacgaccatcatgcgctcgtttcaaccctgctagatgctcatcgccagcacggcacccgcgcggttatctcaaacagcgacacccccgagacccgcaagatctactccgctttcaatctccacgccttcagtgttcgccgctctgtcagcgccaaaagccgcgacatggctggcgaggttattggcgtgcttcgcgtatgcggtcgctgtggtcgttctggcggcggcaattgcccgtattgcaggccagtaaagaggctttccacttacggcgcaatggcggcggcgggtgcattcgacgggacggagggattctga

SEQ ID NO: 184813 - DNA, 852 bp, Klebsiella oxytoca; identical to SEQ ID NO: 92462

SEQ ID NO: 184814 - DNA, 522 bp, Klebsiella oxytoca; identical to SEQ ID NO: 92461

SEQ ID NO: 184815 - DNA, 153 bp, Klebsiella oxytoca
atgcagtggttcgaagcggcagacctgatcgttaaaggcaccgaaggcgcaatcgccgctaagaccgtgacctatgactttgaacgtctgatggaaggcgctaagctgctgaaatgttcagagtttggcgacgcgattatcgcgaacatgtaa

SEQ ID NO: 184816 - DNA, 225 bp, Klebsiella oxytoca
atggcgaagactaaatcagttcgcccaccgtttgtcgtgggcggcgttgatacgcataaggacctgcacgttgctgcagtagttgatgaaaacaaccgcgttttaggcagtgattttttcgcgacaacccggcagggatatcggcagatgctgacatggatggcatcttttggggcactgttgcaaatagtcggtggtgataaacttatcatccccttttgctga

SEQ ID NO: 184817 - DNA, 144 bp, Klebsiella oxytoca
atgaacccattcaaaggccggcattttcagcgtgacatcattctgtgggccgtacgctggtactgcaaatacggcatcagttaccgtgagctgcaggagatgctggctgaacgcggagtgaatgtggcactgttgcaaagttag

SEQ ID NO: 184818 - DNA, 192 bp, Klebsiella oxytoca
atgagcacaatgttcgctctggtgataaccgtcggcatgcttattggcggtaatcaggatgttttgctgggtgtatatgacagcgagaaagcatgtgaggaagctgctgttgaacaaggtgtaaagggcgaatgcctgccattgaaaggcgttctggctgaacaccccgccggattcaccgcacagatgtag

SEQ ID NO: 184819 - DNA, 159 bp, Klebsiella oxytoca
atgcagaaacgatgtgcgtattgccgcaaggcactggaggaaggaaaagttgtgaagatgaccattctcatcattcacggcacgcagttagtaccacgtgaaagaacgtattgctcgaaacgttgtggcgaatacgacgccatggccaacgaggcctaa

SEQ ID NO: 184820 - DNA, 1086 bp, Klebsiella oxytoca
atgactgaagagttaacccttaacgttgacggcaaggtctggggcggctggacggatatgaccatcaaccgctctctcgacaatatcgccggagagtttgatttgaccgttaccgcccgctggtctgctgcggctcctcgctccatcaagccggggcagtcctgcaccgttgatatcggcaccgaccgcgtgctgacgggctacattgacgactttattcccagctatgactcggagaatgtctccctgcgcgtcatgggtcgcgacaagaccggtgaccttgtggacagttcagtggtcgataaatccggtcagtggaaaggtcagaagctggagcagcttgcggccaccatctgcaaaccctacggcatcgaggtggttaacgataccgacaccggcgacgcctttggcagcatcaccctcgaacagggtgaaaccggctttgaacttctcgaccggctggccaaacagcgcggcgttctggtgacgtcagacgcttacggtcggctggtcatcacccgcgcatccacccaacgggccggagtggcgctcaccctcggcgacaatattctggctgcacgtggacgcttcagctggcgcgaacgggccagccagtacatcgtcaagggctccgccagcgcgggcggttcaacatgggacgaccagccggtgaagatgatcggcggccgtcagacggtagtcagcgacccggaaataacccgctatcgtccgaagattctggtcaacgaggacagcctgacggtcggcggtgccagcgcccgcggcgaatggcacaaggctcatatgatgggtgaagccaataccaccgaaatcaccgtcgcgggctggcgtgagaacggcatcagcggcccactgtggcagacgaaccggctggtaaaagtaaccgatgccattcagcagctcgacgtcacctggctgattaagtccgtttcctttatggaaggcgatcaggggcggctgaccgtgctgacactggtcccgccagagtcgctggatatgcctgaacagaaagctaaaagtaaaggcaagaaggcaaagacttccgtgggggtgacatgggactga

SEQ ID NO: 184821 - DNA, 453 bp, Klebsiella oxytoca
gtggacggcgccgcctcgaatgaagcggcggatatgcaaagcgaagcccatgccgcatggctgctgcagcgcgcgcgcaaggggatgctggcgcagccgcgctacgcggggggcacctttgagggtggggccgatgcggccacggtggaggatgtagtgcgctggggcagcgccggcggggcgcagatcctcggcttagcgcagagcggcaccctgcaggtcggcatgcaggcggacctcgccatttaccggctggacgatccgcgctacttcggcctgcacgatatggccattgggccggtggcctgcggtgggcgcgccgcgctgaaggcgctactgctcaatggccgccccatcgtggaagacgacgccattcccggtcttgaccttgacgcgatgcgtcacgacgcgctggcggccgtccgtaccctccaacagcgcgccgctgtgtaa

SEQ ID NO: 184822 - DNA, 189 bp, Klebsiella oxytoca
atgcacatcctctttcctgtctaccagctctttggcaccgatgagttgagggcggctgatttttcccggctctgcatccgggtacagttgagcaatagcgatctcaatagccagattcgcgatattctgcgttacggcgcgtttatagcgttcgggtatagcgtgaggggcagcatggggaactgctga

SEQ ID NO: 184823 - DNA, 408 bp, Klebsiella oxytoca
atgtttaaatcgttgaataccgactggctgaagctggcattgctccgggtatttcagtccggctggacggtggtgatcctcgtgggtctgtctctgacgctctgtagtttctacgggcgtcaggcatttgtcgtctggtggttaacgttctccggcgcttttctgatcggggtgagtatctggctcggtaatctcccttaccggttgcttcagccgggccgtcctgcccgcaaatgggtacgttgcgcgtcctggctaatctgggctgtcggtgcttttctgctggcctttgcccctgtcttcgcgaccagtcctggggtcatgctgctcaatctgcttgctgcactgaccataataattctgtattcgtggctggtttgtaagggggtattaaattggatcctgtaa

SEQ ID NO: 184824 - DNA, 495 bp, Klebsiella oxytoca
atgttgtgcggcctgttggtctgccatctgcgccttgtcccgctccagctggaactgctgcagctgtaccttgagtccttccaactggacaagctgctcgggcggcagctgcgccagcttctgctccagcacgcgctgctggtcagcggggttgatggcaccgttgacggtctcgacaatactggccaccgagtcagcggctttcgccgtggtactgtcgttgccgaaccagccgccgacagtgcgaaccagagaaggtccggccttcagcagggcggaggcaatagtggaaagcgttacaggatccaatttaatacccccttacaaaccagccacgaatacagaattattatggtcagtgcagcaagcagattgagcagcatgaccccaggactggtcgcgaagacaggggcaaaggccagcagaaaagcaccgacagcccagattagccaggacgcgcaacgtacccatttgcgggcaggacggcccggctga

SEQ ID NO: 184825 - DNA, 198 bp, Klebsiella oxytoca
atgaaaaaatcacgattcaccgaagagcagattgtttttgccctgaagcaggctgaactggggacgtccgtgccggaggtctgccgtaagctgggtatttccgatgccacgttctatacatggcgcaagaaatacggcgggatttctccttcggagctgaaacacatgcggcagcttgaggaagagaatctcggttga

SEQ ID NO: 184826 - DNA, 294 bp, Klebsiella oxytoca
atgtgtgcgcacggtatcgcgggaaacgcgatgaccatacgtctgcaggcacgtctgcagaatcgactcgttggcgctgtcgccgcattcgacaagagatcgcaaaataaccaggcgctggtcctggtcgagaatgtcacgcatagtcacctcttatttttccttcagctcattttccagaagcagatcgctgacgtgtttcacctggcgaatcgccgggcccagttcgcgcaaatcgccccgcaggttgctcatctccagctgcagctggtgaaggtctttctggctgggtag

SEQ ID NO: 184827 - DNA, 705 bp, Klebsiella oxytoca; identical to SEQ ID NO: 8686

SEQ ID NO: 184828 - DNA, 192 bp, Klebsiella oxytoca
atggcctgcggattgtcgtttacccacgtacggccatcccggccagtgaatgtgcccgcagggatcatcggcaaccattccggcagcggcgtgctggcatccgacaggtcgggaagctcgaagcacagggccagaaattcgagttgtgttgcaggctttggcatggtgctgtccgtcgttaaaggtaactga

SEQ ID NO: 184829 - DNA, 378 bp, Klebsiella oxytoca; identical to SEQ ID NO: 121896

SEQ ID NO: 184830 - DNA, 276 bp, Klebsiella oxytoca; identical to SEQ ID NO: 14803

SEQ ID NO: 184831 - DNA, 636 bp, Klebsiella oxytoca
atgatccgcgatattactggcctcatcagcgatatgaaagacctcgtatctgagcccccgttcgccctgagggtctatgaccagctgcgcgataagtgggaaggcgaccgggcagcacagtctgcaaccaaatccctggtcgataacatcagcgtgagcaccgataccggatttgccagcagcgtcacaccggcatcgacgccggagaccacggcagcgatggagaccaacatcgtagacttccgccgtctggtcattatctccacgctggtcgctcaggctgaagcggtggccaccgcgaccttcgagaccggtcaggatgcgcagaataccggcgaccagctggcggagcgtctcggcgagaccgctgcggaagccgtcgaaagtggcctccgtgagctgtggcgctcccttcgcgaattgcggttcgcggtggtgaatgatgtgcgtatccgcagtatccagctgccggagctgcgccgtgtcaccccggcccggacagtgccggtcatgctgctggcctaccgcgagaccggcgacgcgaagaaccgggacgaactggtgacccgcaaccggctgcgctatccctcctttattacgccttcacagacgattgagatcatcagcaatgactga

SEQ ID NO: 184832 - DNA, 231 bp, Klebsiella oxytoca
atgactaaagcatttgatcgcgccagcgaccttgaaatggaagaacgggaacggctcttaaaccagcatttaaagcgcgttaaagagctgccggatgagtacgggttctgtaacgactgcggcgcagcgattccggcgaagcgactccgggcgctgccgtacgcagcgacctgcttcacctgtcaggccatcagagaacataaggggaagcatgggctgggaaatcattaa

SEQ ID NO: 184833 - DNA, 303 bp, Klebsiella oxytoca
atgggctgggaaatcattaagggtaactgggcgatcatctgggcgctgtttatgtccgccgtgaacgttatccagctcctgctggccaaaacctacgtcaaacgtgaggagctggaattgttgcgtacccgtctgcagggcatcgaaaacactatcgcggggctaccgagccagaaagacctgcatcagttgcagttggaaatgagcaacctgcggggcgatttacgcgaactgggcccggcgattcgccaggtaaaacacgtcagcgatctgcttctggaaaacgagctgaaggaaaaataa

SEQ ID NO: 184834 - DNA, 627 bp, Klebsiella oxytoca
gtgctgaagcctctgctggtgaagcgtggatggtggggccagcagttgatggatgacccgctgacaggtgagacaaagccggtgcagcttggcagcgatcgtcgtctgcgaactatctacgataccaacatgcgcacagcccgcagtgccggtcagtgggaccgcatccagcgcactaaacgcgcaatgccctatctgctctatacgctgggcccgtcccgcgagcaccgcgccgagcacctgaaatgggcggacctctgcctgcccgttgacgacccgttctggcagacacacatcggtcccaatggctggggctgtaaatgcggggtccgtcaggtcagcaaatacgagtacgatcagttgcagaaaaatggcgtcccgcgcaacgtgcagcagctcgacgacagcggacagccaaccggccatgttatccgccagaccgtcccggttcgtaccgaagccccgcaagtcaaacgggtgaagtgggtgaacaagcgcaccggcgaagaggagatggtgccggaaggaattgatcctggctgggactacaatcctggcacgcgccgacaggctgaacttgagcgccagctggccgcgaagcaaagcgccttcgacagtgataactaa

SEQ ID NO: 184835 - DNA, 288 bp, Klebsiella oxytoca
atggaaaagcgccgtatgtggactaagcaggaaattcagttcgttcgtgaaaatgccggaaagctgacgtcacagcagattgccgacaggctaaaccgcacccgtcaggctattcagtctcaggctaaccgctggggcctgtcggttcttgttcaaccagcagacgcgcatgatgcttatctttgtcgagagctttataaagagggactgaccattccggttattgccgaaaagatggaattaagtcgtcgggttgtttcgaatattgttttttcagaatgctattaa

SEQ ID NO: 184836 - DNA, 324 bp, Klebsiella oxytoca
atgcgtttttccagcgaccgctataccggaggttttcagctgtttgcttccgtctgtcagccaggaacgctgaacgtgacggaacgcttccagattgccagcggctctcctgctcagctgcagcagctctggagctatctgtgtctgtacatgcaaggcgagtccgtgccggatgaggcggtgaataaagatcgccctgatttctggtgtccgcgtaaagcggataaatggcctgcagaaatggaacgtgaatccactactgcgccggacagtgaactttctgctctccgcgcctgtagcgaactatctgataagacgggttaa

SEQ ID NO: 184837 - DNA, 417 bp, Klebsiella oxytoca
atgatcggcggccgccagacggtagtcagcgacccggagatcacccgctatcgtccgaagattctggttaacgaggacaacctgacggtcggtggggccagcgcccgcggggagtggtacaagacccggatgctgggcgaagccaataccaccgaaatcaccgtggcgggctggcgggagaacggcatcagcggtccgctgtggcagaccaaccggctggtgaaggtaaccgatcccattcagcagctcgacgtcacctggctgattaagactgtttcctttatggagggcgatcagggacggttaacggtgctggcactggtgccgcctgaatcgctggatatgcccgagctgaaagctaaaagtaagggtaaaaaggcgaagtcaaagacttcagtgggggtgacatgggactga

SEQ ID NO: 184838 - DNA, 426 bp, Klebsiella oxytoca
gtgcaggcgtactggctggatctggagtttggcaaaaagaaaaaagtcacagttaaggcacgaaagaaaaaaactgagaagaagccgcgcagcagcgcaagggaaggggattatatcgccggtgaagacggcaacgtttttgttttgaggacaacttacagcagcgagatcgccgctcagcgtgcagctgcggcaaagtggcagcagctcaaacgcggtgccgccgagttctctatgacactggcctacggtcgcgcagatctgtacccggagatgcacggcacggtatcgggattcaagacggatattaataatcaggactggataattgcgaaggccacgcacacgatcgacgacggcggatttaaaacgcagctggagcttgaagcgaaaatacctgaatggattgcagaaagtgagggttag

SEQ ID NO: 184839 - DNA, 156 bp, Klebsiella oxytoca
atgaacgaagaaaccaattaccgccggttctggcgaaaccttgttatctgctgtgcgctctgctcgctgttgttctggctcccgatgggctatctcgcctttcgcattttctctgtggtgtgggaggcgctgtggttgcttattacaacgaaatag

SEQ ID NO: 184840 - DNA, 186 bp, Klebsiella oxytoca
atgtccctgaccgaaggtcatcttcggttgttcaaattcgttcctgacgaatttgtcgttcacttgccgccttcctgcaactcgaattatttagggtatagatgttttttttcgcgtctggcgaaaagtcgtgtaccggcagaggtgcagtcgtttatagatggagaatttgatggcaagcagtaa

SEQ ID NO: 184841 - DNA, 861 bp, Klebsiella oxytoca
atgaagaacatcctcgccatccagtcccacgttgtgtttggccatgcgggcaacagcgccgctgaatttccgatgcgccgccttggcgccaacgtctggccgcttaataccgtacaattctccaatcatacccaatacggtaaatggaccggctgcgtgatgccgccagcgcatttgacggagattgttcaggggattgccgatattaaccaactgcagcgctgtgacgccgtgctaagcggctatctgggatcggctgaacagggcgaacatattcttggcatcgtgcgtcaggttaaagccgccaatccggctgcgaaatatttctgcgacccggtaatgggtcatccggaaaagggctgcatcgtggcgccgggcgtagcggagtttcacgtgcgctacgcgctgccggcaagcgatattattgcgccaaatctgattgagctggagatcctctgcgggcatccggtggcaaacgttaacgaggcggttttggccgcgcgcgagctgattgctcaggggccggaggtggtgctggtgaagcatctctcgcgtgccggactgagtatggatcgttttgagatgctgctggttaccgcgcaggaagcctggcatatcagccgtccgctggtggattttggcatgcgccagccggtaggcgtcggtgacgttaccagcgggctgctgctggtcaaactgctgcagggcgccactctgcgcgatgcgctggagcacgtgaccgccgcggtttatgaaatcatgctggcgactaaaaatatgcaggaatatgagcttcaggttgtggcggctcaggatcgcattgcgcagccggagcactactttagcgccacccagctttaa

SEQ ID NO: 184842 - DNA, 2076 bp, Klebsiella oxytoca
atgtcaaaggaaaatgcttttatcatacggccaggccacggccagcagttgggggctaatttcgacgggaagggggtgaacttcgcactgttttcagcgcatgctgaacgcgttgagctgtgcttattcgatccttccggtaaaaccgaaatagcccggcttgaactgcctgaatatacagatgagatctggcacggctatgtacccgatctgcagcccggcgcattgtacggttatcgggtttacggaccttacgatccggaaaacggtcatcgctttaatcccaataaattgcttatcgatccctacgcgcgggagctggaaggcgatgttgagtggaacgatgcgcatttcggctacgagttgggccatgaggagagcgacctgagctttgatagtcgcgatagcgcgccatatacgccaaaatgtaaggttatcgacccggatgccttcgactggcagggggaaaaccgtcccaatgtcccctggccgaagacggttatctacgaaacccatgtcaaaggttttacccggcttaatccggcgcttcctcaggagctgcgcggcacatttgaggggcttgggcatcaggcttccgtcgattatattaaaagtctgggcattacttccgtcgaactgctccccatacactggtttcccgatgaccagcatctgctcgatcgggggctgaaaaacttctggggttacaatacgctaggcttctttgctcccgcttcccgctattatggccctgaaggtatagcgggctttcgcaacatggtgcgcgcttttcatgatgccggcatcgaagtgatccttgacgtggtgtataaccacaccgcggaaggcaatgagctgggcccgacgctctcatttaaaggtatcgataatttctcttattaccggacgatgccggatcagcatcgttattacattaatgataccgggaccgggaatacggtgaatacatcgcatccccgggtgctgcagatggttatggattcgctacggtactgggcgcaatcgatgcacgttgacggctttcgtttcgacctcgggactattcttggacgcgagccagaaggcttcgatccgcgaggcggttttttcgatgcggtaacccaggatccggttttatcgaagcttaaactgattggtgagccgtgggatattggccccggcggctatcaggtcggcggtttcccgcctggctggggcgagtggaacgacaaatatcgtgatacggtgcgggaatactggaagggagataacgtctccaacgactttgccgcccgcttactgggctcgggcgatctgtacgatttacgcggtcgtcgtccgtggtccagcgtcaattttattaccgcccatgacggctttacgttgaacgatctggtttcatataacgagaagcataatgaagccaacggtgaggacaataacgacgggcacaacgataatcgttcctgcaactatggcgaagaaggcccaacggaaaatcaggatattattgccgtccgtgaacgccagaagcgtaattttctggcaacgttatttttctcccacggtacgccgatgctgctggccggcgatgagtttggtcgttcgcagcagggcaataataacggctactgccaggacagcgagatttcatggttcaactgggaagcgcagtctgagcgggatcgtgcattacgagacttcacccagcatctgattgcactgcgcgcggagcaaccgcttttacgtcgtgaaagctggcgcgacgggctcgaaatacgctggtttaacgccggcggcggtttgcagcaatcagagcaatgggatgagggttcgaccttaggccttgccatcagtcgacccgatcttgagaaggaggagggcatctggcatgacgtgctgatgctgttcaatccctttgaaggcgatgttccgttccagatcccgcagtttggcgaaggcggctgggttctcgagctgtcgaccgcagaggaaaaaacagacggcgcgattattaccgagacaattgattttgttctggccgggcgcagtattgcgctattcagacggccttag

SEQ ID NO: 184843 - DNA, 135 bp, Klebsiella oxytoca
atgatgagacaggagagtcctggacagagaaccgacggattcggcaagccagaggaaaaatttatgactaaaacagatgacatccttgcgtacattattgtaataatagcgtactactatagtgtacaagcctga

SEQ ID NO: 184844 - DNA, 1434 bp, Klebsiella oxytoca
atgacaataacctgcactctctacaccaacggccagtggcacgatgcggaaggccatgccacttttacccgccacaacccgctgacgcaagaaaacgcctccgttgccagcgccgccagcctggctgacgctcgccgctgcgccgataccgccggcgcggcgtatccgcaatggcgcgatacgatacccgcagaacggcgacgcctcctgctggacgctgccgaagagatgctgcgccgtgaggcgaagtttattgccgcgatggcggccgaaacgggagccaccgcgcactgggccggttttaacgtgcatctggccgccgatatcctgcgcgaagccgccgcattgaccacacaaatcgaaggccaggtgatcccctctaacgtgccgggaaatctggcgttgggcatccgtcagggggcgggcgtcgtactcagcatggcgccgtggaacgcaccattgattctggcgactcgcgctatcgccacgccgctggcctgcggaaatacggttattctcaaaggcgcggagctctcgccggcgactcaggggctaattatcgatgccctggcggcggcgggcttccccgccggcgtggtgaattatctgacctgcactcccgccgacgctcctgcgctggtggagtctctaatagcgcaccccgccgtacgtcgcatcaacttcaccggttccacgccggtaggacggattatcgcccgcacctgcggggagcatctgaaaccggcggtgcttgaactgggcggcaaggcaccgctgctggtgctcgacgacgctgaccttgaacaggcggctgcgggcgccgtttttggcgcattcgccaacgccggacaaatctgcatgtcgaccgagcgcatcattgtggatacggccgtcgcggaagagtttgtggcgctgctggccaggcgcgcggcggccctgcccgccagcctgctcggcccggtggtagagatgaagaccgtcacccgctgcaatgccttgatagaggatgcgctggcgaagggcgcgcgcctgctcacaggcggcacatccaattcgacgcaaatgcgcgccaccctgctcgatggcgtcacccgggaaatgcgcatctggcatgaggaatcgttcggcccggtaaaatcgattattcgcgttcagaacgaagccgaagcgctggccgtcgcgaacgaaagcgaatatggcctctcgtcggcgatatacagtcgggacagcgcccgggcgtggaacctggcgcaaaatctgcaaaccggcatttgccacatcaacggccccaccgtgcacgatgaagcgcaaatgccgtttggcggctgtaaatcatcgggctatggccgctttggcggacgcgcggggattgccgagtttaccgagctgcgctggatcacgctgcaaacgctcccgcgcgagctgccgttttaa

SEQ ID NO: 184845 - DNA, 735 bp, Klebsiella oxytoca
atgcgtcagaaggttatcatggccattcagaagcatgcgcaggaggagtatcctcacgagtgttgtggtgtgattgcgcaacggggacgggtggagcgttactttccctgtcgtaatattgcggataatcccctggatcattttctccttgcgcctgaagattatgtgcaggtagaaaattggggtgttgttacgggaattgtccatagtcatcctgatgcgacgacgcagccaagcgagttggacaaggcgcagtgtgatgcaatgttattaccatggcatatctttagctggccggaaggggatctccgtacaatttttccgcgaggagaattaccgctactggaacgcccgtttgtgcttggacattatgattgctggggattggtcatgagttattttcgccagcagcatggaattgatctggcggattacagagttgattatccttggtgggaagataactacccggataacttctatcgtgattgctggtatgaatgcggctttcgcgagttttatggcccaccgcagcctggcgacatggtaattatgcaggtacaggcgaataagtggaatcatgcaggtattcttcttgaaggtaatatgctacttcatcacctatatggtcatttaagccagcgggtaccttatggtggttactggcgagaaagaacagtaaagattttgcgcttccataacaatgatactgaattgaataataatactttctga

SEQ ID NO: 184846 - DNA, 348 bp, Klebsiella oxytoca
atggcaatagaaacctttacctggcgaacgcaaatacaagcgggtctactgggggattttaattataccgttcgagaggccagttttggcgatgggtatcaacagatcgtaggagatggcctgcattatgaaaagcaaagctggccagtgaccttgaccggagataaagaagagatattagaagtgctagaatttttacggcgccatataacgaagtcgtttatctggaattcaccggtaggggaatccgggctttatcgtgttagcgctgacacactaaaaatttcgccattatcgagtcaggtaatgacggtaaccgctacatttaaccaggcatatgcaccatga

SEQ ID NO: 184847 - DNA, 420 bp, Klebsiella oxytoca
atgtatgcatctaatgatttaactctctcaatgttttactcatctagtattgctgaggaaacaggcaataaaatcgcaacgcttaccgttcaaaccttggggccagttgcggaagttttacaaatcagtaaattgcattgtattactgacgaaaacagaacgaaatattatagtatcggtgagcagtttattgcgaatggttccgaccctcttcttgctgctatcgaaacctggtggcgcgataattcggctactttgatccaggaattaatggtggaagttatggattttatttctggtaacatcaaccaaaatgccacctggattggccaatatggaatgaaaatctttgaaaatgagccagtgctaaaacgtatccctgaaagtgtattgccgaataattactctgcgaacacctga

SEQ ID NO: 184848 - DNA, 129 bp, Klebsiella oxytoca
atgaaaaaaattatgttagtcgtgtttgtgttctgcggagcgttgtctctgtccggatgtattttgcctccaggtggacccggtggtggaccgggcggggggcatttccacgggccgggtcagcgttga

SEQ ID NO: 184849 - DNA, 942 bp, Klebsiella oxytoca
atgctgaataacgatattactctacgtaagctcgagattttccttagctatatggagtcgatgaatatatcaaaaactgcggagttgatgaacatttcatccgttagcgttcatcgtgcacttcattcactggaagacaatttacgctgcactttgtttacgcacaatggccgtaatctctatcctttgcctggcgcctgggttatgcagaaagaggctcgtgaagtcattaatgcaatggaacgctgcgtttatcttacccgcaaagcttcggggtatcattctcaagtgttacgtttagggttactttattcactggttctgaagacagccccgcaaattgttcagggattgaaaaaacgctgtccggaattgacaattgaatttatcatgaattctaataagaaattgttagaagcgcttaatgaagaaaaaatcgatgcggtcctgatatcgacacctgacgattacaatacccagttatttgagacatggacgatattctctgattctatctttctcgcggttccggtaagcgaagccgatagtttatctgcccccgtggatttgcggcatttgcagaataaaaaatttattgctctgagcgaaggtttcgccacctggcggggctttcaggaagcattccagattgccggttttattccagaaatcacggtgcgggtccatgatattttttcattgatgagtatggttaatgctgggatgggttacaccctaataccggggaggatgagcggcctgtttagtcacggtattcgcctgttgccactgcaggaaccttaccgaatggagcaagaaatctcgctggtcttccctcgtagtcaggaaaatcacccgggccttttgtctttgttagccgagtgtcgtatgtacgcaaggaagcttatgctggagaaaagcgagacagagaaaatcccataa

SEQ ID NO: 184850 - DNA, 432 bp, Klebsiella oxytoca
atgtattcattccagcgaatgaaaccaggacaaattgcgctactggcctcactctgtgcccttgaagatgaagaggattttcgcaggaaactgcaggctgataaacctgagcataaagtgggctttgcttttatgacgggaacggcggatgaaataaaaaataagctccaacgctgcgtcatcggctgtgcttttaaacatcagattattacgcgtcaggagcctgccatttttacgttatgccaggccagccatcaggcgctgacccatgctttagctaacaatattaatagcgaacggatcaaaatcaagatagccttagtcagtaatcctggatggcttgccgtctctatctacggcgaaactgtagtctatcagcgattgagtcatgagattatgggattttctctgtctcgcttttctccagcataa

SEQ ID NO: 184851 - DNA, 771 bp, Klebsiella oxytoca
atggaacagctcataaagattttaactggtaactttaccagtaacggtctgattactgcctttgtagtcgtaggtatcgtgtgctggaccgcaagctggctttcaacacatctgctccgcggtaaaattcatagctcagccattgctatcgtcgcgggattgctgctggcatgggttggtggagaattgaccggtggtaaaaaaggtctggcagacatcagcattttcagcggtatcgcgctgatgggcggaggaatgtttcgcgacttcgccattatctccaccgcctttggcgtaaagcttgaagaactgaaaaaagcaggcatggccggcgcgctggcactgattatttcgacagttctctctttttatctcggcgcgctggtcgcatgggcctttggttataccgatgcaatcagtatggcaaccattggcggcggagccgtcaccttcatcgtgggtccggttaccggcgcagcgcttggcgcgagttccgatgttatcgctcttagcatcgccgctggcgtaattaaatccatcgcagtcatgattttgacaccgctggtagcgaaagcagcaggtcttaattcacctgccgccgccattgtctatggcggattaatgggttctaccagcggtgtggccgccggactggcggcaacggaccccaaacttgttccctatggcgcaatgacggcaacgttttataccgggcttgggtgtctgctggctccttccgcgctctatctctctctggcccccttcttttaa

SEQ ID NO: 184852 - DNA, 396 bp, Klebsiella oxytoca
atgattatttacggattgatgttaatgggattgtgtatgttcgccgggctcatcgttggcgatcttcttggcatgctgctggggattacggctaacatcggcggtatcggcttcgcgatgctgtttttagtcatcgtgtcgcaaaaattggtggataaaggattgctctccaggcccgccgaacagggggtagggttttggaatgcaatgtatatcccgattgtcgtcgccatgtccgcaaaccagaatgtgatcgctgcgctcaaaggcggaccggtagcccttattgccggtattggcgccgtcttcatcggcttcctgctgattaagccattaagcaaaatcggcaatcgcggcgtcagggcaaactccgccatcagcgaggagtgcaaataa

SEQ ID NO: 184853 - DNA, 219 bp, Klebsiella oxytoca
atgtctgaagtgaaatccaaagttccgggcgttgtcgacgaagttaaagccgccgaaggagataaaattgaaacaggccaggttgtgattgtactggaagcaatgaaaatgaaaatgcctgttgcatctccggagagtgggttattaaaaaggctagcggtcaatacgggagatcgcgtcaaccctggcatggtattatttgaaatcattgcagagtag

SEQ ID NO: 184854 - DNA, 687 bp, Klebsiella oxytoca
atgacctccctgcagcgacataccttgtgttggcttgaacattcggcgctggaggccatagccgtgcagctggatcatgcctttagcggcctacccaatgtcctgcgtcaggaggcgcggaaatatctgctgagcggtttgctgccgggtattgtgcgccgcggccagcatggagcggagcgtattccgctgggattctgctttccactgcgttggcaggaacagcgattacgcctggccacggaaatagcgttatcagcaatcaaacgctactcaacgccagagcaaacagcatcgcttcccgtaaccgatcgagctcacaccctaagcgcatttagtgcattacgtaaggcatggcgctggcctggtatccagctcggcgtatggggctcggtagcgctggaaattgtcacaccgtggcgttggacggatgcgctttccgatttggatctgcgctttctacccaccgcgcctggcgagctaagcgaatgctggacctgcttgtgtcatatcgaagaacaatttgaattatgtattgatggcgagattcagttatcagatggatacgcaatcaatatcaaagaatggttcagcggaagctcaactctgctggctaaaggagagagtgatgttcaattaagatcgcgacagcaggtctcggcagcaattagaacatatctctgttaa

SEQ ID NO: 184855 - DNA, 1104 bp, Klebsiella oxytoca
atgaacaatcccatcgccacgcttgaatggctgctcgaagcccagccgggtataccctcgctggtggagatgcctcgccgtacgctggatgacaaaggcattgccggaccaacggcggcccacgtcattgaagagatccatacgccgtttaacctggcgctggtgaccttcactaccggcagcagcgcttttcagaatatcgtcggtgtgacgtataacgaactgccgctgcggaccgccgccggaaagcgggccttggcgctctgcagcgtagggacaggccagcatatgctggtgacctacgcgccgctggttaacgtgtttacccgtcaggcgctggaggagagcgggcttcgctggtcgtttttaacccactcctgccgggacgccttactgatcgccctgtgccaacaaccgcctgacgcggtggtgggagagtcctcttttttacgcgccgctctggagcaggcgctaaagatgggcctgacggcccggctacccaagaagctaacgctgataaccgcgggaactccgctggatgaagagttagttccgttggcggcttcgctgggctatacgctacacgacatttacggctgtcaggagttcggctggctggcgcttgatggcgttccgctacgtgaagatatttcgctggttcccgcgcagcaaaatggcgactggcgggagattgtggtgggaggcttgccgaccggcgacagttttcccctctccgggggcggccatctttgcaatccgcagggggaaatccagacctggaagcgccagcgcaccacgccggagtacgacatggttgttatggcaaccacagcacggcatagggagatcgtagagcgcgtggcgcggacaattttgcgtattaagggacgaatttgccatgtgtcaacgcagttgaaaaccgatgcgaacgcaacgcatatccggctctggccgaaggcaatccccggcgaatgcatcaccggacgtccgcctgtggatattatcggtccgcaagcaacggctcagtttgatgctttgctgcaagcccagagagatttacagcagcacgcgaaaaacgatccggcatggtgtaaagcacgatga

SEQ ID NO: 184856 - DNA, 885 bp, Klebsiella oxytoca
atgatggaaaatttacttggccaggggcgtgccgctatcgacctgattgtcgatgagggcagctttgtcgaaaatgccctgtcgggactcaacctgccctacgacgattacggccccggcgctgtagtcggcagcgcgagtatcaatggcgaaatctgcacagtgatagctaacgacgccatgacattcaacccccgctttccggtagtctatgccggcgttatcggcctggaagagggctacaaaatggcgctggcagtctatcgtacgctggcgatggaccaggacaaaccggcaagtaaaaaacgtccgctggtgctgattgtcgataccccagggaatgggccggggaagctggaagagatcatcggcatgaataaagctaccggagcttatcagttggcgctggccgaagcacgtcaggctgggcacccgattatcgccatggtcattggtcgcgcgattagcggcgcatttctctgccacggactacaggccgaccatatcctcagtctgacctcggagttcggcaccatgatccacgtgatgccgttaagcagcatcgcgcgtattacccaccaggacgtagagcgtctcagcgagctttcccgcagcaacccggtgtttgcggcagggccggagttcttctggcagttgggcggcgttgaagagctgatcaaaacgattccggcaatgaaagagactatcgttcgtcacattgatgaagttcgtcggcaaaaagaggccgaaggttttcagtctaccggtccacagggccgcggaatttccggcgaagcgcgcggtggtagaaaaatacgcggcgtgattctggcgcaaatgcgcgctgaattccagcaggtggccgcgcgatatgagccgggctga

SEQ ID NO: 184857 - DNA, 930 bp, Klebsiella oxytoca
atgaatgatcagcgttttctggaggccagcgcccgcactcgcgccgaagggttggtggatgaaggcacatttaccgagctgattggcccagcggcgaaacagattagtccgcatctgccggtgctgggcgaagcagtagagtttgacgatggcgttgtcaccggaatcggcttgctcggtcagcatccggctatcgttatctctcaggaaggccgcttcatcggcggttccgtcggtgaagtgggcggcgcgaaaatggtcggtgcgctgatgctggccgatgagctggcggcgcaaacccgcgacccggcccatcgtcccatcgtgcttatctcgtttgaaaccggcggcgtacgcctgcatgaagctaatgccggtttgctcgcccatgccgaatgcatggatatgctgcaaaccctgcgcggccgtgtaccggtagtggcgctgatcggcagcaagatcggctgcttcggcggtatgggttttgtcgctgcggcgacagacctgatcgtcatgagcgaatcaggcagactcgggctgactggcccggaggttatagaacaggaaatgggccgcaacgagttcgacgcctctgatcgggcgctggtgttccgcaccaccggaggcaagcacaaatatatcgttggtgactgcaactacctgattgccgattcgctggaggctttccaccagcaggcttcgctgattgccgatctgagttggccagagattgaagcaatgcgtcggatcggcagcgaggcgaaagtccgcacgcagatggcgctgacgaggaaaatcaacgaactcgctcccgccgatgcgcgcgatgtctgggcggctgcggggaattcagcgccgcaatcgctggttgatatggatctggaaaccttcctgagcaatgtccaacgcctgtccatggaggaagcatga

SEQ ID NO: 184858 - DNA, 333 bp, Klebsiella oxytoca
atggctttacatcaaatatcacatcatttcagcggcaaaagcgaccgtccgtctctgccgcaaaccgtacactgcggcatcgtaggttccggagatctggaagtgttgctggtacccaaagcactggcaggcggaatcgacatcagcatttgtacaccggtcaccggattcgatgctatctgggaaatcgtcctcacccgttttctcgataacggtccgctgggcgatatgcaggttagcatcaacgataacaacgccacgcccgccgtggtggcgttaagacttcagcaagcattacaacaggccatgcagggagaaaaccatcatgaatga

SEQ ID NO: 184859 - DNA, 1668 bp, Klebsiella oxytoca
atgcttaaagagcacaactggcatcaacttaaggatgataccgcgcagcggctgagccttctggctccgtatttttgtgatggaaagatcgttgatgctaagaataccgtcgccgtgctggaggcgattatccgtagcgccgatcgggtgaatattgaaggtaataatcagaagcaggcggattttctcgcagaatgcctgtgtaaagtcgatcccgagaagatttctggcctgcatatggtgcagtcgtccgtaccgctcagcacgcacctcgatctgttcgaaaaagggatcgctgaaaagctcgatttcgcctacgccggaccgcaggatggtcgcctcgcgcagcttatccagcagggcaagatcaagctcggggcgattcatacctatcttgagttgttcagccgctattttgtcgatcttacgccacgagtatcgctgatcaccgcgttcgaagcggataaagacggtaacctctacaccggttttaatactgaagatacgccggtgatcgccgaagccacccacttccgccaggggatcgtcattgcccaggtgaacaagatcgtcgatagggtgccgcgagtcgatattcccggggactgggtgaatgcggttatcgaagcgccgcgtcctttttacgttgagccactcttcactcgcgatccggcattgatcaccgatacccacgtactgatggcgatgatggcgctgaagggcatatatgccgagtacggcgtcgaacgaattaaccacggcatcggcttctttaccgccgccatcgaactgctgctgccgacctacggcgaggagctggggctgaagggcaaagcctgtacccatatggtgctaaatccgcaccccaccctcatcccggcgatcgagagcggttggatccagtccgttcactgctttggtggcgaactgggtatggaaaaatatgtcgctgaacgccccgacattttttacatcggccaggatggcaccctgcgttccaaccgcgccttcgcccaggccgctggtcattatgccctggatatgtttatcggcggtacgctgcaaatcgataagtatggtaacagcagtaccgccaccgccagccgcgtttccggttttggcggcgcgccaaatatgggttgtgatgccaaaggtcgccgccacatcactcactcctggctcaagtgtggcgaagagttcaacgccacgcagcagcagctgattggcgatatgccgcgcggcaagcgcctggtcgtacagatgcaggagaccttccgtgaaaagcgtcagccggccttcgttgacaaacttgatgcctggaaactggcggaaaaagccggtctcgcgctaccgccggtgatggtttacgccgatgacgtcacccacgtgctcaccgaagaaggaatcgcccatctgcaccgctgcgaaggactggaacagcgaatggcggcaattcgcgccgtcgcgggctacaccgatattggtcttgccgccgatctggctcagacccaggcgttacgcaaagccggtatcgttcaaacgccggaggatttaggcatcgacagacggcgtgccaaccgtcagatgctggcggcgaagagtattcgcgatttggtcgagtggtccggcggactatacaacccaccggctcggttccgtaactggtaa

SEQ ID NO: 184860 - DNA, 1209 bp, Klebsiella oxytoca
atggatatctttgttaagctcttttcgggcattggcaccttttttattgaagatcccaaaatagctattgcacgaatattattaatcattctgggctttattctggcgtggatgggttttcgccgcaaactcgaaccgctgattatggtgccgatgggtttaggcatgattgccgtcaacgctggagtgctttttctcgccggcgggcaaaccgggacgttaattctggacccgatgatcagcgatcctaccgaactggtcaatatcatgcagattaactttctgcagccagtgtataacttgactttcagtaacggtctgattgcctgcatcgttttcttcggcatcggcgcgatgagcgacatcagctttattctgctccgcccctgggccagcatcattgttgcgctattcgccgaagcgggcacctttgccgcgctgctgctggggattgaagtattcggtctccccgccaacgaagcggcttctattgcgactatcggcggcgctgacggtccaatggtgctcttcgcttccttaattctggcgccaaatttatttgtccccattgccatcatcgcctatctgtatctgagcctcacctatgcgggatatccgtacctggtgcgcctgctggtaccgaaaaaatatcgcggtatggaagtggatatcgaataccccaccgtatcgaaaaaagcgaagttcatcttcacgatctgcgcctgcctgctactgtgcctgctgctgccggtcgccgcgccgctgatcctctccttcttccttggcattgccattaaagaagcggagatcgaaccattccagaaactgcttgaaaccaccctgacttataccgcaacgctgttcctcggcctcctgctcggtacgctgtgcgaagcgcaaaccatccttgacccgaaagtcggcatcattctgattctcggcattggcgcgctggcgatttcggcggttggcgccctgctcggcggctggtttatctggcttatctcgaaaggacgctacaacccggcaatcggtatcgcgggcgtttcctgcctgcctactaccgccaaaatcgcgcagaaagaagtcagccatgaaaacccttacgccgtcatcctgcctctggcaatgggcgcgggcgtcagcggcctgattgtttcggccatcgccaccggggtctttatctccacgctattcctgctgaaataa

SEQ ID NO: 184861 - DNA, 123 bp, Klebsiella oxytoca
atgagtatctatttatacacattactaacatatggcatgacgatttttatttcatttgctgtcgtcggaataattgttggtgttaatagggtaatgaataaactgaatatcaccgacgactaa

SEQ ID NO: 184862 - DNA, 891 bp, Klebsiella oxytoca
atgagccaaccaaccgccaacgcagaaagaatcggtgagtgtctgttaaaagcgctattaatggaggtctgcgcctggccaaaaccggggctggtcacgccgaattctcaaggcgcgcatcgcgatatggatatctggctttttattaccagcacttctgcaatagccccttgttttagcgcttgcgcccaggctggagaatatcatcaaggggcactggctgatttatttccccaaatacgttcaatcggtattcaatacgaatccagactgctgcaagcgactcgccaggtgaatactcagcgcggcattctctttgcaggtgcgattctggccgcggctgcgggctggctaacaggtcgcggacagaagctttcctgcgaatcattaagccagtgtgtcgccggaatttgcctcgatctctgccgcaaggattatgccgccctcgcccagcgtgcagcacaaacccatggtgaaaagctctatctacagttcggtatcaccggcgtacgcggcgaggctgaacaaggctttccactggtctgtcatattggcattcccgctctgcgtcaggcgctttcgctagggtttagctggcgtgaagcgctcatccatacgctgcttgcgctgatggctcgctgcgatgataccacggtgctttcacgcgcaggctacagcgcactggacgaaatgaaacagcgcgcccagcggctggtacagttgggaggcatgagtcatcccgccatagagcacgagctcactgaatttaatacatggtgcctggaaaaatgggtcagcccgggagggtcagcagatttattagcgttgaccctggcgatgtattttctgtgctttcaatcgcaagaggatcctaacgaggaagagatatga

SEQ ID NO: 184863 - DNA, 330 bp, Klebsiella oxytoca
gtgtcagaatccgagtcactatctgaatccgaatcgctgtcagagtcagaatcgctgtcggaatccgagtcgctgtccgaatccgagtcactgtccgaatccgagtcactgtcagaatccgaatcgctgtcagaatccgaatcgctgtcagaatccgaatcgctgtcggagtccgtatcgctgtctgaatcggaatcgctgtcggaatcagaatcgctgtcggaatcagaatcgctgtcgctatccgagtcgctgtcagcatccgagtcactatcggagtccgaatcactgtccgcatctgagtcagtttctgaaatcgaagagtgctga

SEQ ID NO: 184864 - DNA, 336 bp, Klebsiella oxytoca
atggatgccgaagacgaaactgactttaccgcaggcgttaactccctgtggcacggttttgagcttggctacatttacgcgcataacaagattgaacgctttaataccgccagctttatcgctaactgcgacgataactgctggatctccgatccgggaaaatatgatatccacaccatccatgcgtcatatctgttcccgaacgttatgaatatgaagaacttcaacatctatcttggcgcctacgcctcctggattgaatccagccctgaccacggcgacggtcaggaagactcccgctacggcggccgtcttcgcttcaaatatttcttctga

SEQ ID NO: 184865 - DNA, 1047 bp, Klebsiella oxytoca
atggcgctaaagctattagccaataataacgcgaagagtgttctcgctgcgggtattagcgcgtccgctaccgttattactgttgggagtggtactggaaggttatttccgcagcctgttccagggcaaagttattttaaattaacgatagttgatgccgccaccaaatcagttacagaaatagttcatgtcacatctatttctggggatgttatgactgttcagcgtgcccaggagggaacgttaggccgagtctggtctacaaatgatattgttgcgaatatgatgacagccggaactcttgatttattggcgccaatagattctcccgtttttactggtgacccaaaagcaccaactccggcagtcggtgataatgataccagcattgcaacaacagcttttgtaaaaagagcaattggaaacgctaccggcagactgcaaagaataatagttatggaatcatctggtgtgtatacgccagcaactgatattaatgctattgaggtaattgttacaggagcgggaggatcggggggagggtgtgcaggaaacagcactagccagaccatatccggagcaggcggtggtggtggcggaaccgctataaaatatatgccggtaacagcaggaacagaatacccagtagtcattggtgtcggtggcgcttctgtttctggcgctacaggagggaattctggcgggaatactacattcaatggcaacattattggctatgccggcggttttggtgcttacaacgcaataacatctacatcaggaggtgtcggtggtctggcgtctggtggggatgtgaatatttctggtggtgccggatctgatggccagagcggtccatttcttatggcaggaaacggcggtggtacattctggggaagtggtggacgcgccggatccggtggtggactgcagggatatgcatatggagccgggggaggtggtgcttatgacggagcattgacaggaacagcgtacccttctggtgccggtaaaaatggtgtggttgtcattaaggaatactcgtga

SEQ ID NO: 184866 - DNA, 321 bp, Klebsiella oxytoca
atggggttcccgtcaccggctacggattacattgaaatcacgttaacagtgaattctctgtgcagcatcacagcaaactcgcgagttatctcaaccgaccgtgggtatgttgttctggacttgtctctaaaggttaagcaggggagtattctgcttatacgttcgggtggagaacttcagtttgcaaagctaatgggtagatcgttcattacggtagaaggagaatcgattgaaggagatgccatggatgaggttgaagtgctcggagttgcaacgcacgtgatcaacgatatgaggcaggatgattgccccgcaatttaa

SEQ ID NO: 184867 - DNA, 288 bp, Klebsiella oxytoca
atggcctttaaagtatcagcagtaaaaactgtccagatttattatctcggaggatttctgtgtgaaaaggatatcaatattgacctcatttactcagtagaaagcgtcaggcaggatgatgcaggtcaagttaaagcctcagtatctgttcgatacaatgacgcggcaaaggttaatgtaggcgagtatcctgtcactctggatacgtcatcctcaaaaccgtggactgagcaggcagaatatcagcttatgcaaactgatgaatttgctggagctgtagctgtgtaa

SEQ ID NO: 184868 - DNA, 2886 bp, Klebsiella oxytoca
atggcactaacccttttggctacaaacaatgcagaaagcgcgctggcttctgctatcagcgcaaccgacacgtcgctgatcgttagcgctggaactggtgccgagttccctgatgctgtggcaggcgagagctactttaagctcactatcaccgatgccgccaccggctcacaggttgagatcgtgaacgtaacagctaaggctggggacatcttcacgatcgagcgtgcgcaggaaggaacgctggcgcgtgcatgggcggccaacgatatggttgccaacatgatgactgctgacacgctgaatgtgatcgctgattttgcaaaacaggcatctgactcagcggaagaagcgcaggggtatgcacttagcgcgtcagagtttggcgacaataaatcaacctttgctgatacgaccgccggccttgcagcgacgacaagtgggcaatatttccgagtcccgcaaggtgttggtaatgttcttgcattccgttattacaaaaacaactcaggcgtagcacaagaggttgctgagtaccccgggcagggatctataactaataccatacgcgaattccctacgctggctgcggcacaggctgatgcagacgctggaaatattctgtctggctctactgcattttaccgtagccctgatgatagcgctcttgctgttgaggtgatgaacgttagcgggacgctgcagcctaccggtcgaaaaatgccatcctcgatgccaatgggttatcaatctgctacagctgtaagtagcagtgcggctaatgccattgctatcactatcccgggattattagtggatggcagtttgatttattttctgtctcctatattgaacacctcatcagtcaatgtgactgtaactgatgctaagggtaattctgtaataagagctgtacagaaacaaaataacgcgccattagtcggaagtgaattgctgctaaaccagccagcattaatggaattccgcactgggactgctaacaattttgtccttgtagcgtctggaccagtagccgctgaacttgcgtcaagaatttccgcgcttgaattaaatagcgtagcgttattgtctggcgttgccaataccgcggacgcctacacagcatcagcatcagcgataccaggtctggttgcctctgaccgcgttttccttttcactccaagtgcgacgaacacgacacggacgccgaccttatctgtgaacggcggcactgcgcggcaaatcaaacaggcaaatggtgctaacgttgccgctggggacctggtttctggctacccttatttattaaaattcaattttgcatcggctgactttcgtatgctcacatacccagcggaccggacgcgtctgctcagcggccagcagaaggccaccgtaacaagcgatgctacaagcccaaacgctatatctttaacaatcccaggtcttatcgcggatggcacacaaatcacattcgagccagctgtcgccaataccggggcggtgacgctgctaatcaccaacatgtatggcgacaccgtgactcgcaccctgatgaaaggggctaacactcctctcgtcggtggcgaactgaggtacgccatgccggtttctatcatgttcaggggggctccacagaacaactttaagctcctatatgctggcgaccctaccacggatatacagaccctatcgaacgacgttacgacgctcaaggggtcgctgacagacccttatgctgctctggcggataaactcgtgggcaccgggatatcatcagaccagtcaccattcggtactataacttggtccgcgggggttaagagcgtcactaagcggcagatcatttgtacgtctgtcgggtcttctgttggcgttggggccggctctactggcggtggtgcggcaggtgccgcttatgcaccgaacacactgttcgtcaacgccttgaaggaagagcttaagcagtacggcgagtttgacgtcatcgatgacaaccagtgcataccaactcaggcgattcagcagttcgctgcccagctagcgaattcgccttattcaacctccgactttgttttgattgtagggggtatgaatgatgcgccagttggtaacttcaacatggggcgcacattcccaggtcaacaaacgtctctcgagtcgctggtagacttgtgtctggcacgaggagcgattccaatcatttgcactactccacatcataatgtggaaatgtctcagacgtaccccacaatccccggtggtaacccgctgttctggccgttcaggacatataatgtcacaagtacatatgtcttcgacgccgttgcaaataccatcacgcagagtaactttgctaacccgaattatggcggcaatattctgaagcctgggcatactctgcgcgtagaaagcggagacaataccggcaactatactatcacggccatttcctctgaccggaataccataaccgtccaagagacaatcccggtaagtggaagctactcgacaacggtcaggcactttaacctgcagtccatcgctgaggatattctttaccctgcaccgtcggtttcctttgtaacaaaagactggtccggcagcggcgttaaggtacagggagatgtgcggttcgaaatggtgaataatatgcaaagggtcgtcgcacgcaaaaaaggcgcgttcctcgcagactgtgaaaagtcgttctttaagtatggcgtagaggttggtggttactcgtcggtatataacgtcccagctggaaactacaaccacatgaacgataacgggtacaccgtaactttcgactacacgctgaaagttgccgcaaggaagattgccaatctcatattcggagataaatattactctgcagcataa

SEQ ID NO: 184869 - DNA, 717 bp, Klebsiella oxytoca
atgagcatcgacaacaagcttaattttgcctcaagcatgaacaggtttactgaaagaaagattgacaatgcgcttcaaaaatcagggaaggttcttccggcgagtgtggttaagcaaacagggaatatgatcaccgtatcctttgagctaagggatatcccatatgttttgccgcaagtgactatccccttatttggccctcaatatattcgttaccctatgcagccgggagacaaggggattgttatccctgcagatacttacattggcggcgttagcggtcagggaggcggcattgcggatatgacaccgccagcaaatttaagcgcccttgttttcttgccgatcagcaataccgagtggcagggcgtcgacgggcaggtggtgacggtatacgggccggagggtgtaacgctgcgcgacagcggaagcaacaccacgttcctcctgaagcctgacagcatcgctatttccacacctgacagcttcactgtaaccgttggcgggacggttttctcacttacgggtagcaaatggagcctttcaggagaggcagggcacctgcaggattcagtggccagtaccagcccggcaatcatgcacgccgggtggcaatcgcttaaagactggttaaacagccacgaccattttaacggcaacggtgggaataataccggggggccgacttcaacgtttaacgggagtatcaccgagtga

SEQ ID NO: 184870 - DNA, 1038 bp, Klebsiella oxytoca
atgagattttatgatattgagataaccattcctgctgaaggcgcttctccggaaagaacgataaaatacagtagccataagaacggagtttacaacccaggcgccctgatgattgagtttgatatcctcaggtacggtgaatcaactccccagggcgagactcacctgaccatctggggtattggcccaaaagaaatgcagcaggctcgccagaatttctttggcaaaaaaattaaaatattccttgggatgaaagatgggctgccattggctggaaaggttaccgcgccaaaactggtattggatggcgtgataaatcaggtctttggtaactggcagggaattgagttacgacttgacttcataatcgtggttggccctgtccagaacgtgcaaaataacaaaccagtaccccttcctttaacctttgactggaaggaggggcagaagctttctgtggccctcacgcaatgttttatgaacatcagagggtatacgtttaatatcaacataagcgaccggctaatccttaatcattaccgggggctgttttgtgatgacattgtcaccctagccaaggatcttaatgctttttcacgttccagaattcgcgatggtggatactctggtgtagagatcgcaatagtgaatggtaatgagatccgggtctgggataacgattatgataatcacccggataagacatctgtttccagtgcagtggccagaagcaacagccctacccaaatagatttcaaggatttaatagggcagccaacatgggtggcatttaacacaatcagcatggcgtgcgtaatgcgcggtgatattcaggttggtgaccacatcctgatgcctaaaaaaagcactccgttgatacaggcctcttcgtactctcaatatcgagaagactccgcctttactggcgactttattgtgaactcagttcgcctgttaggaaatagcaggcaaccaacggcagaagcatgggtaacaattattgaggcttcccctttcattaaggcaggtaatgcatga

SEQ ID NO: 184871 - DNA, 279 bp, Klebsiella oxytoca
atgacaacccagaattatccgtttaccggcaatgatcgtcaaagcatgacatttacaccgatcctcgatggcaccgtgtataactgccaggtcaaatggaacattgccgggctgaggtggtatgtcctcataacagatggctctgggaataccattcttaataccccgctcgttggctccgtgcttaacggtggaataaatattatctccggagtgtttaattcgtcctcattgtactggcgcgaacagaatggacagattgaggtaaacagctcatga

SEQ ID NO: 184872 - DNA, 711 bp, Klebsiella oxytoca
atgggattcacgcgtgaaatgtataagctggggtttgaaatatccccagtaatactttgcggaggggtagcgcaggctattcccggtggtatgcttccagtagtcgctttgacgcaaagtgcaagctttatcacggggctactcggaggggccataaacctaaccgaccttgataaatatttctgccactggcgcccggttcagggcgccacaatggttgattacgaaattgccagataccctttcgccaaccaggtagtagctgcgaatgccttgcttgcccagcctttacgcgtttcgttggtaatggaggctccggtcaatgaaaacacaggggcgatgacaaaactcgttaccatgagtgctttgcaatcagtccttcaggcgcattctaacttaggcggcacgtttattgttgccaccccatccgttatctatagcaactgcattttgcgtgtcgtgagggatattacatccggtaacgactccttaccacagcgttcatggatatgggatttcgagcagccactgataaccgataatggcgcagagcaggccgtgaacaattttttaaacaagattggcgctggggatatggtaactgacccatcctggaccaataccgcaaatgctcttggcaacacgcctctcggtagttctgtttcggaagcaatcaccgggctattgggtaagttgggggtagggccatga

SEQ ID NO: 184873 - DNA, 1890 bp, Klebsiella oxytoca
atggtagctaagtcgatcgtcgacattgacgtaaatgacgacaagtttgtcgcgtttatggaaaggtttcgcgagtaccagagcgcgctggatgatttaccggaagcctggcgggtagctgccgttggtattggcgaaagcagcaagcagaccgaaaaagccaaaggtgaggcgaaggagttaggcgcggagtttaatgccgtggccgaggccattctgactatcaacagtggtatcgatcggctcaataccaacctggaagactcgaagaaaaagcaggacgaattcaacaaaagtactcgctctgcgaagggcttcctcagcgatgcaacgaaagacgctaaatcgctggcagggcatatcaaggaagcgacgtccagccttctgtcatggggtggtattgtcgggatatttaccggcgtccttggcgttggcggcctgttcggcatcaaccggctggctgccaccaccggtgcccagcggtttacttctctcgggcttgggacgagtatcggcgcacttgattccaccgctataaactaccagaaagcgctgggtaatccggcgggtacgctgggcgctatccgcgattcacaaatggacctgtcgaagcgctggacgtttcaggcgatggggattaacaatcccgaccaggacccggcaaaactgctcccgcagatgatccgtaatgcgcgcgatatcttcgtgcaaaacggcagcacgctgcagggcgcacaggcgcacggcctgaccaacttctttacgctggacgacctgaaccgcttcaaaaacatgagcgatgaggagatcaccgccatggagaagcgcgcgcagcaggatgcgcgcatgcttcaaattaccgaccagcaggcgcgccagtggcaggattttaacgtccaactcgactacagcagccagagcataagaaacacgtttgtgcgcgggctggggccgctcacgccgcaactgagcaagctgtctgatgcgctgtcaggcgcgatcgataccgtcctgaaatctcctgagcttggtaaatggattgatggactggcgcgcggtattgaaagatttggcaactacctgtcttctcctgaattcaccagtgatgttctcagtttcatggatggtgttaaaaggcttgggcagtctgttgctcgattaatagacctattcgctggaaaaattagcctttcagagtttatgtctggctcgtccagcattctcggcagttcaacaagggaagatgctgaaggtggtcagccctacgttccgggtagtgagagtgatccgcgcgtttggggtgttcttaaatggggtaaaatggcatcaggtgtcgcccccacgcagtatgatgattatttttccgaggcttctaaaaagtacaatgtcgatcctcggtggctaaaagcgatcgctgccggggaatcctcatgggatcagaacgctgttagtaaagcgggcgcaaaagggttgatgcaggtgatgcctggcaacttcctgccgggagaaaatccatatgacccgcgggacaacatcatggccggcgcgagagtatttaaagatggccttgactgggcaagccgtaatgctggaggcgactttgacgaagcattgcgttattacaatggtggagtccgccgcggtagtgctgaaaacaaggcttatcccggcaggatcagggaaaagtatgctgcgatgtatggcacatcgaagagcaatgaacctgcgggtaatgataactccgaggttgctaaaaatacccagaaaaccaatcagcttctgcagcagattattgatacaggtatcagcggtaacaattcaggtattacgatccaaaacaataccggcgggaatgcagtggtaacttccacgcaattgggggctaggtaa

SEQ ID NO: 184874 - DNA, 576 bp, Klebsiella oxytoca
atgaaaatcgacaagaaactaaatctggtcaccaacattacccgcgaagacggctcgatcgtctacctgcatgtgacgccttttccctatgaggtggtggaagaacactgcgtgttgcttgggaacctctttaccaatttcgttactcaagtcgggccactcggctctgctcgcgtagctgcaatgatgctgcgttcgaggctgaaaaaagcgcaagcagagggtttgccggatgggccgaccatcgttgatgaaattcagcgactgacggtcgttatccataacgtcggtggccagtggaaaaccacgcctcttgaggtggcattcaatcagggcattatcgagcctgatgagtatcgcgaggtcgaaggcgaagtggttttttttatggtttcctctgctattcagaaggcaaacctgatcgcgccgaccgtggggacggtaatcaaaatgtacgatgggcaactaacctcatcgagcgttacggcgttccgcgattcgttgcagacgtcgaagccggataccgataccccgacccagaatgccccgccggaaacgtcatttataccctcttag

SEQ ID NO: 184875 - DNA, 177 bp, Klebsiella oxytoca
atgaactatctcattaaccggctgaaagagccatcaacctggcgcggcatcatcctggtcattgctggcgtatttggttatcaactgcctccgggcattcaggaaaccgtcatcgctggcggcgtagcgctagctggcgttgttggtgcggtgatgccggacagcgttaagaaatga

SEQ ID NO: 184876 - DNA, 543 bp, Klebsiella oxytoca
atgacagcagatcagattatcgagggcatcctcggtaaagaagggggttacgtaaataacccgaatgataaaggcggcccaacgcgctggggtatcacgcagactaccgcccgcgcatatggctatagcggcgatatgaaggcgttaccacgggatacagccaaagcaatttatctgtcgcaatactggactgaaccgaagtttgaccgcatcgccgagttgtcgccagccattgcgcaggagttatgtgataccggcgtgaacatggggccacgtgtcgccagtacattcctgcagcgctggttatcagctctgaatatgcagggcaagctatatccggacctgaagccggacggcgcgatcggcaatatcaccatcgccgccctgaaaagttatctcgctgttcgtggcaaagatggtgaaaccacactgctgaaggggctgaattgtagccagggcgcccgctatcttgagcttgctgaggctcgggcggcaaatgaagattttctatatggttgggtaaaggaaagagtggaactatga

SEQ ID NO: 184877 - DNA, 312 bp, Klebsiella oxytoca; identical to SEQ ID NO: 180938

SEQ ID NO: 184878 - DNA, 687 bp, Klebsiella oxytoca
atgattaacactcaatacctccagtatgttcgccagcagctgatagtggccaccgccgatctgagcggcgcgacgaaagggcaactggtagcctttgcggaaaacgcgatgtttgaggcgacagcgcgtagcagtaaacggatgaaggttgtcgatccggcgacaggtagaatggttcggccgagtaatccgccggtgcccgggaagcagtcccgcgccaaaggttccgcaatcgccctcgttatgcccgttgagtactcgacagccagctggcgccgcgcgctgctgtcgctggaagagcatcagaaagcctggctgctctggaactacagcgacaatatccgctgggagaaccaggagacgatcacccggtgggcatgggagcaattcaacgagaagctggccggcgtgcgcattgcaaaaaagacagtcgatcgcctgcgtcaacttatctggctggccgctcaaaatacaaagaaggaaataactggtagagggcatcattaccctcccgcctctatggtgggaataaagccagataactggtgccacaattattcggattattggctgactatgatggacatctatcaggggcttgatagccaggcattactctctgtttctcgatcacgttcacaacaaaaggcgactttttcgcagcaaggtattgcaaaagtcaattaa

SEQ ID NO: 184879 - DNA, 669 bp, Klebsiella oxytoca
atgagcatttatcaacgcattaacggcgctgactggcgcaacgtatgggtggttggcgatctgcatggatgctatacgctgctgatgaatgagttggacaagattaagttcgatccggccagcgatctgcttatttccgttggcgacatggttgaccgcggagctgagaatgttgagtgtctggatctgataaatcagccgtggttcagggctgtgcgtggcaaccatgagcagatgatgatagacggcctgtcagcgcacggaaacgttaatcactggctggttaacggcggaggatggttctttaaccttgattacgacaaagagcgcctggccaaagcccttacgtataaggcagcagaattacccctcatcattgagctgaaaacaggtgataaaaaagtcgtaatttgccatgccgattatccgcatagtgaatatgagtttgataagccagtcgatgcgcatctggtgatctggaaccgcgaacgcgtcagtgatgctcaagatggaattgtgcatgagataaccggcgcgcacctgtttattttcgggcataccccggcgcgccagcctctcaaatacgctaaccagatgtatatcgatactggtgcggtgtttggtggtcgcctgaccttgctacaggtgcagagtggtgatcatgcgtaa

SEQ ID NO: 184880 - DNA, 258 bp, Klebsiella oxytoca
atgtcgaagtggaacattgcagcacaaagcccggaagagcaggacaaggttaacgtcgatctcgccgcgtccggcgtcgcctacaaagagcgtctgaacatgcctgtagttgccgagttagtggcaagagaacaacccgagcatcttcgcgagtatttttgggaaaggttaaatttttaccgcctgcagagcgaacaactcccgcgggcatccgatccgcgttacatcgagatggccagccagaacgagaaaaaatag

SEQ ID NO: 184881 - DNA, 624 bp, Klebsiella oxytoca
atgaccaaatcaaccataaccagagagcgtattcagcgaattatccgagccattgatagtgaatcttatgacgaggaagaaatcagagagtggttaagttctgatgaaatcatggagctttcccgcatggcgctggccgcaatggacagcgagccggtgggcattgtccgatatgtcggtgctggggagaggaaaagcattcacgtctcgctttatcagcagttaccggaaggtgtcgaactattcactgccccgcagccagcgccggtagtgccggatgaaaagcccatacctaacccgctgagcatgtacgcggttgatgctgttgctgctatagccgaggtgaagggctggaacgcctgccgcgcagccatgatccaggctgaacctgtaacgacggctaacaagttgggcaactctccggtaattggcattgacccggcatccggtccagaccgcaccgttgaggttcgctacgttgctcctcccggttacgtgatggtgcctaaggagccgacgagagcgatgattttgtcagcgatgcgagacaacgaaacgggagaagtggcggaaatttatgatttgatgcttacagcggcccggaaggagatgaaaggtgaataa

SEQ ID NO: 184882 - DNA, 201 bp, Klebsiella oxytoca
atgatcaccgggaccacgaattacgatgaagtacctgatgttcgttgcgccttgtgcggcggttattacaaagccgatgctccggaaagtcacgaatgcgaagaggaagcccatgacgaaattgaatgtgatatctgcggcttcaaaagcacagatccggacggtgctcactactgctgcgaggataactccgatgactga

SEQ ID NO: 184883 - DNA, 588 bp, Klebsiella oxytoca
atgacaatcacactacaggcagtaaacgagctcattcagtcgctggagagtgcgggcgagctgtcgatcaaagagacaaaggttatggcgctggcgaaagcttaccagcagctggctgcggagaatgtagttaggcaggaattcgtcaaaatctgtttccgcgcagcagcagacggcgcatcactggatggcgctgatgttcaggagataggtgagcgcctcgggctgtttggtcgcgaaacataccaaccgatgctgcacgggtatatctgtggtcatgaggctggggaagatagcgtgtatgtgatgaaaagcgctcccgccaccgacgcctacctggccgggattaaggctgatgggcgcgcagagggtatcaactttgcagcaagccgccttgcagccgctttcaatcacggattcgttgataagccaatggcagaagtttttgacgtggtgcgcatgattctgactgcaaaagaggatttggcgaacgacccggtcttagccgccgatggcctgtcaggagagtacgcagaaaaatccctggctgaatgggaagccgaactgcgcgagggggccgacaaatga

SEQ ID NO: 184884 - DNA, 225 bp, Klebsiella oxytoca
atgaaattcatcaaattaacccaaaactcaacggtagagtttcaggggaaatatggccgtgaatctgaaacggtttatgactctgtattcattgcgcccgaccacatagaaagcatgaccccggcaggccttacttatctcaggatggtctctggagagcgcatctcggtgcgggaaaccccggaagaaatcatcgccatgcttaccgcaggagccgccaaatga

SEQ ID NO: 184885 - DNA, 852 bp, Klebsiella oxytoca
atggaactggaagaaaaaatcactgccattgagcggatgcttgatcagctgagtaagccaccggaagacatcccgaattgcgaggtggttatcgagcgcgtctgttgcgaaaaacatggcgagtatgagcagcgcaagcggatcctgaccagcagcatcatcaacctgccatcaccgccgacacgctgcccgggctgtctggaagacgaactgaattttctgaaggatgaaaaggcccgctgggataagcgagttcgccagcaaactgcagaaaggctgcttcgccagttggacataccagagcgcttctccacgtgcactctggacagctacaagcctgttgggaaggattctgagcgagcattacgggtctgccaggcctacgcatcgaaatggactgatcgcctccagcaggggggcgggttagttatgtgtggcaagcctggtaccggtaaaaaccaccttgcgctggccattgcccgttatgtgattgagcaccaccaaagctcagtcattttcacgacggcgctgaagattgcccgggagtttaaatcgacctggtcaaaaacagccacgcgcactgaggatgaggtgatccgctacttcacgaagccagaccttctgattgtcgatgaggttggtgtgcagtttggcagtgaagccgagaagatgatcatgtttgaaatcatcaacacccgctacgagcgtctgaagccgacgatcctgatcagcaacctgccaaaggatgagctgacgcagtttatcggcgagcgcgtcatcgaccgcatgaacgacggcggcggctgcacgatttcgtttacctgggaaagctatcgggagaaccggtcatga

SEQ ID NO: 184886 - DNA, 222 bp, Klebsiella oxytoca
atggagagttcaacaacacgcaacaaagtggaggcccggagaattgaaagctggttgcacagccagatagcagaactgggaaccacgaatatcgccaaagtagccggggtgaacaaatcgacggtaagtcgctggcgggaaaacctgcttccgaacatgtcgctgcttctggccatcctgatttctaaccgagcgggagagaaaggggactttgaggcatga

SEQ ID NO: 184887 - DNA, 246 bp, Klebsiella oxytoca
atgaacccaatgcaatttgcaatcgaagctgtaggtggtcaaaccgcagcggcacgcttatgcggtctgtctaatgttgctattcacaagtgggtaaagaacgcggcattgcctcgcactgagtacacagagaaaaccaactattcacagctcttggctgacgcatcaaaagggcagtttacggcggagtggctactccaagccgcgaaccctgaccgaattaaacacggatcacatgccgcctaa

SEQ ID NO: 184888 - DNA, 357 bp, Klebsiella oxytoca
atggatgaagatcacaacggctttaaactgaggttttctaaagcgacactgcgcagggtaggagctaataccgatgggactggcgtgctgtgctttccggcagtaggaaacagtatggagccgttcataccagatggcgccactgtagcgattaactgcaacgataaacgcatcgtagacggcaaagtctatgcggttaaccaggacggctggaagcggttgaaaatgctttatcgcgttggccctgacagggtaagtctgcgcagctacaacagccaggagcatcctgatgaagagcatcccttatcagatattgagatcgtcggtcgtatgttctggtcttcaatgctgtggtaa

SEQ ID NO: 184889 - DNA, 429 bp, Klebsiella oxytoca
atggaaagaatttcttttttatacgtctcccaaatctttcccggaaagatagctcgctcgctgaactatccacagccatggataaagccagatgaacaatcagggaaaattagcattgatgtttcttttggtttaattattaaaacaaaagtcaattaccgtgtagatgtcgatatgttctttggggagcaaaggattgagtttggtagcaaccaatccttgcattcagagcccatagttgctggaacgacgtccggaaatgaatcagttagtatcgaaaatatgtcactgatgaatataaatgtaaaaaatgaaggaatttataaagttacactatctttacatgtaatggatgataaacaagaaaaaagtatcatgatccataatagcgaatgtttcttctatttatcaaaggaatggaaaatctga

SEQ ID NO: 184890 - DNA, 351 bp, Klebsiella oxytoca
atgtcgaattccgcctatctcagaagagttcagccagttgctaatgaagacttcaatgtgcatactttaaagcacggtaacggtaatggcgggggtgatgacatgcaatcaagagtagcaaagcttgaatctgatattgaatacatcaaacgtgacattgctgagaccaagtcagatataaagtccattgactcaagactatcaaagatagaaacaggaattagttctgctaaaacaacgattaaagcgtctgctgctgtagttagtcttgtgtttgctttttgcgcttacattttcggaagttacgtttcaaagatcctagatgccttaaatgggcttgtgctcaagtag

SEQ ID NO: 184891 - DNA, 207 bp, Klebsiella oxytoca
atgattagtcagcactacggtacccagaccgttaaccgcggcgccgttctgccagggatgctggttaagcatcgggaaagcacctggacagcatcagcaaataaacgcggccgcctctacctgcatcgcgggattgagcggacttacacaaccgacttgctggttgaagtttatctgaacgggttgggacaaggtctcagccggtaa

SEQ ID NO: 184892 - DNA, 972 bp, Klebsiella oxytoca
atgagcgaaataatggatttagtcggcattgagaaaaagaacgcgatggcggttttcaccaataacgaccagctcgacccgcttatcgaactaatcgaaaaagaggctcgcagtctggtgccggacgtgaccaccaaaaaaggccgtgacgccatcgcatccatggctcacaaggttgcgcgctctaaaacttacatcgacaacgcaggtaaagacctggtcgctgagctgaaggcgctgccaaagcaaatcgacgaaagccgccgcgttgtccgtgaacgtctcgatgcgctgaaagatgaagtgcgccggccgctgaccgaatgggaagccgagcaggaacgcattaaggccgaagaagccatgctagcccttcacgtcgaagcactggccatgaatgaagagttcgatcggcagcgggcttctcggattgagtctgaccacgaaatggctctgctgatgaatgacgctttcgaccgtgagcaggctgagaagaaagcagaagccgaacgccagcgcattttccgggaagaagagatggttcgtcgggcggaagagaaagcgaagcgcgaggcagcagaacaggcgcagcgtgagattgacgccgcggcagccagagagcgcgaagcaattttggcaaaagagcgcgcagaacgcgaacagcgagaagcagctgaacgtgctgagcgtgaaaagcaggccgctgtagaagcagagcgtcgcaaagcgcaggaagaagccgatcgcatccgccgtgaggcagagcagcgcgaacaggcccgtctggctgaagaaaagcgcaaagcagatgagcaggcgcgccgagaagccgacgtgaagcatcgcaaaactgtcggcactgacatcgtcaaagccctagtggccaattccagcattacccgggatcaggctatcgaggtgctcaccgcgattaaagacggccgcattcctcataccgctatcagttactga

SEQ ID NO: 184893 - DNA, 624 bp, Klebsiella oxytoca
atgatctggcatgacgtcgagcaaaacggggaagagtgggatgctcttcgccttgggaaggctaccgcttcaaacttcggcctgattatggctaacgatggaaaggcgtttggtgagccagccaagcgttatgcgcttcagttagctcttgagcagattaaagggtgcaagtctgagtttggcttctcaaacgagcatatggagcgcgggcacgaacaggagccaattgcccgcatgctgtacgaagaaatgaactttgtcgacgtggataacggcggtttctttgatcacgaaacatatggtgatagtccggacggactcgtaggccaggacggagtgattgagattaagtcggtcattgccgccactcactacgccaccctcacccgaggctccttcgatccggcttacagatggcaactaatcggccaccttgattgctctggccgggattgggttgacttcatcagctactgctctgatttccctgacgggaagcagctcattgtttaccgcctgtcggccgctgagtgcgaatcagagataagccgccttcgtgcgagaaggaatgagtttctctcccttgtggcagaaaccaagcgaatgatactggagctcgaatga
